United States Patent Application Publication US 2006/0134663 A1 - sequence listing, part 70

SEQ ID NO: 184020 - DNA, 1654 bp, Homo Sapiens
  misc_feature (430)..(439): n is a, c, g, or t
  misc_feature (1284)..(1284): n is a, c, g, or t
ttgggaattctcttgtatgatcgttgaccttttataatcttctgtaggctatctttcaaacactggcatcagaatattttttataagtttgtgtttaaacagcttagttggtccccccccactcccaagagacttgggtttagttatagctttaagtaaaatttaaaaataaaatgtttttcaggaaacttcgtatctaatggtttgtaaattcaaggtgcaaaaagttgatttaaaccatttgcagagttgaactctattatgaaaataaatttgctacggtatgaggaagaaataaaacttgtgtaatgttggtcataatactgctataaatataataaagggttatgtagaattgaactgacactattatttgtgaatcttgatttcagttttttatgtaggcacttcatacactggtttgatgggnnnnnnnnnncctccctaaaagagaaagtaaaaaactattctaacaatggattattttgatttagcttgctttttaaaaaaatcttttcaacttgttttacttaatcttgcctagtcacaaaataagatgtgcacccatggtttggagagttcctatattagctgagcagtgagatacactatttccaaacggtgcacacctacagtagctttggaaatgagccaatcactgttttacttaatggttcttatcagcatgcaaatattgcttgaaagttatttccttattcactgttttgttagtccattttgttaggaaacattaattcctaaaaatttgttcagaataattaaaagtgaacatttggtgctgatactcaaaaacctacaaatgtagccatttaaaaagtaacatgtttttctcccctgctcattgcctgggagaatggaattttatataactacctttctttgcaaaaataacggtcgtgtcgagttggtggtgattttggcattccatcttgcactggtttctagtataggcttagaaataattggtcaggtaataatctttccagtcaagttgcaagggatgcttatttctcttcaaaaaaagacatcctgcgggattgagtagaaaattttaggtcagttttgggtgcttatttgtaatatttttcctactacattggagtttagcagttctttttttctggatccagatacaagtgtcatggtttatcttacagtgggtgaaactgactttcttttggttgggtgggtgaggatttcttaggcctgatagaatatatattctgtgaagtttgttaatgtacatattagattgtattgganttttttttcttgaattgcaaatggtattattagataggttatttccagttttacttcatgacaaattacctagagtaaacctacttaatactcccatggattctatgaaagtttaatgggatcagaaattggtgacttataagggggaagatattctaccatatttttataatagcttattattcatgtttcttgtctgaaggacactcaagttacagagcaaaatttctataggttgactagaatgttcataagcatggtcttccagttgcaggaaagatcatgttctatctgtggacacttactgtcctctaccacagctacgtgccagagttgttttccacagttcttataaagggcatgacttaag

SEQ ID NO: 184021 - DNA, 3485 bp, Homo Sapiens
  misc_feature (2995)..(3011): n is a, c, g, or t
ctttgtacaaaaaagttggcacagttattccagagattgaaggaataaaagctgaagcaaaagccctggatgacatgtttgaatcaagcactttgtctgatggtcaagctattgcagaccaaagtgaaataataccaacattgggccaatttgaaaggactcaggaggagtatgaagacaaaaaacatgctggtccttcttttcagccagaattctcttcaggagctgaggaggcattagtagaccatactccctatctaagtattgctactacccaccttatggatcagagtgtaacagaggtgcctgatgtgatggaaggatccaatcccccatattacactgatacaacattagcagtttcaacatttgcgaagttgtcttctcagacaccatcatctcccctcactatctactcaggcagtgaagcctctggacacacagagatcccccagcccagtgctctgccaggaatagacgtcggctcatctgtaatgtccccacaggattcttttaaggaaattcatgtaaatattgaagcgactttcaaaccatcaagtgaggaataccttcacataactgagcctccctctttatctcctgacacaaaattagaaccttcagaagatgatggtaaacctgagttattagaagaaatggaagcttctcccacagaacttattgctgtggaaggaactgagattctccaagatttccaaaacaaaacctatggtcaagtttctggagaagcaatcaagatgtttcccaccattaaaacacctgaggctggaactgttattacaactgccgatgaaattgaattagaaggtgctacacagtggccacactctacttctgcttctgccacctatggggtcgaggcaggtgtggtgccttggctaagtccacagacttctgagaggcccacgctttcttcttctccagaaataaaccctgaaactcaagcagctttaatcagagggcaggattccacgatagcagcatcagaacagcaagtggcagcgagaattcttgattccaatgatcaggcaacagtaaaccctgtggaatttaatactgaggttgcaacaccaccattttcccttctggagacttctaatgaaacagatttcctgattggcattaatgaagagtcagtggaaggcacggcaatctatttaccaggacctgatcgctgcaaaatgaacccgtgccttaacggaggcacctgttatcctactgaaacttcctacgtatgcacctgtgtgccaggatacagcggagaccagtgtgaacttgattttgatgaatgtcactctaatccctgtcgtaatggagccacttgtgttgatggttttaacacattcaggtgcctctgccttccaagttatgttggtgcactttgtgagcaagataccgagacatgtgactatggctggcacaaattccaagggcagtgctacaaatactttgcccatcgacgcacatgggatgcagctgaacgggaatgccgtctgcagggtgcccatctcacaagcatcctgtctcacgaagaacaaatgtttgttaatcgtgtgggccatgattatcagtggataggcctcaatgacaagatgtttgagcatgacttccgttggactgatggcagcacactgcaatacgagaattggagacccaaccagccagacagcttcttttctgctggagaagactgtgttgtaatcatttggcatgagaatggccagtggaatgatgttccctgcaattaccatctcacctatacgtgcaagaaaggaacagttgcttgcggccagccccctgttgtagaaaatgccaagacctttggaaagatgaaacctcgttatgaaatcaactccctgattagataccactgcaaagatggtttcattcaacgtcaccttccaactatccggtgcttaggaaatggaagatgggctatacctaaaattacctgcatgaacccatctgcataccaaaggacttattctatgaaatactttaaaaattcctcatcagcaaaggacaattcaataaatacatccaaacatgatcatcgttggagccggaggtggcaggagtcgaggcgctgatccctaaaatggcgaacatgtgttttcatcatttcagccaaagtcctaacttcctgtgcctttcctatcacctcgagaagtaattatcagttggtttggatttttggaccaccgttcagtcattttgggttgccgtgctcccaaaacattttaaatgaaagtattggcattcaaaaagacagcagacaaaatgaaagaaaatgagagcagaaagtaagcatttccagcctatctaatttctttagttttctatttgcctccagtgcagtccatttcctaatgtataccagcctactgtactatttaaaatgctcaatttcagcaccgatggccatgtaaataagatgatttaatgttgattttaatcctgtatataaaataaaaagtcacaatgagtttgggcatatttaatgatgattatggagccttagaggtctttaatcattggttcggctgcttttatgtagtttaggctggaaatggtttcacttgctctttgactgtcagcaagactgaagatggcttttcctggacagctagaaaacacaaaatcttgtaggtcattgcacctatctcagccataggtgcagtttgcttctacatgatgctaaaggctgcgaatgggatcctgatggaactaaggactccaatgtcgaactcttctttgctgcattcctttttcttcacttacaagaaaggcctgaatggaggacttttctgtaaccaggaacattttttaggggtcaaagtgctaataattaactcaaccaggtctactttttaatggctttcataacactaactcataaggttaccgatcaatgcatttcatacggatatagacctagggctctggagggtgggggattgttaaaacacatgcnnnnnnnnnnnnnnnnngaaattttgtatatataaccattttaatcttttataaagttttgaatgttcatgtatgaatgctgcagctgtgaagcatacataaataaatgaagtaagccatactgatttaatttattggatgttattttccctaagacctgaaaatgaacatagtatgctagttatttttcagtgttagccttttactttcctcacacaatttggaatcatataatataggtactttgtccctgattaaataatgtgacggatagaatgcatcaagtgtttattatgaaaagagtggaaaagtatatagcttttagcaaaaggtgtttgcccattctaagaaatgagcgaatatatagaaatagtgtgggcatttcttcctgttagtggagtgtatgtgttgacatttctccccatctcttcccactctgttttctccccattatttggaataaagtgactgctgaagatgactttgaatcc

SEQ ID NO: 184022 - DNA, 2466 bp, Homo Sapiens
ttgggttaccctaataggaaatccttggccagatgacctgttgtctaccaaagaaagctgggtagaagcaactcctagacaagttgtagagctctcagggagttcttcgattccaattacagaaggctctggagaagcagaagaagatgaagatacaatgttcaccatggtaactgatttatcacagagaaatactactgatacactcattactttagacactagcaggataatcacagaaagcttttttgaggttcctgcaaccaccatttatccagtttctgaacaaccttctgcaaaagtggtgcctaccaagtttgtaagtgaaacagacacttctgagtggatttccagtaccactgttgaggaaaagaaaaggaaggaggaggagggaactacaggtacggcttctacatttgaggtatattcatctacacagagatcggatcaattaattttaccctttgaattagaaagtccaaatgtagctacatctagtgattcaggtaccaggaaaagttttatgtccttgacaacaccaacacagtctgaaagggaaatgacagattctactcctgtctttacagaaacaaatacattagaaaatttgggggcacagaccactgagcacagcagtatccatcaacctggggttcaggaagggctgaccactctcccacatagtcctgcctctgtctttatggagcagggctctggagaagctgctgccgacccagaaaccaccactgtttcttcattttcattaaacgtagagtatgcaattcaagccgaaaaggaagtagctggcactttgtctccgcatgtggaaactacattctccactgagccaacaggactggttttgagtacagtaatggacagagtagttgctgaaaatataacccaaacatccagggaaatagtgatttcagagcgattaggagaaccaaattatggggcagaaataaggggcttttccacaggttttcctttggaggaagatttcagtggcgactttagagaatactcaacagtgtctcatcccatagcaaaagaagaaacggtaatgatggaaggctctggagatgcagcatttagggacacccagacttcaccatctacagtacctacttcagttcacatcagtcacatatctgactcagaaggacccagtagcaccatggtcagcacttcagccttcccctgggaagagtttacatcctcagctgagggctcaggtgagcaactggtcacagtcagcagctctgttgttccagtgcttcccagtgctgtgcaaaagttttctggtacagcttcctccattatcgacgaaggattgggagaagtgggtactgtcaatgaaattgatagaagatccaccattttaccaacagcagaagtggaaggtacgaaagctccagtagagaaggaggaagtaaaggtcagtggcacagtttcaacaaactttccccaaactatagagccagccaaattatggtctaggcaagaagtcaaccctgtaagacaagaaattgaaagtgaaacaacatcagaggaacaaattcaagaagaaaagtcatttgaatcccctcaaaactctcctgcaacagaacaaacaatctttgattcacagacatttactgaaactgaactcaaaaccacagattattctgtactaacaacaaagaaaacttacagtgatgataaagaaatgaaggaggaagacacttctttagttaacatgtctactccagatccagatgcaaatggcttggaatcttacacaactctccctgaagctactgaaaagtcacattttttcttagctactgcattagtaactgaatctataccagctgaacatgtagtcacagattcaccaatcaaaaaggaagaaagtacaaaacattttccgaaaggcatgaggccaacaattcaagagtcagatactgagctcttattctctggactgggatcaggagaagaagttttacctactctaccaacagagtcagtgaattttactgaagtggaacaaatcaataacacattatatccccacacttctcaagtggaaagtacctcaagtgacaaaattgaagactttaacagaatggaaaatgtggcaaaagaagttggaccactcgtatctcaaacagacatctttgaaggtagtgggtcagtaaccagcacaacattaatagaaattttaagtgacactggagcagaaggacccacggtggcacctctccctttctccacggacatcggacatcctcaaaatcagactgtcaggtgggcagaagaaatccagactagtagaccacaaaccataactgaacaagactctaacaagaattcttcaacagcagaaattaacgaaacaacaacctcatctactgattttctggctagagcttatggttttgaaatggccaaagaatttgttacatcagcaccaaaacc

SEQ ID NO: 184023 - DNA, 1403 bp, Homo Sapiens
ctataaaagccaactttgtacaaaaaagttggcataactgaacaagactctaacaagaattcttcaacagcagaaattaacgaaacaacaacctcatctactgattttctggctagagcttatggttttgaaatggccaaagaatttgttacatcagcaccaaaaccatctgacttgtattatgaaccttctggagaaggatctggagaagtggatattgttgattcatttcacacttctgcaactactcaggcaaccagacaagaaagcagcaccacatttgtttctgatgggtccctggaaaaacatcctgaggtgccaagcgctaaagctgttactgctgatggattcccaacagtttcagtgatgctgcctcttcattcagagcagaacaaaagctcccctgatccaactagcacactgtcaaatacagtgtcatatgagaggtccacagacggtagtttccaagaccgtttcagggaattcgaggattccaccttaaaacctaacagaaaaaaacccactgaaaatattatcatagacctggacaaagaggacaaggatttaatattgacaattacagagagtaccatccttgaaattctacctgagctgacatcggataaaaatactatcatagatattgatcatactaaacctgtgtatgaagacattcttggaatgcaaacagatatagatacagaggtaccatcagaaccacatgacagtaatgatgaaagtaatgatgacagcactcaagttcaagagatctatgaggcagctgtcaacctttctttaactgaggaaacatttgagggctctgctgatgttctggctagctacactcaggcaacacatgatgaatcaatgacttatgaagatagaagccaactagatcacatgggctttcacttcacaactgggatccctgctcctagcacagaaacagaattagacgttttacttcccacggcaacatccctgccaattcctcgtaagtctgccacagttattccagagattgaaggaataaaagctgaagcaaaagccctggatgacatgtttgaatcaagcactttgtctgatggtcaagctattgcagaccaaagtgaaataataccaacattgggccaatttgaaaggactcaggaggagtatgaagacaaaaaacatgctggtccttcttttcagccagaattctcttcaggagctgaggaggcattagtagaccatactccctatctaagtattgctactacccaccttatggatcagagtgtaacagaggtgcctgatgtgatggaaggatccaatcctccatattacactgatacaacattagcagtttcaacatttgcgaagttgtcttctcagacaccatcatctcccctcactatctactc

SEQ ID NO: 184024 - DNA, 934 bp, Homo Sapiens
  misc_feature (739)..(758): n is a, c, g, or t
tttgtacaaaaaagttggtgccttccaagttatgttgagtgcactttgtgagcaagataccgagacatgtgactatggctggcacaaattccaagggcagtgctacaaatactttgcccatcgacgcacatgggatgcagctgaacgggaatgccgtctgcagggtgcccatctcacaagcatcctgtctcacgaagaacaaatgtttgttaatcgtgtgggccatgattatcagtggataggcctcaatgacaagatgtttgagcatgacttccgttggactgatggcagcacactgcaatacgagaattggagacccaaccagccagacagcttcttttctgctggagaagactgtgttgtaatcatttggcatgagaatggccagtggaatgatgttccctgcaattaccatctcacctatacgtgcaagaaaggaacagttgcttgcggccagccccctgttgtagaaaatgccaagacctttggaaagatgaaacctcgttatgaaatcaactccctgattagataccactgcaaagatggtttcattcaacgtcaccttccaactatccggtgcttaggaaatggaagatgggctatacctaaaattacctgcatgaaccgtaagtggtcctttagaaagaatggactaccgtgctataacaactactagacaccttcattttacggctgtggtatcggcagtttagggtatggagcaagtaatattgtgtgnnnnnnnnnnnnnnnnnnnnccttccatgtagcatctgcataccaaaggacttattctatgaaatactttaaaaattcctcatcagcaaaggacaattcaataaatacatccaaacatgatcatcgttggagccggaggtggcaggagtcgaggcgctgatccctaaaatggcgaacatgtgttttcatcgtttca

SEQ ID NO: 184025 - DNA, 1017 bp, Homo Sapiens
ctttgtacaaaaaagttggcttattctctggactgggatcaggagaagaagttttacctactctaccaacagagtcagtgaattttactgaagtggaacaaatcaataacacattatatccccacacttctcaagtggaaagtacctcaagtgacaaaattgaagactttaacagaatggaaaatgtggcaaaagaagttggaccactcgtatctcaaacagacatctttgaaggtagtgggtcagtaaccagcacaacattaatagaaattttaagtgacactggagcagaaggacccacggtggcacctctccctttctccacggacatcggacatcctcaaaatcagactgtcaggtgggcagaagaaatccagactagtagaccacaaaccataactgaacaagactctaacaagaattcttcaacagcagaaattaacgaaacaacaacctcatctactgattttctggctagagcttatggttttgaaatggccaaagaatttgttacatcagcaccaaaaccatctgacttgtattatgaaccttctggagaaggatctggagaagtggatattgttgattcatttcacacttctgcaactactcaggcaaccagacaagaaagcagcaccacatttgtttctgatgggtccctggaaaaacatcctgaggtgccaagcgctaaagctgttactgctgatggattcccaacagtttcagtgatgctgcctcttcattcagagcagaacaaaagctcccctgatccaactagcacactgtcaaatacagtgtcatatgagaggtccacagacggtagtttccaagaccgtttcaggaattcgaggattccaccttaaaacctaacagaaaaaaacccactgaaaatattatcatagacctggacaaagaggacaaggatttaatattgacaattacagagagtaccatccttgaaattctacctgagctgacatcggataaaaatactatcatagatattgatcatactaa

SEQ ID NO: 184026 - DNA, 1014 bp, Homo Sapiens
ttggggtgtttcatatatacggctctaaccttctctctctgcaccttccttctgtcaatagatgaaacaaatacttcatcctgctctggaaaccactgcaatgacattattcccagtgctgttgttcctggttgctgggctgcttccatcttttccagcaaatgaagataaggatcccgcttttactgctttgttaaccacccaaacacaagtgcaaagggagattgtgaataagcacaatgaactgaggagagcagtatctccccctgccagaaacatgctgaagatggaatggaacaaagaggctgcagcaaatgcccaaaagtgggcaaaccagtgcaattacagacacagtaacccaaaggatcgaatgacaagtctaaaatgtggtgagaatctctacatgtcaagtgcctccagctcatggtcacaagcaatccaaagctggtttgatgagtacaatgattttgactttggtgtagggccaaagactcccaacgcagtggttggacattatacacaggttgtttggtactcttcatacctcgttggatgtggaaatgcctactgtcccaatcaaaaagttctaaaatactactatgtttgccaatattgtcctgctggtaattgggctaatagactatatgtcccttatgaacaaggagcaccttgtgccagttgcccagataactgtgacgatggactatgcaccaatggttgcaagtacgaagatctctatagtaactgtaaaagtttgaagctcacattaacctgtaaacatcagttggtcagggacagttgcaaggcctcctgcaattgttcaaacagcatttattaaatacgcattacacaccgagtagggctatgtagagaggagtcagattatctacttagatttggcatctacttagatttaacatatactagctgagaaattgtagcatgtttgatacacatttgatttcaaatgtttttcttctggatctgctttttattttacaaaaatatttttca

SEQ ID NO: 184027 - DNA, 1277 bp, Homo Sapiens
caaatacttcatcctgctctggaaaccactgcaatgacattattcccagtgctgttgttcctggttgctgggctgcttccatcttttccagcaaatgcccaaaagtgggcaaaccagtgcaattacagacacagtaacccaaaggatcgaatgacaagtctaaaatgtggtgagaatctctacatgtcaagtgcctccagctcatggtcacaagcaatccaaagctggtttgatgagtacaatgattttgactttggtgtagggccaaagactcccaacgcagtggttggacattatacacaggttgtttggtactcttcatacctcgttggatgtggaaatgcctactgtcccaatcaaaaagttctaaaatactactatgtttgccaatattgtcctgctggtaattgggctaatagactatatgtcccttatgaacaaggagcaccttgtgccagttgcccagataactgtgacgatggactatgcaccaatggttgcaagtacgaagatctctatagtaactgtaaaagtttgaagctcacattaacctgtaaacatcagttggtcagggacagttgcaaggcctcctgcaattgttcaaacagcatttattaaatacgcattacacaccgagtagggctatgtagagaggagtcagattatctacttagatttggcatctacttagatttaacatatactagctgagaaattgtaggcatgtttgatacacatttgatttcaaatgtttttcttctggatctgctttttattttacaaaaatatttttcatacaaatggttaaaaagaaacaaaatctataacaacaactttggatttttatatataaactttgtgatttaaatttactgaatttaattagggtgaaaattttgaaagttgtattctcatatgactaagttcactaaaaccctggattgaaagtgaaaattatgttcctagaacaaaatgtacaaaaagaacaatataattttcacatgaacccttggctgtagttgcctttcctagctccactctaaggctaagcatcttcaaagacgttttcccatatgctgtcttaattcttttcactcattcacccttcttcccaatcatctggctggcatcctcacaattgagttgaagctgttcctcctaaaacaatcctgacttttattttgccaaaatcaatacaatcctttgaattttttatctgcataaattttacagtagaatatgatcaaaccttcatttttaaacctctcttctctttg

SEQ ID NO: 184028 - DNA, 1052 bp, Homo Sapiens
cctataaagcccactttgtacaaaaaagttggcggctctaaccctctctctctgcaccttccttctgtcaatagatgaaacaaatacttcatcctgctctggaaaccactgcaatgacattattcccagtgctgttgttcctggttgctgggctgcttccatcttttccagcaaatgaagataaggatcccgcttttactgctttgttaaccacccaaacacaagtgcaaagggagattgtgaataagcacaatgaactgaggagagcagtatctccccctgccagaaacatgctgaagatggaatggaacaaagaggctgcagcaaatgcccaaaagtgggcaaaccagtgcaattacagacacagtaacccaaaggatcgaatgacaagtctaaaatgtggtgagaatctctacatgtcaagtgcctccagctcatggtcacaagcaatccaaagctggtttgatgagtacaatgattttgactttggtgtagggccaaagactcccaacgcagtggttggacattatacacaggttgtttggtactcttcatacctcgttggatgtggaaatgcctactgtcccaatcaaaaagttctaaaatactactatgtttgccaatattgtcctgctggtaattgggctaatagactatatgtcccttatgaacaaggagcaccttgtgccagttgcccagataactgtgacgatggactatgcaccaatggttgcaagtacgaagatctctatagtaactgtaaaagtttgaagctcacattaacctgtaaacatcagttggtcagggacagttgcaaggcctcctgcaattgttcaaacagcatttattaaatacgcattacacaccgagtagggctatgtagagaggagtcagattatctacttagatttggcatctacttagatttaacatatactagctgagaaattgtaggcatgtttgatacacatttgatttcaaatgtttttcttctggatctgctttttattttacaaaaatatttttcatacaaatggttaaaagaaacaaaa

SEQ ID NO: 184029 - DNA, 1443 bp, Homo Sapiens
  misc_feature (126)..(166): n is a, c, g, or t
  misc_feature (1147)..(1177): n is a, c, g, or t
  misc_feature (1211)..(1237): n is a, c, g, or t
  misc_feature (1333)..(1342): n is a, c, g, or t
ttggtgctgctttgctttccttcctcgctacttcctaaaaagcaacaaaaaagtttttgtgaatgctgcaagattgttgcattgtgtatactgagataatctgaggcatggagagcagattcaggnnnnnnnnnnnnnnnnnnnnnnnnnnnnnnnnnnnnnnnnncgtgcacatgtgtgcctgcgtgttggtataggactttaaagctccttttggcatagggaagtcacgaaggattgcttgacatcaggagacttgggggggattgtagcagacgtctgggcttttccccacccagagaatagcccccttcgatacacatcagctggattttcaaaagcttcaaagtcttggtctgtgagtcactcttcagtttgggagctgggtctgtggctttgatcagaaggtactttcaaaagagggctttccagggctcagctcccaaccagctgttaggaccccacccttttgcctttattgtcgacgtgactcaccagacgtcggggagagagagcagtcagaccgagctttctgctaacatggggaggtagcaggcactggcatagcacggtagtggtttggggaggtttccgcaggtctgctccccacccctgcctcggaagaataaagagaatgtagttccctactcaggctttcgtagtgattagcttactaaggaactgaaaatgggccccttgtacaagctgagctgccccggagggagggaggagttccctgggcttctggcacctgtttctaggcctaaccattagtacttactgtgcagggaaccaaaccaaggtctgagaaatgcggacaccccgagcgagcaccccaaagtgcacaaagctgagtaaaaagctgcccccttcaaacagaactagactcagttttcaattccatcctaaaactccttttaaccaagcttagcttctcaaaggcctaaccaagccttggcaccgccagatcctttctgtaggctaattcctcttgcccaacggcatatggagtgtccttattgctaaaaaggattccgtctccttcaaagaagttttatttttggtccagagtacttgttttcccgatgtgtccagccagctccgcagcagcttttcaaaatgcactatgcctgattgctgatcgtgnnnnnnnnnnnnnnnnnnnnnnnnnnnnnnnggtattaagtcgttgcctttatttgtaaagctgnnnnnnnnnnnnnnnnnnnnnnnnnnntaaaaaggaaaatgtttcagatgtttatttgtataattacttgattcacacagtgagaaaaaatgaatgtttcctgtttttgaagagaagaataannnnnnnnnnctctacggagaggtacagtgtttatattttggcagccttcctgaagtgtaaaattgtaaatatttttatctatgagtaaatgttaagtagttgttttaaaa

SEQ ID NO: 184030 - DNA, 1961 bp, Homo Sapiens
  misc_feature (1635)..(1689): n is a, c, g, or t
actttgtacaaaaaagttggcacccgccagtctgtgcgctgagtcggagccagaggccgcggggacaccgggccatgcacgcccccaactgaagctgcatctcaaagccgaagattccagcagcccaggggatttcaaagagctcagactcagaggaacatctgcggagagacccccgaagccctctccagggcagtcctcatccagacgctccgctagtgcagacaggagcgcgcagtggccccggctcgccgcgccatggagcggatccccagcgcgcaaccaccccccgcctgcctgcccaaagcaccgggactggagcacggagacctaccagggatgtaccctgcccacatgtaccaagtgtacaagtcaagacggggaataaagcggagcgaggacagcaaggagacctacaaattgccgcaccggctcatcgagaaaaagagacgtgaccggattaacgagtgcatcgcccagctgaaggatctcctacccgaacatctcaaacttacaactttgggtcacttggaaaaagcagtggttcttgaacttaccttgaagcatgtgaaagcactaacaaacctaattgatcagcagcagcagaaaatcattgccctgcagagtggtttacaagctggtgagctgtcagggagaaatgtcgaaacaggtcaagagatgttctgctcaggtttccagacatgtgcccgggaggtgcttcagtatctggccaagcacgagaacactcgggacctgaagtcttcgcagcttgtcacccacctccaccgggtggtctcggagctgctgcagggtggtacctccaggaagccatcagacccagctcccaaagtgatggacttcaaggaaaaacccagctctccggccaaaggttcggaaggtcctgggaaaaactgcgtgccagtcatccagcggactttcgctcactcgagtggggagcagagcggcagcgacacggacacagacagtggctatggaggagaatcggagaagggcgacttgcgcagtgagcagccgtgcttcaaaagtgaccacggacgcaggttcacgatgggagaaaggatcggcgcaattaagcaagagtccgaagaaccccccacaaaaaagaaccggatgcagctttcggatgatgaaggccatttcactagcagtgacctgatcagctccccgttcctgggcccacacccacaccagcctcctttctgcctgcccttctacctgatcccaccttcagcgactgcctacctgcccatgctggagaagtgctggtatcccacctcagtgccagtgctatacccaggcctcaacgcctctgccgcagccctctctagcttcatgaacccagacaagatctcggctcccttgctcatgccccagagactcccttctcccttgccagctcatccgtccgtcgactcttctgtcttgctccaagctctgaagccaatcccccctttaaacttagaaaccaaagactaaactctctaggggatcctgctgctttgctttccttcctcgctacttcctaaaaagcaacaaaaaagtttttgtgaatgctgcaagattgttgcattgtgtatactgagataatctgaggcatggagagcagattcaggnnnnnnnnnnnnnnnnnnnnnnnnnnnnnnnnnnnnnnnnnnnnnnnnnnnnnnncctgcgtgttggtataggactttaaagctccttttggcatagggaagtcacgaaggattgcttgacatcaggagacttgggggggattgtagcagacgtctgggcttttctcacccagagaatagctctcttcgatacacatcagctggattttcaaaagcttcaaagtcttggtctgtgagtcactcttcagtttgggagctgggtctgtggctttgatcagaaagtactttcaaagagggctttccagggctcagctcccaaccagctgt

SEQ ID NO: 184031 - DNA, 1623 bp, Homo Sapiens
  misc_feature (42)..(53): n is a, c, g, or t
  misc_feature (1142)..(1182): n is a, c, g, or t
ttggctacttttggagttaggaacacaaatcagtaaatgcannnnnnnnnnnnaacaaaaactaaagcacctggttttttggagtatagtttccaggtgcgccacaggccttctgaaacgttttccttcggatttttctttccccaggtgagctgtcagggagaaatgtcgaaacaggtcaagagatgttctgctcaggtttccagacatgtgcccgggaggtgcttcagtatctggccaagcacgagaacactcgggacctgaagtcttcgcagcttgtcacccacctccaccgggtggtctcggagctgctgcagggtggtacctccaggaagccatcagacccagctcccaaagtgatggacttcaaggaaaaacccagctctccggccaaaggttcggaaggtcctgggaaaaactgcgtgccagtcatccagcggactttcgctcactcgagtggggagcagagcggcagcgacacggacacagacagtggctatggaggagaatcggagaagggcgacttgcgcagtgagcagccgtgcttcaaaagtgaccacggacgcaggttcacgatgggagaaaggatcggcgcaattaagcaagagtccgaagaaccccccacaaaaaagaaccggatgcagctttcggatgatgaaggccatttcactagcagtgacctgatcagctccccgttcctgggcccacacccacaccagcctcctttctgcctgcccttctacctgatcccaccttcagcgactgcctacctgcccatgctggagaagtgctggtatcccacctcagtgccagtgctatacccaggcctcaacgcctctgccgcagccctctctagcttcatgaacccagacaagatctcggctcccttgctcatgccccagagactcccttctcccttgccagctcatccgtccgtcgactcttctgtcttgctccaagctctgaagccaatcccccctttaaacttagaaaccaaagactaaactctctaggggatcctgctgctttgctttccttcctcgctacttcctaaaaagcaacaaaaaagtttttgtgaatgctgcaagattgttgcattgtgtatactgagataatctgaggcatggagagcagattcaggnnnnnnnnnnnnnnnnnnnnnnnnnnnnnnnnnnnnnnnnncgtgcacatgtgtgcctgcgtgttggtataggactttaaagctccttttggcatagggaagtcacgaaggattgcttgacatcaggagacttgggggggattgtagcagacgtctgggcttttccccacccagagaatagcccccttcgatacacatcagctggattttcaaaagcttcaaagtcttggtctgtgagtcactcttcagtttgggagctgggtctgtggctttgatcaaaaggtacttttcaaaagagggctttcccagggctcagctcccaaccagctgttaggaccccaccccttttgccttttattgtcgacgtgactcatccagacctcggggaaagagagcagtcaaacgagctttctgctaacatggggaggtagcaggcactggcataacacggtagtgttttggggaagtttcccaagtctgct

SEQ ID NO: 184032 - DNA, 1357 bp, Homo Sapiens
  misc_feature (290)..(318): n is a, c, g, or t
ttggtgagtatggaaaaggtctgttctctagttttgtccagttcagtttactgaaggaatatatttaattatattcatatatttaacaaataaaaatatgttgaattttcgtattgtttgccactgagggttcagatgatagacctcaaaaaatcgaaaatactggttgaaatttgtagcatccatttagttattctttttgacctaaataacttaatagtttattaaatctaaggttagctaaatatgtagctaaccttatttgttttctttcctaacaactctgtctnnnnnnnnnnnnnnnnnnnnnnnnnnnnnccccacttataataataataaagataatttttctgccataataacagatctaaaagcatagaggcaactaccatattgactactttctaattccatttgattcatgttttcactgggaatttggagaaaatcaacccagaagcctactggttattgacttggagttgggtaggaacctagcctcgggtttatcctgcttgcagtggtcatggtgaatggagaccatcggattgggatctttgccaagagggcaattcaagctggcgaagagctcttctttgattacaggtacagccaagctgatgctctcaagtacgtggggatcgagagggagaccgacgtcctttagccctcccaggccccaacggcagcacttatggtagcggcactgtcttggctttcgtgctcacaccactgctgctcgagtctcctgcactgtgtctcccacactgagaaaccccccaacccactccctctgtagtgaggcctctgccatgtccagagggcacaaaactgtctcaatgagaggggagacagaggcagctagggcttggtctcccaggacagagagttacagaaatgggagactgtttctctggcctcagaagaagcgagcacaggctggggtggatgacttatgcgtgatttcgtgtcggctccccaggctgtggcctcaggaatcaacttaggcagttcccaacaagcgctagcctgtaattgtagctttccacatcaagagtccttatgttattgggatgcaggcaaacctctgtggtcctaagacctggagaggacaggctaagtgaagtgtggtccctggagcctacaagtggtctgggttagaggcgagcctggcagcagcacagactgaactcagaggtagacaggtcaccttactacctcctccctcgtggcaggctcaaactgaaagagtgtgggttctaagtacaggcattcaagctgggggaagaaagctacgccatccttccttagccagagagggagaaccagccagatgatagtagttaaactgctaagc

SEQ ID NO: 184033 - DNA, 1904 bp, Homo Sapiens
ttggagaagccttatgagtgtaatgagtgttggcgaagctttggtgaaaggtcagatctaattaaacatcagagaacccacacacgggagagaagccataccactgtaacgaatgtggggaaaatttcagccgcatctcacacttggttcagcaccagagaactcacactggagagaagccatatgaatgcaatgcttgtgggaaaagcttcagccggagctctcatctcatcacacaccagaaaattcacactggagagaagcctcacaaatgtaatgagtgtggaaaaagtttctgccgtctctctcacctaatccaacaccaaaggacccacagtggtgagaaaccctatgagtgtgaggagtgtgggaaaagcttcagccggagctctcacctagctcagcaccagaggacccacacgggtgagaaaccttatgaatgtaacgaatgtggccgaggcttcagtgagagatctgatctcatcaaacactatcgagtccacacaggggagaggccctacaagtgtgatgagtgtgggaagaacttcagtcagaactccgaccttgtgcgtcatcgcagagcccacacatcaaagagttcacacgggagagaaaccttatgaatgtaccgaatgtgagaagagtttcagcaggagctcagctcttattaaacataagagagttcatacggactaagctgtaattatgatggctgagaaatgattcatttgaagatacaattttatttgatatcaatgaacgccctcaagactgagctgcttttatcatactctcctagttgtgggccacgatttaaaccatcagagatgacaagccatttgaaattctgaccctcagctttgggaatgttatctcctccaaaatggtgatttttattcactcaatgggttacttcattaaaagcagccccacaagtaactggaaatctgaagaccaggggacaaatgctggtgaatgcttaggcctggaaatggagtaaatctttcaatgttattttctcccatccttggccaaggaactatgctaagtgaaacgtgggactgtaatagggtggtaatggctgctttggaaaaaggcaactagagactctgcctaaattgccacacctattcacacaccatagtagttgggcacacacatcttcccttccaaagggctttttccttgagttgctcatgcatttgtatcttttccatcttcctgagggcaagattttgcacgatgaaggcaatgattgtaacttttctccttctcattgtttctaattagctcctttaaagcttgcatctttgtgaaggctaactgaaggtacggttggaaaggaaaaatgagacacaggtttggggaccaaggacccatcaatgatggtgactttagcagaagatgcccacagttattactgccattaatcagatttatgaattttctttggggatcactatagggaatattgtatagaaaatatcttcaagaaaagataggaccatcagtgacagttaagtgtaaggagcaagtggaattgagtccttcagggaaggaaccacagagtcccttcccaaggaatgtaggtcgtttctgtgttctttcccttctaatctttaagatcaactcttcctatcctgctaactctaagatttgataagggccacatcccagtgtttatcttagcttgcatcagggcatgtgtatgtacagtaatgtgtattcctgtggtttttctaatagaaactgaatttacagagacttagcatgttcttgggtgatgtgagtcatgtgacagaagtacagacataactccaatgtgagaaatgtccttttttcattatggaaaataatttaaacactagtgcttaagtgtgcactctcctgtaaagtctgtcttt

SEQ ID NO: 184034 - DNA, 2600 bp, Homo Sapiens
  misc_feature (164)..(189): n is a, c, g, or t
  misc_feature (2227)..(2237): n is a, c, g, or t
ttggctcagccgcccggtgatattgacaataggagagagaaaggggcattgactgggacccaccgcgggtagcgaaaggtggctctggcagcggcggctccagctcctgcggctcctcctccttattctgtccccttctcttgctgccgctgcagatccagtcnnnnnnnnnnnnnnnnnnnnnnnnnnacgtcgtcgccgccgccgccgggtccggggcaacgagctgaggcgccgcccgccaggaatgtgagcgaggagccaccggcggagccgcaacggggtcggtgccgatttgatgggacgggcccgcgggggaggatcgtgaggccgccgccgccaccggaacgctgaggttcgggtccggccgtgaggcctagaggctccgccgccgcggaaccggagggaccccgtaccggacagccgtcgccccaggctccccgcagctgcccggacctccccctgcacgtcccggtcccgccgcccgcccccgctgcggccacctcgcccgtctcccgcccctccaagccacagatcatctttggattcttccccagaagcttcaagtagggatatgtcctcagcaccaactactcctccatcagtggataaagtagacggattttctcggaagtccgtcagaaaagccagacagaagaggtcgcaaagttcctcacagtttaggtctcaaggcaagcctattgagttaacacctctgccgctgctaaaagacgttccatcctcagagcagcctgaactgttcctaaagaaacttcagcagtgctgtgtcatttttgacttcatggacacgctatctgatcttaaaatgaaagaatacaagcgctccactcttaatgaactggtggactacattacaataagcagaggctgtttgacagagcagacttaccctgaagtagttagaatggtatcttgcaatatattcagaactctccctcctagtgacagcaatgaatttgatccagaagaagatgaacctacccttgaggcatcgtggccacacttacagcttgtatatgaatttttcatacgatttttggaaagccaagaattccaacccagcattgccaaaaaatatatagatcagaaatttgtattacagcttctggagctatttgacagcgaagaccctcgggaacgggactacttaaaaacagtcttacacagaatttatggcaagtttcttggtcttagagcatttatccgaaaacagattaacaatatttttctaaggtttgtttatgaaacagaacacttcaatggtgtagctgaactgctggaaatattaggaagtattatcaatggctttgctttacctcttaaggcagaacacaaacagtttctggtgaaagtattgatccctttacacactgtcaggagcttatcactcttccatgcacagctggcatattgtatagtacagtttctggagaaagatccttcactcacagaaccagttattagggggttaatgaaattttggcctaaaacatgtagtcaaaaagaggtcatgttccttggggaactggaagaaatattggatgtgattgaaccttcacaatttgttaaaatccaagaacctttgtttaaacaaatcgccaagtgtgtatctagcccccattttcaggtggcagaaagagcactctattattggaataatgaatacatcatgagtttgatagaagaaaactctaacgtcatccttcccatcatgttttccagcctttataggatttcaaaagaacattggaatccggctattgtggcgttggtgtacaatgtgttgaaggcatttatggaaatgaacagcaccatgtttgacgagctgacagccacatacaagtcagatcgtcagcgtgagaaaaagaaagaaaaggagcgtgaagaattgtggaaaaaattggaggatctggagttaaagagaggtcttagacgtgatggaataattccaacttaacaaaaacaatgacaacaacattactaacctgtggagtcacacgtttatgtagtagaagatggagcaacagttttctgtattgtgcaactttacagtagatttcacctttgtttcattattacagcagcactgtatatacctgtctctaagtaaaggaaaaaacaaaataaggacttcaatccaaagtttggacagtagatggacttctcagaactttgcaaacataatcattgttctcaccctcttttnnnnnnnnnnntcggtcttcaaagatctgttgatgaaattgctatgttaaaattccattatcgggagttccttatttatcactagcagagagtatgatacaattttcaaatgtgaacaatcttaaatttagcttgtctttctgctaagctgttaaatgtatttatagtaaaggaagaaaaaaagactgtcatttccttataagtttgtgtaacatcctcctctggataacttgactgtaatttaacatctttttcttttgcacatcttcctgagttgaatgtccacgtggaatggggtcatgaattataaaagtccctgataaaagttttgtttactggggtgaacatctttccagtaaccaggtagtcctggt

SEQ ID NO: 184035 - DNA, 1376 bp, Homo Sapiens
  misc_feature (379)..(389): n is a, c, g, or t
ttgggccacatacaagtcagatcgtcagcgtgagaaaaagaaagaaaaggagcgtgaagaattgtggaaaaaattggaggatctggagttaaagagaggtcttagacgtgatggaataattccaacttaacaaaaacaatgacaacaacattactaacctgtggagtcacacgtttatgtagtagaagatggagcaacagttttctgtattgtgcaactttacagtagatttcacctttgtttcattattacagcagcactgtatatacctgtctctaagtaaaggaaaaaacaaaataaggacttcaatccaaagtttggacagtagatggacttctcagaactttgcaaacataatcattgttctcaccctcttttnnnnnnnnnnntcggtcttcaaagatctgttgatgaaattgctatgttaaaattccattatcgggagttccttatttatcactagcagagagtatgatacaattttcaaatgtgaacaatcttaaatttagcttgtctttctgctaagctgttaaatgtatttatagtaaaggaagaaaaaaagactgtcatttccttataagtttgtgtaacatcctcctctggataacttgactgtaatttaacatctttttcttttgcacatcttcctgagttgaatgtccacgtggaatggggtcatgaattataaaagtccctgataaaagttttgtttactggggtgaacatctttccagtaaccaggtagtcctggtactcctttagttttaaaattaggagttaagagagaagaggtgataaacatagtagggaagggaatatcggattcatgcatcagtttatggtgaatccaaatcaatgtcttgaatcctttgaaaacaggcactgggacatcacaggcttcagtacctgaccagtattagttgcatatatcattgaacacacataccagagatgttttagaaatgtgagaaaaacatccttttggaccatttgaaataagaaagacaaacactaaacaatacaaccatgaaattgatcaccgggattgcaaatctaattgggaaaagagttgagcaaacagcttggactgtttggagttgttgccttactttttaatatgtatttataaagtattccagcaaaagaggatgtagcctctgggaaaaaacaaacatgttacagtgttttttgtagattctcgttctatatctcatcacagcgccagccctgtttttagccggaaaggattcaggataaacattattatgcattctgaattggatgcatattcctaactactgtatttgttaccaaaagtggttctacaaatgctactgaaaaaatctggaaattcctaatgtcctgagtattaataa

SEQ ID NO: 184036 - DNA, 1057 bp, Homo Sapiens
  misc_feature (858)..(879): n is a, c, g, or t
  misc_feature (895)..(925): n is a, c, g, or t
ctttgtacaaaaaagttggctcctctggactaacttgactgtaatttaacatctttttcttttgcacatcttcctgagttgaatgtccacgtggaatggggtcatgaattataaaagtccctgataaaagttttgtttactggggtgaacatctttccagtaaccaggtagtcctggtactcctttagttttaaaattaggagttaagagagaagaggtgataaacatagtagggaagggaatatcggattcatgcatcagtttatggtgaatccaaatcaatgtcttgaatcctttgaaaacaggcactgggacatcacaggcttcagtacctgaccagtattagttgcatatatcattgaacacacataccagagatgttttagaaatgtgagaaaaacatccttttggaccatttgaaataagaaagacaaacactaaacaatacaaccatgaaattgatcaccgggattgcaaatctaattgggaaaagagttgagcaaacagcttggactgtttggagttgttgccttactttttaatatgtatttataaagtattccagcaaaagaggatgtagcctctgggaaaaaacaaacatgttacagtgttttttgtagattctcgttctatatctcatcacagcgccagccctgtttttagccggaaaggattcaggataaacattattatgcattctgaattggatgcatattcctaactactgtatttgttaccaaaagtggttctacaaatgctactgaaaaaaatctggaaattcctaatgtcctgagtattaataataaagtttaaaaatgcttttatatcaaaggtgcatcgtgaccaaattgtttaagnnnnnnnnnnnnnnnnnnnnnntctagggctgtatttnnnnnnnnnnnnnnnnnnnnnnnnnnnnnnncttattggctctctgctttgtatttaaatgaagaatcttacatcttgggtaggtaaactgctgataaaatttgtgtacagtatgtacttacctaatgcagttgcattattacgtactgaaagatatgtgttt

SEQ ID NO: 184037 - DNA, 3779 bp, Homo Sapiens
ttgggcttggcttggccagtaaggagtcggggtcttccccagttttctcagccaggcggcggcggcgactggcaatgtttggcctcaaaagaaacgcggtaatcggactcaacctctactgtgggggggccggcttgggggccggcagcggcggcgccacccgcccgggagggcgacttttggctacggagaaggaggcctcggcccggcgagagatagggggaggggaggccggcgcggtgattggcggaagcgccggcgcaagccccccgtccaccctcacgccagactcccggagggtcgcgcggccgccgcccattggcgccgaggtccccgacgtcaccgcgacccccgcgaggctgcttttcttcgcgcccacccgccgcgcggcgccgcttgaggagatggaagccccggccgctgacgccatcatgtcgcccgaagaggagctggacgggtacgagccggagcctctcgggaagcggccggctgtcctgccgctgctggagttggtcggggaatctggtaataacaccagtacggacgggtcactaccctcgacgccgccgccagcagaggaggaggaggacgagttgtaccggcagtcgctggagattatctctcggtaccttcgggagcaggccaccggcgccaaggacacaaagccaatgggcaggtctggggccaccagcaggaaggcgctggagaccttacgacgggttggggatggcgtgcagcgcaaccacgagacggccttccaaggcatgcttcggaaactggacatcaaaaacgaagacgatgtgaaatcgttgtctcgagtgatgatccatgttttcagcgacggcgtaacaaactggggcaggattgtgactctcatttcttttggtgcctttgtggctaaacacttgaagaccataaaccaagaaagctgcatcgaaccattagcagaaagtatcacagacgttctcgtaaggacaaaacgggactggctagttaaacaaagaggctgggatgggtttgtggagttcttccatgtagaggacctagaaggtggcatcaggaatgtgctgctggcttttgcaggtgttgctggagtaggagctggtttggcatatctaataagatagccttactgtaagtgcaatagttgacttttaaccaaccaccaccaccaccaaaaccagtttatgcagttggactccaagctgtaacttcctagagttgcaccctagcaacctagccagaaaagcaagtggcaagaggattatggctaacaagaataaatacatgggaagagtgctccccattgattgaagagtcactgtctgaaagaagcaaagttcagtttcagcaacaaacaaactttgtttgggaagctatggaggaggacttttagatttagtgaagatggtagggtggaaagacttaatttccttgttgagaacaggaaagtggccagtagccaggcaagtcatagaattgattacccgccgaattcattaatttactgtagtgttaagagaagcactaagaatgccagtgacctgtgtaaaagttacaagtaatagaactatgactgtaagcctcagtactgtacaagggaagcttttcctctctctaattagctttcccagtatacttcttagaaagtccaagtgttcaggacttttatacctgttatactttggcttggtttccatgattcttactttattagcctagtttatcaccaataatacttgacggaaggctcagtaattagttatgaatatggatatcctcaattcttaagacagcttgtaaatgtatttgtaaaaattgtatatatttttacagaaagtctatttctttgaaacgaaggaagtatcgaatttacattagtttttttcatacccttttgaactttgcaacttccgtaattaggaacctgtttcttacagcttttctatgctaaactttgttctgttcagttctagagtgtatacagaacgaattgatgtgtaactgtatgcagactggttgtagtggaacaaatctgataactatgcaggtttaaattttcttatctgattttggtaagtattccttagataggtttttctttgaaaacctgggattgagaggttgatgaatggaaattctttcacttcattatatgcaagttttcaataattaggtctaagtggagttttaaggttactgatgacttacaaataatgggctctgattgggcaatactcatttgagttccttccatttgacctaatttaactggtgaaatttaaagtgaattcatgggctcatctttaaagcttttactaaaagattttcagctgaatggaactcattagctgtgtgcatataaaaagatcacatcaggtggatggagagacatttgatcccttgtttgcttaataaattataaaatgatggcttggaaaagcaggctagtctaaccatggtgctattattaggcttgcttgttacacacacaggtctaagcctagtatgtcaataaagcaaatacttactgttttgtttctattaatgattcccaaaccttgttgcaagtttttgcattggcatctttggatttcagtcttgatgtttgttctatcagacttaaccttttatttcctgtccttccttgaaattgctgattgttctgctccctctacagatatttatatcaattcctacagctttcccctgccatccctgaactctttctagcccttttagattttggcactgtgaaacccctgctggaaacctgagtgaccctccctccccaccaagagtccacagacctttcatctttcacgaacttgatcctgttagcaggtggtaataccatgggtgctgtgacactaacagtcattgagaggtgggaggaagtcccttttccttggactggtatcttttcaactattgttttatcctgtctttgggggcaatgtgtcaaaagtcccctcaggaattttcagaggaaagaacattttatgaggctttctctaaagtttcctttgtataggagtatgctcacttaaatttacagaaagaggtgagctgtgttaaacctcagagtttaaaagctactgataaactgaagaaagtgtctatattggaactagggtcatttgaaagcttcagtctcggaacatgacctttagtctgtggactccatttaaaaataggtatgaataagatgactaagaatgtaatggggaagaattgccctgcctgcccatctcagagccataaggtcatctttgctagagctatttttacctatgtatttatcgttcttgatcataagccgcttatttatatcatgtatctctaaggacctaaaagcactttatgtagtttttaattaatcttaagatctggttacggtaactaaaaaagcctgtctgccaaatccagtggaaacaagtgcatagatgtgaattggtttttaggggccccacttcccaattcattaggtatgactgtggaaatacagacaaggatcttagttgatattttgggcttggggcagtgagggcttaggacaccccaagtggtttgggaaaggaggaggggagtggtgggtttatagggggaggaggaggcaggtggtctaagtgctgactggctacgtatttcgggcaaatcctccaaaagggaaagggaggatttgcttagaaggatggcgctcccagtgactactttttgacttctgtttgtattacgcttctctcagggaaaaacatgcagtcatctagtgtttcatg

SEQ ID NO: 184038 - DNA, 1537 bp, Homo Sapiens
  misc_feature (52)..(82): n is a, c, g, or t
ttggctcagcactaagggagccagcgcacagcacagccaggaaggcgagcgnnnnnnnnnnnnnnnnnnnnnnnnnnnnnnncggaggtcatttgattgcccgcctcagaacgatggatctgcatctcttcgactactcagagccagggaacttctcggacatcagctggccatgcaacagcagcgactgcatcgtggtggacacggtgatgtgtcccaacatgcccaacaaaagcgtcctgctctacacgctctccttcatttacattttcatcttcgtcatcggcatgattgccaactccgtggtggtctgggtgaatatccaggccaagaccacaggctatgacacgcactgctacatcttgaacctggccattgccgacctgtgggttgtcctcaccatcccagtctgggtggtcagtctcgtgcagcacaaccagtggcccatgggcgagctcacgtgcaaagtcacacacctcatcttctccatcaacctcttcggcagcattttcttcctcacgtgcatgagcgtggaccgctacctctccatcacctacttcaccaacacccccagcagcaggaagaagatggtacgccgtgtcgtctgcatcctggtgtggctgctggccttctgcgtgtctctgcctgacacctactacctgaagaccgtcacgtctgcgtccaacaatgagacctactgccggtccttctaccccgagcacagcatcaaggagtggctgatcggcatggagctggtctccgttgtcttgggctttgccgttcccttctccattatcgctgtcttctacttcctgctggccagagccatctcggcgtccagtgaccaggagaagcacagcagccggaagatcatcttctcctacgtggtggtcttccttgtctgctggctgccctaccacgtggcggtgctgctggacatcttctccatcctgcactacatccctttcacctgccggctggagcacgccctcttcacggccctgcatgtcacacagtgcctgtcgctggtgcactgctgcgtcaaccctgtcctctacagcttcatcaatcgcaactacaggtacgagctgatgaaggccttcatcttcaagtactcggccaaaacagggctcaccaagctcatcgatgcctccagagtctcagagacggagtactctgccttggagcagagcaccaaatgatctgccctggagaggctctgggacgggtttacttgtttttgaacagggtgatgggccctatggttttctagagcaaagcaaagtagcttcgggtcttgatgcttgagtaaagtgaagaggggagcacgtgccccctgcatccattctctctttctcttgatgacgcagctgtcatttggctgtgcgtgctgacagttttgcaacaggcagagctgtgtcgcacagcaatgctgtgcgtcagaaccagctgaggacaggcttgcctggacttctgtaaaataggattttctgtgtttcctgaatttttttatatgggggatttgtatttaaatttt

SEQ ID NO: 184039 - DNA, 1534 bp, Homo Sapiens
acaaaaaagttggcctagagggactcatgggtaaactgaggcactcaaactgccgaggagctccgcctcccgagagacatttaatccggggggatttgcaggaaacttctaaattaagggtagcggctgctgcagctgagggggggcacgccggtccctgcgcccgggcagctgccgtgagctcacgccccgaaatagccccaggggccccagccgcagctgccactgggtccggctgtcactcagaggaagcacggagcccccagcccaagggtcccctccccttcgcatcgccggggtttttccagccgaccgtcggccactttttcctccgacggctggcagggaagagggggacgggggcgggaccccaagggaggcggtccccagtgggtgggcgaagggggcggccgcaccccccggccgggccgtgcttctgcccctacaaggtttgggccgaggtgggggagggtcctggttgccggccccgcccggtccctccccgccttttaggcgcccgcgtggccgggacgtcccagtcccgctccgtcctcctcgcctgccaccggtgcacccagtccgctcacccagcccagtccgtccggtcctcaccgcctgccggccggcccaccccccaccgcagccatggacgccatcaagaagaagatgcagatgctgaagctggacaaggagaacgccatcgaccgcgccgagcaggccgaagccgacaagaagcaagctgaggaccgctgcaagcagctggaggaggagcagcaggccctccagaagaagctgaaggggacagaggatgaggtggaaaagtattctgaatccgtgaaggaggcccaggagaaactggagcaggccgagaagaaggccactgatgctgaggcagatgtggcctccctgaaccgccgcattcagctggttgaggaggagctggaccgggcccaggagcgcctggctacagccctgcagaagctggaggaggccgagaaggcggctgatgagagcgagagaggaatgaaggtcatcgaaaaccgggccatgaaggatgaggagaagatggaactgcaggagatgcagctgaaggaggccaagcacatcgctgaggattcagaccgcaaatatgaagaggtggccaggaagctggtgatcctggaaggagagctggagcgctcggaggagagggctgaggtggccgagagccgagccagacagctggaggaggaacttcgaaccatggaccaggccctcaagtccctgatggcctcagaggaggaggtagtgacccctctgaacctttctgggcaatggcgccttctctcagctcaccttccctccgtctcagcaccgcagctgctctttctcagctgctggggatcaggaaagggcctggggcttctgagccctgcctgctgtcactctcacaactttgctcttctcttctctcctccacccgtcccctgctgtgccatctccactgtctggcttcgctgtgccctcacaccctgcccccccgccacacaccccc

SEQ ID NO: 184040 - DNA, 1288 bp, Homo Sapiens
tttaaactagaaaattctggctgcttgaaaattcaaagcagatcaatacatttaaatcaccggttcaaaaaatcactctttttcatgttataatgtttttattgcaattgaggatgttttcaataagtatcttgagcttgaggccctggctaagtattccttttgtactagaaatcagatttctctggcacaattccattgcctgcaatggtctttatcaaaactacaaaagccagcacactatttcaatatgtattcagttgttcatatctaaatacctcattagctatgaaacaaaccaaatataaatgctgaatatacagtacatagcaacagattcttcacagaagaaaacaatgaaagactaattttctacaatatgttacctgttcattagttcttcaataacattacttaggctatttcaaggataacaaaatgtatgcgccactacccatgttttcgcaacattttttacctaggttctaaagggaataaatgaggatgcatatagtcagatttatttttataaacttctgatgtttcttttgttgtgcatcttacatgaatatatggagacaagaacagatgtacacttaagtcattagtagttctatgaattttgcttatatggctagttgcttatatggatgttgtaaatgacaagataaaataacgaagtttgataaactcatccgtgccctgtgaactttagtctatttactgcataaattggttcagtcactatttattagttttaaaaaaatggtttttaaaagctgcaaaccatacacatttctgaatcaggaagaggtaaactgtgacatagttcccctgtgctgctgattcttttggggagaaaaaataagtttccaaattctatttttaaaaaaactagaggttttttttctatgattagccttcactctaaagtcccttttacccaaggcatggtccctgggtcatctttttgagtcttagtttctgggaagttttcagtaaaccgctctcgtgctttgtcccagttttttttgttcttgttttggagaaggtgaacatcttcaaatgaggatggtttgcctgtccccaagcctgcatgtgttcgccgaagctgaagctggatcggcgttttcattcctccaccatccttccccaggccctctcctttcttccaacccatcttctccaacatcttccgacctttgttgctatcagtaatttcactttaaggaatattaaaatgatagttgatttataaaagatcttttaggtcacatttataatccaa

SEQ ID NO: 184041 - DNA, 1586 bp, Homo Sapiens
ttggcaactggggagctgctggagctcttctggcctctggttttccgactgcttatccgacgctcctccctctgtctctgtagctggagaaggtagtttccaggaaagttttccggtttgcaggccgcgcacatcgggcaggggccatcctcggtccccttgctcgttgctcgcagccccgttcggctacaagtgagtttcagggcgtcatggccaggggccaccgcggccagccgggtgtgaggctgcctttcgctgcccgcgcgctccagtggtctctgggtccgccggcgtccgtttcggcctgaacgcagcccctccgcggcgacgagcagtctcgcgccggagctcatggcctcggaggcgccgtccccgccgcggtcgccgccgccgcccacctcccccgagcctgagctggcccagctaaggcggaaggtggagaagttggaacgtgaactgcggagctgcaagcggcaggtgcgggagatcgagaagctgctgcatcacacagaacggctgtaccagaacgcagaaagcaacaaccaggagctccgcacgcaggtggaagaactcagtaaaatactccaacgtgggagaaatgaagataataaaaagtctgatgtagaagtacaaacagagaaccatgctccttggtcaatctcagattatttttatcagacgtactacaatgacgttagtcttccaaataaagtgactgaactgtcagatcaacaagatcaagctatcgaaacttctattttgaattctaaagaccatttacaagtagaaaatgatgcttaccctggtaccgatagaacagaaaatgttaaatatagacaagtggaccattttgcctcaaattcacaggagccagcatctgcattagcaacagaagatacctccttagaaggctcatcattagctgaaagtttgagagctgcagcagaagcggctgtatcacagactggatttagttatgatgaaaatactggactgtattttgaccacagcactggtttctattatgattctgaaaatcaactctattatgatccttccactggaatttattactattgtgatgtggaaagtggtcgttatcagtttcattctcgagtagatttgcaaccttatccgacttctagcacaaaacaaagtaaagataaaaaattgaagaagaaaagaaaagatccagattcttctgcaacaaatgaggaaaaggatttgaactcagaggatcaaaaagccttcagtgttgaacatacaagctgcaatgaggaagaaaatttcgcaaatatgaaaaagaaggccaaaataggcattcatcacaaaaatagtccccccaaagtcactgttccaactagtggaaatactatagagtctcctcttcatgaaaacatctctaattcaacatcatttaaagatgagaaaatcatggagactgatagtgaaccagagaagtgaaattacagactctcagactgaggatagttatgacgaagccattaccagtgaagcaatgtaactgcagaagatagtgaggatgagatgaagacaaaatttggcccccatgtattagagtattg

SEQ ID NO: 184042 - DNA, 1452 bp, Homo Sapiens
  misc_feature (91)..(134): n is a, c, g, or t
ttggctggaatttattactattgtgatgtggaaagtggtcgttatcagtttcattctcgagtagatttgcaaccttatccgacttctagcnnnnnnnnnnnnnnnnnnnnnnnnnnnnnnnnnnnnnnnnnnnntccagattcttctgcaacaaatgaggaaaaggatttgaactcagaggatcaaaaagccttcagtgttgaacatacaagctgcaatgaggaagaaaatttcgcaaatatgaaaaagaaggccaaaataggcattcatcacaaaaatagtccccccaaagtcactgttccaactagtggaaatactatagagtctcctcttcatgaaaacatctctaattcaacatcatttaaagatgagaaaatcatggagactgatagtgaaccagaggaaggtgaaattacagactctcagactgaggatagttatgacgaagccattaccagtgaaggcaatgtaactgcagaagatagtgaggatgaagatgaagacaaaatttggcccccatgtattagagtaattgtcattagatcacctgtgttgcagataggatcactctttatcattactgctgtaaaccctgctacaattggaagagaaaaggatatggaacatactctccgaatccctgaagttggtgtcagtaagtttcatgcagaaatttattttgaccatgacttacaaagttatgtccttgtggatcaaggcagtcaaaatggcacaattgttaatggaaaacagattcttcagccgaaaactaaatgtgacccttacgtacttgagcatggagatgaagtcaaaattggagaaactgtcttatcctttcacattcatcctggcagtgatacctgtgatggctgtgaaccagggcaggttagagcccaccttcgccttgataagaaagatgaatcttttgttggtccaacactaagtaaggaggaaaaagagttggaaagaagaaaagaattaaagaaaatacgagtaaaatatggtttacagaatacagaatacgaagatgaaaagacattgaagaatccaaaatataaagatagagctggaaaacgtagggagcaggttggaagtgaaggaactttccaaagagatgatgctcctgcatctgttcattctgaaattactgatagcaacaaaggtcggaagatgttggagaagatgggttggaagaaaggagagggcctggggaaggatggtggaggaatgaaaacgccgatccagcttcagcttcggcgaacacatgcaggcttggggacaggcaaaccatcctcatttgaagatgttcaccttctccaaaacaagaacaaaaaaaactgggacaaagcacgagagcggtttactgaaaacttcccagaaactaagcctcaaaaagatgacccagggaccatgccttgggtaaaagggactttagagtgaaggctaatcata

SEQ ID NO: 184043 - DNA, 2121 bp, Homo Sapiens
ctttgtacaaaaaagttggctgtcccctgactgccatcccagggaagtggacctcccaggacagcctgctaggtatggagttctcgggccgagacgccagcggcaagcgtgtgatgggactggtgcctgccaagggcctggccacctctgtcctgctgtcaccggacttcctctgggatgtgccttccaactggacgctggaggaggcggcctcggtgcctgtcgtctacagcacggcctactacgcgctggtggtgcgtgggcgggtgcgccccggggagacgctgctcatccactcgggctcgggcggcgtgggccaggccgccatcgccatcgccctcagtctgggctgccgcgtcttcaccaccgtggggtcggctgagaagcgggcgtacctccaggccaggttcccccagctcgacagcaccagcttcgccaactcccgggacacatccttcgagcagcatgtgctgtggcacacgggcgggaagggcgttgacctggtcttgaactccttggcggaagagaagctgcaggccagcgtgaggtgcttggctacgcacggtcgcttcctggaaattggcaaattcgacctttctcagaaccacccgctcggcatggctatcttcctgaagaacgtgacattccacggggtcctactggatgcgttcttcaacgagagcagtgctgactggcgggaggtgtgggcgcttgtgcaggccggcatccgggatggggtggtacggcccctcaagtgcacggtgttccatggggcccaggtggaggacgccttccgctacatggcccaagggaagcacattggcaaagtcgtcgtgcaggtgcttgcggaggagccggaggcagtgctgaagggggccaaacccaagctgatgtcggccatctccaagaccttctgcccggcccacaagagctacatcatcgctggtggtctgggtggcttcggcctggagttggcgcagtggctgatacagcgtggggtgcagaagctcgtgttgacttctcgctccgggatccggacaggctaccaggccaagcaggtccgccggtggaggcgccagggcgtacaggtgcaggtgtccaccagcaacatcagctcactggagggggcccggggcctcattgccgaggcggcgcagcttgggcccgtgggcggcgtcttcaacctggccgtggtcttgagagatggcttgctggagaaccagaccccagagttcttccaggacgtctgcaagcccaagtacagcggcaccctgaacctggacagggtgacccgagaggcgtgccctgagctggactactttgtggtcttctcctctgtgagctgcgggcgtggcaatgcgggacagagcaactacggctttgccaattccgccatggagcgtatctgtgagaaacgccggcacgaaggcctcccaggcctggccgtgcagtggggcgccatcggcgacgtgggcattttggtggagacgatgagcaccaacgacacgatcgtcagtggcacgctgccccagcgcatggcgtcctgcctggaggtgctggacctcttcctgaaccagccccacatggtcctgagcagctttgtgctggctgagaaggctgcggcctatagggacagggacagccagcgggacctggtggaggccgtggcacacatcctgggcatccgcgacttggctgctgtcaacctggacagctcactggcggacctgggcctggactcgctcatgagcgtggaggtgcgccagacgctggagcgtgagctcaacctggtgctgtccgtgcgcgaggtgcggcaactcacgctccggaaactgcaggagctgtcctcaaaggcggatgaagccagcgagctggcatgccccacgcccaaggaggatggtctggcccagcagcagactcagctgaacctgcgctccctgctggtgaacccggagggccccaccctgatgcggctcaactccgtgcagagctcggagcggcccctgttcctggtgcacccaatcgagggctccaccaccgtgttccacagcctggcctcccggctcagcatccccacctatgggctgcagtgcacccgagctgcgccccttgacagcatcc

SEQ ID NO: 184044 - DNA, 1844 bp, Homo Sapiens
  misc_feature (244)..(268): n is a, c, g, or t
gaaagaccaagcgcagaccccacgggcgcacgaggcccagcccagtttcctgcgggcacgggcaccaccggctcttcacagaccaggagtctccaagtcggcagctctggtgtccccgaggtgccgtgggaggcggcgggtgggtgggacatgcctaacacctacatctagcagcctcggggggcagtggcactgggccggacagggtcccaccggcaggacccttcaatcccgttgcatggcnnnnnnnnnnnnnnnnnnnnnnnnnatggtggagtgacctccggtggcaggcgggggcacgggcctagccctcccgcacgctcacgcgtggctcagccagggagctgtggatgatgctgatgatggactccaggccgctgccctccagcagcgtgcggtggtcaccctcgatgacgtggacggatactttcccgtcgcatacctgggagaggttgtagtccgcgcccaggtcctcgccgtaggcgccacccgtcttggcgcgcagtagcatcacgttgccatggtacttggccttgggtgtgtactgctcagcggcacgcagcttgtagtagaaggaccgggccgcaaagctcagctcctggcggtccaggccctggtggctcttgatgatcaggtccacggcggctgccacacgctcctctaggcccttcagcggcagcagcgcctccagcaccctgttgtgctccatgtccgtgaactgctgcacgaagaagcatatggcctccgtctcagcctcagcctcacagcctggggtcagctttgcccggtagctctgggtgtaggccagtacgtaggtgggcgagccgtcgaacaggaagaggctgttgtgggtgggggctgggctctgctgggcctgcagctgggagcacatttcaaaggccacgcaggccccgtaggagtagccggccacgcggtaggggccctcgggctgcacctgcctgatgcagtcgatgtagtaggcagccaggctgtggatgctgtcaaggggcgcagctcgggtgcactgcaggccataggtggggatgctgagccgggaggccaggctgtggaacacggtggtggagccctcgattgggtgcaccaggaacaggggccgctccgagctctgcacggagttgagccgcatcagggtggggccctccgggttcaccagcagggagcgcaggttcagctgagtctgctgctgggccagaccatcctccttgggcgtggggcatgccagctcgctggcctcatccgcctttgaggacagctcctgcagtttccggagcgtgagttgccgcacctcgcgcacggacagcaccaggttgagctcacgctccagcgtctggcgcacctccacgctcatgagcgagtccaggcccaggtccgccagtgagctgtccaggttgacagcagccaagtcgcggatgcccagaatgtgtgccacggcctccaccaggtcccgctggctgtccctgtccctataggccgcagccttctcagccagcacaaagctgctcaggaccatgtggggctggttcaggaagaggtccagcacctccaggcaggacgccatgcgctggggcagcgtgccactgacgatcgtgtcgttggtgctcatcgtctccaccaaaatgcccacgtcgccgatggcgccccactgcacggccaggcctgggaggccttcgtgccggcgtttctcacagatacgctccatggcggaattggcaaagccgtagttgctctgtcccgcattgccacgcccgcagctcacagaggagaagaccacaaagtagtccagctcagggcacgcctctcgccaacttttttgtacaaag

SEQ ID NO: 184045 - DNA, 3938 bp, Homo Sapiens
  misc_feature (99)..(159): n is a, c, g, or t
  misc_feature (1936)..(1954): n is a, c, g, or t
  misc_feature (2975)..(2994): n is a, c, g, or t
  misc_feature (3379)..(3387): n is a, c, g, or t
  misc_feature (3465)..(3477): n is a, c, g, or t
ccaactttgtacaaaaaagttggctccggccagcggcggcggtaggaggcaccagcggcagtgcagggaccgaatccgagcagcgctgcgttacctctnnnnnnnnnnnnnnnnnnnnnnnnnnnnnnnnnnnnnnnnnnnnnnnnnnnnnnnnnnnnnttcctcctccggccgccggcgggtgtgatgtgccgccgccgctgcccccgccggcgctgacggactgggggcgccgcccgcgcccgggaccgacccctctgctcgcggccgcgcctttgagctctctatcaatatcagctcacatcattgaaaagataattttgaagacatgttttgctgaaaagacactaagaaaaattttacgaatgggatgaacatgctccagttaattgactacctactgcaatttgaatgttaacattacccatctggtacagttacctagtgatgtacctattttcacaataccctgtttcagtgtgcttgtcttgattaaagaattcaaagtggagtaccgcaaacttgatatggaaaataaaaagaaagacaaggacaaatcagatgatagaatggcacgacctagtggtcgatcgggacacaacactcgaggaactgggtcttcatcgtctggagttttaatggttggacctaactttagagttggaaaaaaaattggatgtggcaattttggagaattacgattagggaaaaatttatacacaaatgaatatgtggcaattaagttggagcccatgaaatcaagagcaccacagctacatttggaatacagattctataagcagttaggatctggagatggtatacctcaagtttactatttcggcccttgtggtaaatacaatgctatggtgctggaactgctgggacctagtttggaagacttgtttgacttgtgtgacagaacattttctcttaaaacagttctcatgatagctatacaactgatttctcgcatggaatatgtccattcaaagaacttgatatacagagatgtaaaacctgagaacttcttaataggacgaccaggaaacaaaacccagcaagttattcacattatagattttggtttggcaaaggaatatattgatccggagacaaagaaacacataccatacagagaacacaagagccttacaggaacagctagatatatgagcataaacacacatttaggaaaagaacaaagtagaagagacgatttagaagctttaggtcatatgttcatgtattttctgagaggcagtcttccttggcaaggcttaaaggctgacacattaaaggagaggtatcagaaaattggagatacaaaacgggctacaccaatagaagtgttatgtgaaaattttccgaagaaatggcaacatatcttcgttatgtaagaaggctagatttttttgaaaaaccggactatgactacttaacaaagctttttactgacttgtttgatcgaaaaggatatatgtttgattatgaatatgactggattggtaaacagttgcctactccagtgggtgcagttcagcaagatcctgctctgtcatcaaacagagaagcacatcaacacagagataagatgcaacaatccaaaaaccaggttgtaagttctacaaatggagagttaaacacagatgaccccaccgcaggacgttcaaatgcacccatcacagcccctactgaagtagaagtgatggatgaaaccaagtgctgctgttttttcaaacgaaggaaaaggaaaaccatacagcgccacaaatgactctggacacagacagatcctggggagttacttacatgttcatctgctgtcttgtgattaaaatcatctctgtagtgaccacgtatattttcaaggactcactcttagaaacaaaaatgtcatactttcatacttcattttgtggttgtcttacattcnnnnnnnnnnnnnnnnnnnctctaatttaacctttatggaagctttaaagttttgtcaaaacatgagtgctttgcccatcagtgaatggaatggaccaatgaggtggtatcaatgaatatagttccatagaacattttccagaagttcttctgttgtagaaagcagtacagtatcttaagtgtcaaccagttatatacctaatctggttttttataacttctgtaagagcataatcaaacaggaattttcttttctcagtggataatacaacagagaaaacagagttgcccaaatatttaaaagaagttattccttgagaagttcatattttgtgacatctgcattgatttcagtattactgatggtactgttattcataagtcatattaacattctctccgtgaaatcatggtacagtcactgcccagaggtactgaggaaaaagcaatatgggttcggcagatggtggtggtaaaatgaatcttaaggagtgtggtaaatatgtgctccgcttttgttgcatcactatgtgaagtactgtgttgcagaagtggcaaaagcgcttatttttaaaaatgcaaaatatttgtacaatgtaactttatgcttccaaataataatgtatgttagacagcaagaaatgaatactttaaaaagtgatatatgttggagttataaagaaatacactaaggagaggtagtaaatgtgaaccttgttgcagtgtataaggtggaagcctaaagaaatctcaccgaaacttactgctgaatgattacattctcccttaagcagaaaactttggatgtgccatgcaatggtgtctgtgtaattattttgctctttgattaaaaaaaagacccccagcaataaaaagtgggtcactctatgccctctgtgcacattagtctcttgtattcaactttgctgattctctggaattttcctactctttagcataattttgatgattgaaaaatattttggaaaggatgggtcaggtgctttgcctccatagtcttttgaagtgcctgcatatgnnnnnnnnnnnnnnnnnnnnaaaattctgtaaaaaaggaagcccattccacttttcaagtatgctttgttttaagccataaagacacacatgtagttttgtcacattctactagccaaaattttcaagaagggttaaaacaaagactggctagaaagataattattttgaataaatctcatattcatctttcatttatataattgttacttattcctcccatgcagtctcttcgttgtctttaagtgtgtgcctccaggcatgcttatttatttttattgtctcaaggtaacatttaagatgtatattaaagtaaagctacatttttttacttcattattgcatttacagggatttaattgtactttgtaatttatttttcttattagccaaaagtttaatgcannnnnnnnngatgaattaggcacccacatgaacaccacaaatcaggacattgtttatcattgttgctatgaatcctatgaatgatcnnnnnnnnnnnnnaaagacctacacttaacctacaaaacatttgctgtataatttggtcaacagtttctatctatctgtatactgtcatgatgtcttaaactgcaggagttacatactgagtttatatttttatttgctttgagcaaggtagataaacattttggccattataatgtgaaaccacttcttctttctttacagtatttgaccaaacttgtgtgtctatgatatttgtaaatacatgcgaatatctgtatttcttatcataagcctatttagttttattctcagtagggttttttggattgtacagtgtttatatgatctgaactccttatacataaagaaggtgtgtatattaatccaattatggacttaaaatattttaaaagtataaatacccttatttgctgcaaagaccagtgtgtaggcatttgctttttagcaatatttttaagtgctccattttaatg

SEQ ID NO: 184046 - DNA, 925 bp, Homo Sapiens
  misc_feature (82)..(95): n is a, c, g, or t
tccccggcgattagtctataacaaatattgacacgagggggacaaaagcatgttgaaatgtattagaatcagaacctgtacnnnnnnnnnnnnnnttaaaatataacctgaaactgttcaagttcagaagtctagttaagtctttttctcttgccaggagaatgccatcatcagagggctctgggtcatcagccaaggaggggtgaaaagacagaagcagcaacaggtccttcagcagacagaggggcatcgatgccaccatccctacccaggtgcagccaggaggagttaaagatcttgggagagcaagcattagccggcagttccagtgggcagctggggcctacacaccgaaaacaaggctgagtagtcagaggcagcaggaagagtggccaggagagaacgccaagccggaaggaaccatttctgccacccagcagacccacagcaccctctgtctgtgctcagataccagaggttagtcaacccagcgctctcaactaattggagatcggagctgggcttaagaggctgaaaacccgtgggtttagtaaacacagcccagcatcacgtccctccacggcctgaactggagctgccaacaagggatgaggcaggagagggaaagcagcgcatcttgacgcctggctagaaatcactgcaccatcgtgaggactgtggtaccaggggctggagaggagtgccccctcctcacaaggggaggggcctccttcacaatcatccctgggggctggttaaagctgcctccggcttataaccagcctgacaaaatgacgtggagcaaaagaaaaactgggagggagacaagcccttacacagagacaagaacctcctggagggaagctgggcagtgtctgaccctgttttgggatggcattggtggagcccctgagtctgaagccaa

SEQ ID NO: 184047 - DNA, 975 bp, Homo Sapiens
ttggagactccagtgtgccgcgcagtgtggcaaattcacaaacccgcccgctgagttggtcgtttcggaatcccgagacttgaaacccaacgggaagacccttctcaccctcaaaagaagatgacagcccgcagagagttaacttctgtttacatggaactcagacatctgcaaatcatgatttcaaggccagagaatggcaggggaacagaaaccctcaagtaatctcctggagcagtttattttactagccaaaggtaccagtggctcagccctcactgctctcataagccaggtcttagaggctcccggagtgtatgtctttggagaacttctggagctggccaacgtgcaggagcttgcggaaggagctaatgctgcttatttgcagttgttgaacctgtttgcctatgggacatacccagattacatagccaacaaggagagcctgccagaactgagcacagctcagcagaacaagctgaagcatcttaccatcgtgagcttggcatcaagaatgaagtgtatcccctactccgtgttgctgaaagacctggagatgcggaatctccgggaactagaagaccttatcattgaggctgtctacactgacatcatccagggcaagctggaccagcgaaaccagctgctggaagtggatttctgcattggccgtgacatccgaaagaaggatatcaataatattgtcaagaccctgcatgaatggtgtgatggctgtgaagcagttctactgggcatcgagcagcaagttctgagagccaaccagtacaaagagaaccacaaccgaactcagcagcaggtagaagcagaggttaccaacatcaagaagacactcaaagccaccgcatcctcctcggctcaggagatggagcagcagctggctgacgggagtgtccccctcaccgctgagcaaggcagcccaacaagaagatgtccaaagtgaaaagtctggtc

SEQ ID NO: 184048 - DNA, 1628 bp, Homo Sapiens
agcaatgctttccttttaaaggccaactttgtacaaaaaagttggcaaggctctgcgaagaagacatagaaaaccatgcaacagatgtgcaccaggcagtcaaaattgggcagtccctctcctccctgacatctcctgcagaacagggtgtgctgtcagaaaagatagactcattgcaggcccgatacagtgaaattcaagaccgctgttgtcggaaggcagccctacttgaccaagctctgtctaatgctaggctgtttggggaggatgaggtggaggtgctcaactggctggctgaggttgaggacaagctcagttcagtgttcgtaaaggatttcaaacaggatgtcctgcacaggcagcatgctgaccacctggctttaaatgaagaaattgttaatagaaagaagaatgtagatcaagctattaaaaatggtcaggctcttctaaaacaaaccacaggtgaggaggtgttacttatccaggaaaaactagatggtataaagactcgttacgcagacatcacagttactagctccaaggccctcagaactttagagcaagcccggcagctggccaccaagttccagtctacttatgaggaactgaccgggtggctgagggaggtggaggaggagctggcaaccagtggaggacagtctcccacaggggaacagataccccagtttcagcagagacagaaggaattaaagaaggaggtcatggagcacaggctggtgttggacacagtgaatgaggtgagccgtgctctcttagagctggtgccctggagagccagagaagggctggataaacttgtgtccgatgctaacgagcagtacaaactagtcagtgacactattggacaaagggtggatgaaattgatgctgctattcagagatcacaacagtatgagcaagctgccgatgcagaactagcttgggttgctgaaacaaaacggaaactgatggctctgggtccaattcgcctggaacaggaccagaccacagctcagcttcaggtacagaaggctttctccattgacattattcgacacaaagattcaatggatgaactcttcagtcaccgtagtgaaatctttggcacatgtggggaggagcaaaaaactgtattacaggaaaagacagagtctctaatacagcaatatgaagccattagcctactcaattcagagcgttatgcccgcctagagcgggcccaggtcttagtaaaccagttttgggaaacttatgaagagctcagcccctggattgaggaaactcgggcactaatagcacagttaccctctccagccattgatcatgagcagctcaggcagcaacaagaggaaatgaggcaattaagggaatctattgctgaacacaaacctcatattgacaaactactaaagataggcccacaactaaaggaattaaactctgaggaaggggaaatggtggaagaaaaataccagaaagcagaaaacatgtatgctcaaataaaggaggaggtgcgccagcgagctctgtctctggatgaagccgtgtcccagtccacacagattacagagtttcatgataaaattgagcctatgttggagacactggagaatctttcctctcgcctg

SEQ ID NO: 184049 - DNA, 1517 bp, Homo Sapiens
ttggaaccacgccgcttcccagtctctgtgcgaggcgtgaagcgcggacctttcaacaagggctttattaattctcacgctgcggccctggaaagcgatggaggtggcggctaattgctccctacgggtgaagagacctctgttggatccccgcttcgagggttacaagctctctcttgagccgctgccttgttaccagctggagcttgacgcagctgtggcagaggtaaaacttcgagatgatcaatatacactggaacacatgcatgcttttggaatgtataattacctgcactgtgattcatggtatcaagacagtgtctactatattgatacccttggaagaattatgaatttaacagtaatgctggacactgccttaggaaaaccacgagaggtgtttcgacttcctacagatttgacagcatgtgacaaccgtctttgtgcatctatccatttctcatcttctacctgggttaccttgtcagatggaactggaagattgtatgtcattggaacaggtgaacgtggaaatagcgcttctgaaaaatgggagattatgtttaatgaagaacttggggatccttttattataattcacagtatctcactgctaaatgctgaagaacattctatagctaccctacttcttcgaatagagaaagaggaattggatatgaaaggaagtggtttctatgtttctctggagtgggtcactatcagtaagaaaaatcaagataataaaaaatatgaaattattaagcgtgatattctccgtggaaagtcagtgccacattatgctgctattgagcctgatggaaatggtctaatgattgtatcctacaagtctttcacatttgttcaggctggtcaagatcttgaagaaaatatggatgaagacgtatcagagaaaatcaaagaacctctgtattactggcaacagactgaagatgatttgacagtaaccatacggcttccagaagacagtactaaggaggacattcaaatacagtttttgcctgatcacatcaacattgtactgaaggatcaccagtttttagaaggaaaactctattcatctattgatcatgaaagcagtacatggataattaaagagagtaatagcttggagatttccttgattaagaagaatgaaggactgacctggccagagctagtaattggagataaacaaggggaacttataagagattcagcccagtgtgctgcaatagctgaacgtttgatgcatttgacctctgaagaactgaatccaaatccagataaagaaaaaccaccttgcaatgctcaagagttagaagaatgtgatattttctttgaagagagctccagtttatgcagatttgatggcaatacattaaaaactactcatgtggtgaatcttggaagcaaccagtacctttttctctgtcatagtggatcctaaagaaatgccctgcttctgtttgcgcaatgatgttgatgccctactctggcaaccacactccagcaaacaa

SEQ ID NO: 184050 - DNA, 1115 bp, Homo Sapiens
ctttgtacaaaaaagttggattcgattatccccgtcagactgacattatgactatataatgtacttagagacaatttttatcttgcttatagtaaaggttcagcctgccaattgtaaatcattctaatttggcaggcttatttttgacattggaaagggcagaaagcgatttgccccagtagtgtaataggagttatagaccagaggctgaaacccaaactatataaaaaggaattcagtggagggggctttgtaatctccattaatttgtgttgctacttccaggatcaccaaaaattacatgtaattttacatgttaaacacattgaaacataacctatgtttataaagcataacgggcttcccttccagaagctctcctgcttgtcatgaagtgagaacaatgaaaagtcatagcagatactcagtttaactctgtgtagaacctagtagtgtttgagctgttattcagatttgaattcagactgtgtgttgtttgcttatggacactgcctgtcgttctgtcactgttaaattaatgagtctataaggtttttcttccagaggccataggtgacatcactaaaattgcaagataaattgtaatctttgctgctgctgcactccccaacctctcccccaccccccgtggtgtgctgctttctagatgagcgtgttttggagcaggcccatctgggacactctatgctttcaccaaggaagtgcgatctgagcagccacaatccagccaaaagaggatcgtagatatttgctctgatcaactagatgaaaatatagcagaatggatttagcccactgctctgttttatccaactgagtctctgaccagcaattggtgcataattattacagcaaaagttaagaaatgaaactgtagcaattatgtaaatgaatgtgttggcctcttaatacctgttactagtggacttcctgtgaggaagttagttttttgttttgatgaaatgctttcgttttttaaatcttaattctgctgtccacatcctcccaaagtgtgcttacttcatttgtttaatttaaatgaactttcctccttgtatgtatgaggtgacttggtgggtggggtgggtggtttt

SEQ ID NO: 184051 - DNA, 1498 bp, Homo Sapiens
  misc_feature (531)..(590): n is a, c, g, or t
  misc_feature (1275)..(1283): n is a, c, g, or t
ttgggttactactttggatctggcaccgcccaccaagaaattgatgatgtggaaagagacaggaggagtagaaaaactgttttctttacctgctcagcctttgtggaataacagactactgaagctctttacacgctgtcttacaccgcttgtaccagaagaccttagaaaaaggaggaaaggaggagaggcagataatttggatgaattcctcaaagaatttgaaaatccagaggttcctagagaggaccagcaacagcagcatcagcagcgtgatgttatcgatgagcccattattgaagagccaagccgcctccaggagtcagtgatggaggccagcagacaaacatagatgagtcagctatgcctccaccaccacctcagggagttaagcgaaaagctggacaaattgacccagagcctgtgatgcctcctcagcaggtagagcagatggaaataccacctgtagagcttcccccagaagaacctccaaatatctgtcagctaataccagagttagaacttctgccnnnnnnnnnnnnnnnnnnnnnnnnnnnnnnnnnnnnnnnnnnnnnnnnnnnnnnnnnnnntgcatcagggggcgatcaagatcaggaagaaagaagatggaacaaaaggactcagcagatgcttcatggtcttcagcgtgctcttgctaaaactggagctgaatctatcagtttgcttgagttatgtcgaaatacgaacagaaaacaagctgccgcaaagttctacagcttcttggttcttaaaaagcagcaagctattgagctgacacaggaagaaccgtacagtgacatcatcgcaacacctggaccaaggttccatattatataaggagctagaagcattatagctagtgtttgattcactagtgcttacaaattgcccccatgtgtaggggacacagaaccctttgagaaaacttagatttttgtctgtacaaagtctttgcctttttccttcttcatttttttccagtacattaaatttgtcaatttcatctttgagggaaactgattagatgggttgtgtttgtgttctgatggagaaaacagcaccccaaggactcagaagatgattttaacagttcagaacagatgtgtgcaatattggtgcatgtaataatgttgagtggcagtcaaaagtcatgatttttatcttagttcttcattactgcattgaaaaggaaaacctgtctgagaaaatgcctgacagtttaatttaaaactatggtgtaagtctttgacaagnnnnnnnnncaaacaaacacttctttccatcagtaacactggcaatcttcctgttaaccactctccttagggatggtatctgaaacaacaatggtcaccctcttgagattcgttttaagtgtaattccataatgagcagaggtgtacgcgaaattgtgttatgactgatagccttcagctacaaaaagataggactgacctggtttaaagccaacttttttgta

SEQ ID NO: 184052 - DNA, 1875 bp, Homo Sapiens
  misc_feature (1638)..(1695): n is a, c, g, or t
ttggcatgcagcttgggcccgcatcatcgcttgttcggttttcttctgttttcatagccagccagaacaatgttctacgcacattttgttctcagtaaaagagggcctctggccaaaatttggctagcggcccattgggataagaagctaaccaaagcccatgtgttcgagtgtaatttagagagcagcgtggagagtatcatctcaccaaaggtgaaaatggcattacggacatcaggacatctcttactgggagtagttcgaatctatcacaggaaagccaaataccttcttgcagactgtaatgaagcattcattaagataaagatggcttttcggccaggtgtggttgacctgcctgaggaaaatcgggaagcagcttataatgccattactttacctgaagaatttcatgactttgatcagccactgcctgacttagatgacatcgatgtggcccagcagttcagcttgaatcagagtagagtggaagagataaccatgagagaagaagttgggaacatcagtattttacaagaaaatgattttggtgattttggaatggatgatcgtgagataatgagagaaggcagtgcttttgaggatgacgacatgttagtaagcactactacttctaacctcctattagagtctgaacagagcaccagcaatctgaatgagaaaattaaccatttagaatatgaagatcaatataaggatgataattttggagaaggaaatgatggtggaatattagatgacaaacttattagtaataatgatggcggtatctttgatgatccccctgccctctctgaggcaggggtgatgttgccagagcagcctgcacatgacgatatggatgaggatgataatgtatcaatgggtgggcctgatagtcctgattcagtggatcccgttgaaccaatgccaaccatgactgatcaaacaacacttgttccaaatgaggaagaagcatttgcattggagcctattgatataactgttaaagaaacaaaagccaagaggaagaggaagctaattgttgacagtgtcaaagagttggatagcaagacaattagagcccaacttagtgattattcagatattgttactactttggatctggcaccgcccaccaagaaattgatgatgtggaaagagacaggaggagtagaaaaactgttttctttacctgctcagcctttgtggaataacagactactgaagctctttacacgctgtcttacaccgcttgtaccagaagaccttagaaaaaggaggaaaggaggagaggcagataatttggatgaattcctcaaagaatttgaaaatccagaggttcctagagaggaccagcaacagcagcatcagcagcgtgatgttatcgatgagcccattattgaagagccaagccgcctccaggagtcagtgatggaggccagcagaacaaacatagatgagtcagctatgcctccaccaccacctcagggagttaagcgaaaagccggacaaattgacccagagcctgtgatgcctcctcagcaggtagagcagatggaaataccacctgtagagcttcccccagaagaacctccaaatatctgtcagctaataccagagttagaacttctgccnnnnnnnnnnnnnnnnnnnnnnnnnnnnnnnnnnnnnnnnnnnnnnnnnnnnnnnnnngatgcatcaggggcgatcaagatcacgaagaaagaagatggaacaaaatgactcagcagatgcttcatggtcttcagcgtgctcttgctaaaactggagctgaatctatcagtttgcttgagttatgtcgaaatacgaacagaaaacaagctgccgccaaagttctacagcttcttgggt

SEQ ID NO: 184053 - DNA, 1472 bp, Homo Sapiens
  misc_feature (491)..(526): n is a, c, g, or t
  misc_feature (1235)..(1244): n is a, c, g, or t
ttgggatgtggaaagagacaggaggagtagaaaaactgttttctttacctgctcagcctttgtggaataacagactactgaagctctttacacgctgtcttacaccgcttgtaccagaagaccttagaaaaaggaggaaaggaggagaggcagataatttggatgaattcctcaaagaatttgaaaatccagaggttcctagagaggaccagcaacagcagcatcagcagcgtgatgttatcgatgagcccattattgaagagccaagccgcctccaggagtcagtgatggaggccagcagaacaaacatagatgagtcagctatgcctccaccaccacctcagggagttaagcgaaaagctggacaaattgacccagagcctgtgatgcctcctcagcaggtagagcagatggaaataccacctgtagagcttcccccagaagaacctccaaatatctgtcagctaataccagagttagaacttctgccnnnnnnnnnnnnnnnnnnnnnnnnnnnnnnnnnnnntgatgaagaggaagaggatgaagatgcatcagggggcgatcaagatcaggaagaaagaagatggaacaaaaggactcagcagatgcttcatggtcttcagcgtgctcttgctaaaactggagctgaatctatcagtttgcttgagttatgtcgaaatacgaacagaaaacaagctgccgcaaagttctacagcttcttggttcttaaaaagcagcaagctattgagctgacacaggaagaaccgtacagtgacatcatcgcaacacctggaccaaggttccatattatataaggagctagaagcattatagctagtgtttgattcactagtgcttacaaattgcccccatgtgtaggggacacagaaccctttgagaaaacttagatttttgtctgtacaaagtctttgcctttttccttcttcatttttttccagtacattaaatttgtcaatttcatctttgagggaaactgattagatgggttgtgtttgtgttctgatggagaaaacagcaccccaaggactcagaagatgattttaacagttcagaacagatgtgtgcaatattggtgcatgtaataatgttgagtggcagtcaaaagtcatgatttttatcttagttcttcattactgcattgaaaaggaaaacctgtctgagaaaatgcctgacagtttaatttaaaactatggtgtaagtctttgacaagnnnnnnnnnncaaacaaacacttctttccatcagtaacactggcaatcttcctgttaaccactctccttagggatggtatctgaaacaacaatggtcaccctcttgagattcgttttaagtgtaattccataatgagcagaggtgtacgcgaaattgtgttatgactgatagccttcagctacaaaaggataggactgacctggtttaaagtgttctattttgtaaatcattccattt

SEQ ID NO: 184054 - DNA, 1500 bp, Homo Sapiens
  misc_feature (372)..(432): n is a, c, g, or t
  misc_feature (1117)..(1125): n is a, c, g, or t
ttggcttagaaaaaggaggaaaggaggagaggcagataatttggatgaattcctcaaagaatttgaaaatccagaggttcctagagaggaccagcaacagcagcatcagcagcgtgatgttatcgatgagcccattattgaagagccaagccgcctccaggagtcagtgatggaggccagcagaacaaacatagatgagtcagctatgcctccaccaccacctcagggagttaagcgaaaagctggacaaattgacccagagcctgtgatgcctcctcagcaggtagagcagatggaaataccacctgtagagcttcccccagaagaacctccaaatatctgtcagctaataccagagttagaacttctgcnnnnnnnnnnnnnnnnnnnnnnnnnnnnnnnnnnnnnnnnnnnnnnnnnnnnnnnnnnnnntgcatcagggggcgatcaagatcaggaagaaagaagatggaacaaaaggactcagcagatgcttcatggtcttcagcgtgctcttgctaaaactggagctgaatctatcagtttgcttgagttatgtcgaaatacgaacagaaaacaagctgccgcaaagttctacagcttcttggttcttaaaaagcagcaagctattgagctgacacaggaagaaccgtacagtgacatcatcgcaacacctggaccaaggttccatattatataaggagctagaagcattatagctagtgtttgattcactagtgcttacaaattgcccccatgtgtaggggacacagaaccctttgagaaaacttagatttttgtctgtacaaagtctttgcctttttccttcttcatttttttccagtacattaaatttgtcaatttcatctttgagggaaactgattagatgggttgtgtttgtgttctgatggagaaaacagcaccccaaggactcagaagatgattttaacagttcagaacagatgtgtgcaatattggtgcatgtaataatgttgagtggcagtcaaaagtcatgatttttatcttagttcttcattactgcattgaaaaggaaaacctgtctgagaaaatgcctgacagtttaatttaaaactatggtgtaagtctttgacaagnnnnnnnnncaaacaaacacttctttccatcagtaacactggcaatcttcctgttaaccactctccttagggatggtatctgaaacaacaatggtcaccctcttgagattcgttttaagtgtaattccataatgagcagaggtgtacgcgaaattgtgttatgactgatagccttcagctacaaaaagataggactgacctggtttaaagtgttctattttgtaaatcattccatttgagtctttctgatgaacttggctatactgaaatctgttattttagtgaggctccaaaatgagcaagctaggcctgattagagtagagtgactattaaaaaacatacctttctaggagctataaatcaagttttaaaagatgtttgga

SEQ ID NO: 184055 - DNA, 1141 bp, Homo Sapiens
gaaaatgaagtcagtggtatagttcctcatgcacttttcattccttaacaccaagcccctttcacagttgttttcatcttttgcaccagatgttcaacattgctgtgcagatagtattgagtgctgtgtcagccccaacgctgaagtctgagccagggacattgttggagactgtagcaggaatgaccacaattgggatgcagagctcatcaaactgcttcctgccctccatcagttccaggccccctgtgtaagcctcaaagcccccaatgatgacaaggccctgaatgttaaacttagttatattggcactgatctgttcaaagctcttcttgggtagagtccttttagtcccaagtttagagccaccttggccagtccagcccccaacatagctccagccagcttcctctatctgccccttggccaggccctcgaaaccatcatggacaacgagcactcggttgccctggataaggccaatcctcacagtggagcgaacagcagcattcatgcctgcagccggagcccccacgttcatcacagccactgtgtgcgaaccactcttagataccgggggtctgacatgagctagaagcttgtacacctcccagttgttcatgaagctccggcctctcagcttcagggcttcgtcaaatttcttctcatccatggccttggtcacatctttggtcacctggacacattccatgaggggcaggcgcacagcctggttaccagagaggctcactacacaggctggggtatctggggtcccctccaaaagtgccatcactgcttccacacccatcctgctgcccagaattctgtcaaaggctgatggcgtcccacccctctgcacatgccccaagacagtaacccgggtgtcatatcccagacgcttaaccaccagattcttgatgtcttctgaggtgattggttttccattcttgtcaattgcaccctcagccacaatgatgatgttgagacgagaaccacgggtccttgtctcgctgagtcggcgacaaaggtgttcctcccagtcgtcatctggtggacattcaggaataaaaacccagtcggccccacaggacagagaggtgacaagggccaggtatccacagtgggggcccattaccaa

SEQ ID NO: 184056 - DNA, 1414 bp, Homo Sapiens
ttggattttaaactttgcttttttccactgggttgtcagcatttttagtaaatataatgttgattttcgtttgttttttggtaatgtttggattgtaaagtaaaatgtatgtagccactttaagtcccagatttggagatgtaatcaaatggcctcaattcctaagtgagtaaccttaaataaatagttatttttttaattgacaaataagttttttacatattcaaggactactacatagtgatgtttcaatacatataatgtatagtgatcagatcggggtaattagcatattcatcaaatagtttttagtctgtactttttctagaaagttttaagatttttctagagaatttcaggatcaaagaggggaggagcttaatgaaagagttggtaaatcaagtgaatggagggagttttccccaccttcttatgtatgtttcctttgatttggtcgtaattgtttcttttgctttgcacagactcaaatccagtacctcaagcaagtccagcagccgagcgttgcccaactgagatcaacaatggtagacccagcgatcaacttgtttttcctaaaaatgaaaggtgaactggaacagactaaagacaaactggaacaagcccaaaatgaactgagtgcctggaagtttacgcctgataggtaaacaaatcatactccccagtcaagacttccctgacagtcccactacgagaaagctgtggtgggacagccaagtactcgtttccacaccaagactcagactttttgagccaaaaaaaagccacattcttacactgtccagcttgtaatggttaatgtaaaacttaccagatgaaccttgtgtttcagcttttttcttttccccttccccttgcttcagaggcctgatggcgtcggactattccgaagaagtggccacctccgaaaaattccccttctagaacatgtagacacttgagaaatgtttctgtttgaagaaaatagagggagaaacagaagtcttaagtctgtggcacactgtgtcttcagacagtttgaaggaatgaaaacctagagattttaaatcatgaattgaacatgtaaaattccagtaaaatgtaaaaacggaatatgcatcgctcttaaccttgagcatagtgacttagagacactgtgtatcagttttgccaataagactgtggacttcatgattgttgttgaacttctgggtcaaaactcaaatgaggtgaattttgcctttaaagggtttatttgctgagaaacaactttcaatagtcatgagagaatcaaataatagatgtccgtacaagtagcgcatatatttaaccatttagtttggggctctatattacttgcttgagccttaatcaatgtggttttattcaatggtttgttctttgaatggttgcaaaa

SEQ ID NO: 184057 - DNA, 2369 bp, Homo Sapiens
  misc_feature (1893)..(1905): n is a, c, g, or t
  misc_feature (2215)..(2224): n is a, c, g, or t
tctacaaaaaagttggtgatcgtcgaagggcatctaaccaaagcggtagaagaaacaaagctttcaaaagaaaatcagacaagagcaaaagaatctgatttttcagatactctgagtccaagcaaggaaaaaagcagtgacgacactacagacgcccaaatggatgagcaagacctaaatgagcctcttgccaaagtgtcccttttaaaagatgacttgcagggtgcacagtcagaaattgaggcaaagcaagaaatacagcatcttcgaaaggaattgatcgaagcccaggagctagctagaacaagtaaacaaaaatgctttgaacttcaagctcttttggaagaagaaagaaaagcctatcgaaatcaagttgaggaatccactaaacaaatacaggttcttcaagcccaattgcagaggttacacatcgatactgagaatctccgggaggagaaggacagtgaaatcacaagtactagagatgaattgcttagtgcccgagatgaaattttgctccttcatcaagcagcagcaaaggttgcctctgagcgggacactgacattgcttctttacaagaagagcttaagaaggtgagagctgagcttgagcggtggcggaaagcagcgtctgaatatgagaaagaaatcacaagtctgcaaaacagttttcagcttagatgtcaacagtgtgaggaccagcagagagaagaagcaacaaggttgcaaggtgaactagagaagttgagaaaggaatggaatgcattggaaaccgaatgccattctctaaaaagggaaaatgttttgctatcatcagaactgcaacggcaagaaaaagaattgcacaattctcagaagcagagtttagagcttaccagtgatctcagcatccttcaaatgtctaggaaagaacttgagaatcaagtgggatccttgaaagaacagcatcttcgggattcagctgatttaaaaactcttctcagtaaggcagaaaaccaagcaaaggatgtgcagaaagagtatgaaaagacacagactgtactctcagaactgaagttgaagtttgaaatgactgagcaggaaaagcagtcaatcacagatgagctcaaacagtgtaaaaacaacctgaagctgctccgagagaaaggaaataatccttccatattacaacccgtcccagccgtattcatcggcctattcctggctttcctgttttggtgtttcggtccattgtggtagagaaagaaaccctggccctggatgcccatgttggctgccctggttgcagtaacagccatcgtgctgtacgtgccaggtctggccagagcttctccatgagagcgttccttgagtccgtacaccgtcctccctctagaagctggcatcacactcatgctggggacaaacagaaccattttcttcctctttacctcttaaaacagcagaagtacaagaatacagctgtagggtcattgctttaaattatataaaatgtatctgtctataaagaagatataaaattgtgactttattctactgtaagcaataatttgcttgcaatttttcatgtaatttttaaattagtatgttaagattctgaatattatggtggcctaaagtaggcttcttggtacaccagattatttataacattaaatttatgagtattttactctgaattctgatcaccagataattcatttttctgatttgataactacccaaaccaaacaaccaatacatacatgggaagagaggccctgtgtgctcagtgcctatcagtttgaaatatatacacatatatatattttttacatatttacgccatttttacttgttatgaaaccactgagctattgggaacaagacttagagacaactatttgcgtggannnnnnnnnnnnnaaggaaaaatacgtttggaaaataaactgttatggtgataatttggggaatatgtgcacgcttgttcagccttaatgtgacttgaagatgtggaggacatcaactttgaaaaactttccatgagagtgtattttcttgagcaaactgaagtatttctgggagcaaaaacatagtaattacacaatttcagtgcagtcaaccaaaatgttgagtcaattggaatgtaatttattaaaccatgtatttaaagagatatttttctttaaaagccaagttactttctcatatacagcattttaggaagcatgannnnnnnnnnctatcatctattcctccaagcatgtttaattgaagaaagtattaatatctctttagataagcttgtattgacctaatttggtttatgatgtgtcagagctaattcatgttcagggtgagcgttgtacctaccaacaaatttcctg

SEQ ID NO: 184058 - DNA, 1146 bp, Homo Sapiens
  misc_feature (61)..(73): n is a, c, g, or t
  misc_feature (383)..(392): n is a, c, g, or t
ttgggttatgaaaccactgagctattgggaacaagacttagagacaactatttgcgtggannnnnnnnnnnnnaaggaaaaatacgtttggaaaataaactgttatggtgataatttggggaatatgtgcacgcttgttcagccttaatgtgacttgaagatgtggaggacatcaactttgaaaaactttccatgagagtgtattttcttgagcaaactgaagtatttctgggagcaaaaacatagtaattacacaatttcagtgcagtcaaccaaaatgttgagtcaattggaatgtaatttattaaaccatgtatttaaagagatatttttctttaaaagccaagttactttctcatatacagcattttaggaagcatgannnnnnnnnnctatcatctattcctccaagcatgtttaattgaagaaagtattaatatctctttagataagcttgtattgacctaatttggtttatgatgtgtcagagctaattcatgttcagggtgagcgttgtacctaccaacaaatttcctggttgggtatgcaaatggttattttctttttattgttgttaattgggactttctgttaatgaaaagcactattcccaagattaatagtgttctatgcacaatgaagcacctaaaaacactgcttgatattataaatttaaaacacaagtgaaagtttagccatggttttgtgcggcatcatagttatgtcaataaagtttatttaggtcataaaatatcctaaagtatcacatagttaaatttttcagtcagtgaagaccgggagggaatgtcagtgaattggcttgaatgttctgtggcaatccacaggtctagccaaatattgaaataggagtttagggtataatttgccttgtgatgtttggcagtcactgtttatactttaaaggttatattttaagctatttgagattgcttttgggaagatcactaaatttatggaggaattagtcacaaatgacttgtagaaaatactgtcatatagttcatttcatcattttctgttgtatgaagccactccaccacagaatgctaatatgccagtggtacccagtacctcttgtatataggttattgcaaatattgttctgaaatgcttaacttcagaatt

SEQ ID NO: 184059 - DNA, 3010 bp, Homo Sapiens
ttggctcaaccaactcaagcacctgacattaagatttcaagtcaagtggagagttctctggttcctacagcttgggtggataacacagttaatacccccaaacagttggaaatggagaagaatgcagaacccacatccaagggaacaccacggagaaaacacgggaagaggccaaacaaacatcgatataccccttctacagtgagctcaagagcgtccggatccaagcccagcccttctccagaaaataaacatagaaacattgttactcccagttcagaaactatacttttgcctagaactgtttctctgaaaactgagggcccttatgattccttagattacatgacaaccaccagaaaaatatattcatcttaccctaaagtccaagagacacttccagtcacatataaacccacatcagatggaaaagaaattaaggatgatgttgccacaaatgttgacaaacataaaagtgacattttagtcactggtgaatcaattactaatgccataccaacttctcgctccttggtctccactatgggagaatttaaggaagaatcctctcctgtaggctttccaggaactccaacctggaatccctcaaggacggcccagcctgggaggctacagacagacatacctgttaccacttctggggaaaatcttacagaccctccccttcttaaagagcttgaggatgtggatttcacttccgagtttttgtcctctttgacagtctccacaccatttcaccaggaagaagctggttcttccacaactctctcaagcataaaagtggaggtggcttcaagtcaggcagaaaccaccacccttgatcaagatcatcttgaaaccactgtggctattctcctttctgaaactagaccacagaatcacacccctactgctgcccggatgaaggagccagcatcctcgtccccatccacaattctcatgtctttgggacaaaccaccaccactaagccagcacttcccagtccaagaatatctcaagcatctagagattccaaggaaaatgttttcttgaattatgtggggaatccagaaacagaagcaaccccagtgaacaatgaaggaacacagcatatgtcagggccaaatgaattatcaacaccctcttccgaccaggatgcatttaacttgtctacaaagctggaattggaaaagcaagtatttggtagtaggagtctaccacgtggcccagatagccaacgccaggatggaagagttcatgcttctcatcaactaaccagagtccctgccaaacccatcctaccaacagcaacagtgaggctgcctgaaatgtccacacaaagcgcttccagatactttgtaacttcccagtcacctcgtcactggaccaacaaaccggaaataactacatatccttctggggctttgccagagaacaaacagtttacaacttcaagattatcaagtacaacaattcctctcccattgcacatgtccaaacccagcattcctagtaagtttactgaccgaagaactgaccaattcaatggctactccaaagtgtttggaaataacaacatccctgaggcaagaaacccagttggaaagcctcccagtccaagaattcctcattattccaatggaagactccctttctttaccaacaagactctttcttttccacagttgggagtcacccggagaccccagatacccacttctcctgccccagtaatgagagagagaaaagttattccaggttcctacaacaggatacattcccatagcaccttccatctggactttggccctccggcacctccgttgttgcacactccgcagaccacgggatcaccctcaactaacttacagaatatccctatggtctcttccacccagagttctatctcctttataacatcttctgtccagtcctcaggaagcttccaccagagcagctcaaagttctttgcaggaggacctcctgcatccaaattctggtctcttggggaaaagccacaaatcctcaccaagtccccacagactgtgtccgtcaccgctgagacagacactgtgttcccctgtgaggcaacaggaaaaccaaagcctttcgttacttggacaaaggtttccacaggagctcttatgactccgaataccaggatacaacggtttgaggttctcaagaacggtaccttagtgatacggaaggttcaagtacaagatcgaggccagtatatgtgcaccgccagcaacctgcacggcctggacaggatggtggtcttgctttcggtcaccgtgcagcaacctcaaatcctagcctcccactaccaggacgtcactgtctacctgggagacaccattgcaatggagtgtctggccaaagggaccccagccccccaaatttcctggatcttccctgacaggagggtgtggcaaactgtgtcccccgtggagggccgcatcaccctgcacgaaaaccggaccctttccatcaaggaggcgtccttctcagacagaggcgtctataagtgcgtggccagcaatgcagccggggcggacagcctggccatccgcctgcacgtggcggcactgccccccgttatccaccaggagaagctggagaacatctcgctgcccccggggctcagcattcacattcactgcactgccaaggctgcgcccctgcccagcgtgcgctgggtgctcggggacggtacccagatccgcccctcgcagttcctccacgggaacttgtttgttttccccaacgggacgctctacatccgcaacctcgcgcccaaggacagcgggcgctatgagtgcgtggccgccaacctggtaggctccgcgcgcaggacggtgcagctgaacgtgcagcgtgcagcagccaacgcgcgcatcacgggcacctccccgcggaggacggacgtcaggtacggaagaaccctcaagctggactgcagcgcctccgggggacccctggccgcgcatcctctggagggctgcc

SEQ ID NO: 184060 - DNA, 908 bp, Homo Sapiens
ttggcttagggcaggatgaacgctgctttccaagatggcgacggagggaggagggaaggagatgaacgagattaagacccaattcaccacccgggaaggtctgtacaagctgctgccgcactcggagtacagccggcccaaccgggtgcccttcaactcgcagggatccaaccctgtccgcgtctccttcgtaaacctcaacgaccagtctggcaacggcgaccgcctctgcttcaatgtgggccgggagctgtacttctatatctacaagggggtccgcaaggctgctgacttgagtaaaccaatagataaaaggatatacaaaggaacacagcctacttgtcatgacttcaaccacctaacagccacagcagaaagtgtctctctcctagtgggcttttccgcaggccaagtccagcttatagacccaatcaaaaaagaaactagcaaactttttaatgaggaaagactaatagacaagtcacgagttacctgtgtcaaatgggttcccggttcggaaagccttttcctagtagcccactcgagtgggaacatgtacttatataatgtggagcacacttgtggcaccacagccccccactaccagcttctgaagcagggagagagctttgccgtgcacacttgcaagagcaaatccacgaggaaccctctccttaagtggacggtgggcgagggggccctcaacgagtttgctttctccccagatggcaagttcttagcgtgcgtgagccaggacgggtttctgcgggtgttcaactttgactcagtggagctgcacggtacgatgaaaagctactttgggggcttgctgtgtgtgtgctggagcccggatggcaagtacatcgtgacagggggggaggacgacttggtgacagtctggtcctttg

SEQ ID NO: 184061 - DNA, 1728 bp, Homo Sapiens
ttggggccttaggtgtctcgtgtctggggttgatccgagctgtcgccgccgccgccgcaatgggcaaaacggccaactctccgggttcgggagcccgacccgacccggtgcggagcttcaatcgctggaagaaaaaacacagccataggcagaacaaaaagaagcagttgaggaagcaactgaagaaacccgaatggcaggtcgagcgcgagagtatcagccgcctcatgcagaactatgaaaagataaatgtaaatgaaatcacaagattttcagattttcccttgtccaaaaaaacattgaaaggtttgcaagaagctcagtaccgtttggtgactgagatacagaagcagaccattggattggctttgcaaggtaaagatgtacttggagcggccaaaactggatctggcaagactctggcttttcttgttccagtgctggaagccttatatcgtctgcaatggacttcaacagatgggctgggggttctcataatatcacctacgagagaactggcctatcagacctttgaggttctccgaaaagtaggaaagaatcatgacttctcagctggtctcatcattggtggaaaggatctaaaacacgaagctgagaggatcaacaacataaatatactcgtgtgcacaccaggtcggcttcttcaacacatggatgaaacagtatcttttcatgctaccgacctccaaatgttagttcttgatgaagcagatagaatcttggatatgggctttgctgataccatgaatgctgttattgaaaatctccccaagaaacgtcagactttacttttctcagcaacacaaactaaatctgtaaaggaccttgcacgcttgagtttgaaaaaccctgagtatgtctgggttcatgaaaaagcaaaatatagcacccctgccactttggaacagaactacatagtctgtgagctgcagcaaaaaataagtgtgctgtattcctttttgagaagccatctgaagaagaagagcattgtatttttttccagttgcaaagaggtccagtatctgtaccgagtgttttgccggctacgtcctggtgtttctatccttgcactccatggtcgacagcagcaaatgagaagaatggaagtctataatgagtttgtccgtaagagagctgcagtactctttgctactgatattgcagccaggggtctggatttcccggccgtgaattgggttcttcagtttgattgtcctgaggatgccaacacatatattcacagagcaggtagaactgccaggtacaaagaggatggtgaagctttgctaattttgctaccctcagaaaaagctatggtgcagcagcttcttcagaagaaagtacctgtgaaggaaatcaaaatcaatccagaaaaacttatagatgtccagaaaaaattggaatctattttagctcaagatcaagatttaaaagaaagagctcaaaggtgtttcgtctcctatgtacgatctgtatatctgatgaaggataaagaagtatttgatgtgagcaagttacctatacctgaatatgccctgtctcttggtcttgctgtggcaccacgcgtaagatttcttcagaaaatgcagaaacaacccacccaagaaatggtaaaggagccaagcccgataaagtatttgagccaagggctccctccctcaccaatgacgaaatggaagaatttataggcctacttcaatgaaaaaa

SEQ ID NO: 184062 - DNA, 1892 bp, Homo Sapiens
ttggtgaaaaacacaaccttaagcaaaacctttttctgtttgttgatttatcagaacaagaaattggattctcaggatttatagttaaagaagggagcaaacccattttaatcatgcatatttttgaggatgatccgttggtgctgaatgagatcagagaagaccttcgagtagagtgttcgaagtttggacaaattaggaaactccttctctttgataggcacccagatggtgtggcctctgtgtcctttcgggatccagaggaagctgattattgtattcagactctcgatggaagatggtttggtggccgtcaaatcactgcccaggcatgggatgggactacagattatcaggtggaggaaacctcaagagaaagggaggaaaggctgagaggatgggaggctttcctcaatgctcctgaggccaacagaggccttaggcgttcagattctgtctctgcttccgaaagggcagggccttctagagcaaggcatttttcagagcaccccagcacatctaaaatgaatgctcaagaaactgcaactggaatggcgtttgaagaacctatagatgagaagaagtttgaaaagacagaagatgggggagaatttgaagaaggtgcttctgaaaacaatgctaaggaaagtagccccgaaaaagaggctgaagaaggctgccctgaaaaagaatctgaagagggctgccccaaaagagggtttgaaggcagctgctcccaaaaagagtctgaagaaggcaatcccgtaagaggatctgaagaggatagtcctaaaaaagagtctaaaaagaagacactcaaaaatgattgtgaagagaatggccttgcaaaggaatctgaagatgacctcaacaaggagtctgaagaggaggttggccccacaaaagagtccgaagaagatgactcagagaaagagtctgatgaagactgctctgaaaaacagtctgaagatggctccgaaagagaatttgaagaaaatggtctcgagaaagatttggacgaggaaggttctgaaaaggagcttcatgaaaatgttcttgacaaagagttagaagaaaatgactctgaaaactccgaatttgaagatgacggctctgaaaaagtgttagatgaggaaggctctgagagagagtttgacgaagattcagatgaaaaggaagaagaggagggtacatatgaaaaagtatttgatgatgagtctgatgagaaagaggatgaagaatatgcagatgaaaaggggcttgaagctgctgataaaaaggcggaagaaggtgatgcagatgaaaagctgtttgaagagtcagatgacaaggaagatgaagatgcagatggaaaggaagttgaagatgctgacgaaaagttgttcgaagatgatgattccaatgagaagttgtttgatgaggaggaagattccagtgagaagttgtttgacgattctgatgagagggggactttgggtggttttgggagtgttgaagaagggcccctatccactggcagcagctttattctcagtagcgatgatgatgacgatgatatttaatcccttaaacttgctttttagggagagtcctccatctacatttgcctgtgcttcagggtaattactagtagtgttacatgaacatgtgcatagtggtaggatgccatcagattaaagcattgaagtgtttcattgttacctgtacctaatggttttaaatatatgttaattgattgtttagttaaaatgtcatagttacaatgcaagtaaactggatacttgttcttttgtcagatttgttaaatgcatgcagaataatatttttaacagtattgattgaagtttgtgatattcatcaataaaaaatgagttgataatatgcagaaactg

SEQ ID NO: 184063 - DNA, 1492 bp, Homo Sapiens
gccaactttgtacaaaaaagttggcctttctctgctcagctccagcgtcatttcggcctcttagttcttctgaaccctgctcctgagctaggtaggaaacatgagcggcaccaacttggatgggaacgatgagtttgatgagcagttgcgaatgcaagaattgtacggagacggcaaggatggtgacacccagaccgatgccggcggagaacccgattctctcgggcagcagccgacggacactccctacgagtgggacctggacaaaaaggcttggttccccaagattactgaagatttcattgctacatatcaggccaattatggcttctctaacgatggcgcatctagttctaccgcaaatgttgaagatgtccatgctaggactgcagaggaacctccacaagaaaaagccccggaacccactgatgccagaaagaagggagaaaaaagaaaggctgagtcaggatggtttcatgttgaagaagacagaaatacaaatgtatacgtgtctggtttgcctccagatattacagtggatgaatttatacaacttatgtccaagtttggcattattatgagagatcctcagacagaagaatttaaggtcaaactttacaaagataatcaaggaaatcttaaaggagacggtctttgctgttatttgaaaagagaatctgtggaacttgcattaaaacttttggatgaagatgaaattagaggctacaaattacatgttgaggtggcaaagtttcaactgaagggagaatatgatgcctcaaagaagaagaagaagtgcaaagactataagaagaagctgtctatgcaacaaaagcagttggattggagacctgagaggcgagccggaccatcccggatgcgccatgagcgagttgtcatcatcaagaatatgtttcatcctatggattttgaggatgatccgttggtgctgaatgagatcagagaagaccttcgagtagagtgttcgaagtttggacaaattaggaaactccttctctttgataggcacccagatggtgtggcctctgtgtcctttcgggatccagaggaagctgattattgtattcagactctcgatggaagatggtttggtggccgtcaaatcactgcccaggcatgggatgggactacagattatcaggtggaggaaacctcaagagaaagggaggaaaggctgagaggatgggaggctttcctcaatgctcctgaggccaacagaggccttaggcgttcagattctgtctctgcttccgaaagggcagggccttctagagcaaggcatttttcagagcaccccagcacatctaaaatgaatgctcaagaaactgcaactggaatggcgtttgaagaacctatagatgagaagaagtttgaaaagacagaagatgggggagaatttgaagaaagtgcttctgaaaacaatgctaagaaagtagccccgaaaagagctgagaaagctgccctgaaaaga

SEQ ID NO: 184064 - DNA, 3627 bp, Homo Sapiens
agttggctcagctccttttcctgagcccgccgcgatgggagctgcgcggggatccccggccagaccccgccggttgcctctgctcagcgtcctgctgctgccgctgctgggcggtacccagacagccattgtcttcatcaagcagccgtcctcccaggatgcactgcaggggcgccgggcgctgcttcgctgtgaggttgaggctccgggcccggtacatgtgtactggctgctcgatggggcccctgtccaggacacggagcggcgtttcgcccagggcagcagcctgagctttgcagctgtggaccggctgcaggactctggcaccttccagtgtgtggctcgggatgatgtcactggagaagaagcccgcagtgccaacgcctccttcaacatcaaatggattgaggcaggtcctgtggtcctgaagcatccagcctcggaagctgagatccagccacagacccaggtcacacttcgttgccacattgatgggcaccctcggcccacctaccaatggttccgagatgggacccccctttctgatggtcagagcaaccacacagtcagcagcaaggagcggaacctgacgctccggccagctggtcctgagcatagtgggctgtattcctgctgcgcccacagtgcttttggccaggcttgcagcagccagaacttcaccttgagcattgctgatgaaagctttgccagggtggtgctggcaccccaggacgtggtagtagcgaggtatgaggaggccatgttccattgccagttctcagcccagccacccccgagcctgcagtggctctttgaggatgagactcccatcactaaccgcagtcgccccccacacctccgcagagccacagtgtttgccaacgggtctctgctgctgacccaggtccggccacgcaatgcagggatctaccgctgcattggccaggggcagaggggcccacccatcatcctggaagccacacttcacctagcagagattgaagacatgccgctatttgagccacgggtgtttacagctggcagcgaggagcgtgtgacctgccttccccccaagggtctgccagagcccagcgtgtggtgggagcacgcgggagtccggctgcccacccatggcagggtctaccagaagggccacgagctggtgttggccaatattgctgaaagtgatgctggtgtctacacctgccacgcggccaacctggctggtcagcggagacaggatgtcaacatcactgtggccactgtgccctcctggctgaagaagccccaagacagccagctggaggagggcaaacccggctacttggattgcctgacccaggccacaccaaaacctacagttgtctggtacagaaaccagatgctcatctcagaggactcacggttcgaggtcttcaagaatgggaccttgcgcatcaacagcgtggaggtgtatgatgggacatggtaccgttgtatgagcagcaccccagccggcagcatcgaggcgcaagcccgtgtccaagtgctggaaaagctcaagttcacaccaccaccccagccacagcagtgcatggagtttgacaaggaggccacggtgccctgttcagccacaggccgagagaagcccactattaagtgggaacgggcagatgggagcagcctcccagagtgggtgacagacaacgctgggaccctgcattttgcccgggtgactcgagatgacgctggcaactacacttgcattgcctccaacgggccgcagggccagattcgtgcccatgtccagctcactgtggcagtttttatcaccttcaaagtggaaccagagcgtacgactgtgtaccagggccacacagccctactgcagtgcgaggcccagggggaccccaagccgctgattcagtggaaaggcaaggaccgcatcctggaccccaccaagctgggacccaggatgcacatcttccagaatggctccctggtgatccatgacgtggcccctgaggactcaggccgctacacctgcattgcaggcaacagctgcaacatcaagcacacggaggcccccctctatgtcgtggacaagcctgtgccggaggagtcggagggccctggcagccctcccccctacaagatgatccagaccattgggttgtcggtgggtgccgctgtggcctacatcattgccgtgctgggcctcatgttctactgcaagaagcgctgcaaagccaagcggctgcagaagcagcccgagggcgaggagccagagatggaatgcctcaacggtgggcctttgcagaacgggcagccctcagcagagatccaagaagaagtggccttgaccagcttgggctccggccccgcggccaccaacaaacgccacagcacaagtgataagatgcacttcccacggtctagcctgcagcccatcaccacgctggggaagagtgagtttggggaggtgttcctggcaaaggctcagggcttggaggagggagtggcagagaccctggtacttgtgaagagcctgcagagcaaggatgagcagcagcagctggacttccggagggagttggagatgtttgggaagctgaaccacgccaacgtggtgcggctcctggggctgtgccgggaggctgagccccactacatggtgctggaatatgtggatctgggagacctcaagcagttcctgaggatttccaagagcaaggatgaaaaattgaagtcacagcccctcagcaccaagcagaaggtggccctatgcacccaggtagccctgggcatggagcacctgtccaacaaccgctttgtgcataaggacttggctgcgcgtaactgcctggtcagtgcccagagacaagtgaaggtgtctgccctgggcctcagcaaggatgtgtacaacagtgagtactaccacttccgccaggcctgggtgccgctgcgctggatgtcccccgaggccatcctggagggtgacttctctaccaagtctgatgtctgggccttcggtgtgctgatgtgggaagtgtttacacatggagagatgccccatggtgggcaggcagatgatgaagtactggcagatttgcaggctgggaaggctagacttcctcagcccgagggctgcccttccaaactctatcggctgatgcagcgctgctgggccctcagccccaaggaccggccctccttcagtgagattgccagcgccctgggagacagcaccgtggacagcaagccgtgaggagggagcccgctcaggatggcctgggcaggggaggacatctctagagggaagctcacagcatgatgggcaagatccctgtcctcctgggccctgaggcccctgccctagtgcaacaggcattgctgaggtctgagcaggggcctggcctttcctcctcttcctcaccctcatcctttgggaggctgacttggacccaaactgggcgactagggctttgagctgggcagttttccctgccacctcttcctctatcagggacagtgtgggtgccacaggtaaccccaatttctggccttcaacttctcccttgaccgggtccaactctgccactcatctgccaactttgcctggggagggctaggcttgggatgagctgg

SEQ ID NO: 184065 - DNA, 1592 bp, Homo Sapiens
  misc_feature (532)..(573): n is a, c, g, or t
  misc_feature (1097)..(1131): n is a, c, g, or t
  misc_feature (1311)..(1365): n is a, c, g, or t
ttgtacaaaaaagttgggaactgggccccgtaacttcacaggcgtggacaccatggccagctacgaggaggttttgcacctgctgcgctatcggaactggcatgccaggtccttgcttgaccggaagtttaagctcatctgctcagagctgaatggccgctacatcagcaacgaatttaaggtggaggtgaatgtaatccacacggccaaccccatggaacacgccaaccacatggctgcccagccacagttcgtgcacccggaacaccgctcctttgttgacctgtcaggccacaacctggccaacccccacccgttcgcagtcgtccccagcactgcgacagttgtgatcgtggtgtgcgtcagcttcctggtgttcatgattatcctgggggtatttcggatccgggccgcacatcggcggaccatgcgggatcaggacaccgggaaggagaacgagatggactgggacgactctgccctgaccatcaccgtcaaccccatggagacctatgaggaccagcacagcagnnnnnnnnnnnnnnnnnnnnnnnnnnnnnnnnnnnnnnnnnncggcgaagaagaggatgacatcaccagcgccgagtcggagagcagcgaggaggaggagggggagcagggcgacccccagaacgcaacccggcagcagcagctggagtgggatgactccaccctcagctactgacccgtgcccccggccacctcggtttctgctttcgaagactctgctgccatccgttctcccagtcccaagggtccacgatgtacaaagtcatttcggccagtaggtgtgcagacccctccccgccacgatcgtcgctgtgcttggtgtgtaggaccctaggctccccgcccaccctctgcctggtcgcgctcttcagtcccacgaggagctgacacgtcctctctggccgccatccggctcgcacaggggcctcccagcgcctcaggccccgcgtttgtgtctggagtctccccccggggagaggacactggcccctcgcactccagaaaagccatgccagctgggctcgttgacaaagggtaaaacatgctcactcccacccggtaatcannnnnnnnnnnnnnnnnnnnnnnnnnnnnnnnnnnccaaactagtgcatgtataaataatggcaggatggggggtactgtgtagatgattaactgactttttaatattttgtaaataaatcggattccttgtgtcctttgtgctagtgtaacccgggactggaatgtaaagtgaagttcggagctctgagcacgggctcttcccgccgggtcctnnnnnnnnnnnnnnnnnnnnnnnnnnnnnnnnnnnnnnnnnnnnnnnnnnnnnnntgctcaggtctgagtgtggctgggagtcgggggccacaggcctctagctgtgctgctcaagagactggatcagggtagctacaagtggccgggccttgcctttgggattctacctgttcctaatttggtgtggggtgcgaggtcactggccccttatccacactcctcctccgacagcagctccctgggcagtggccagatctcaccgtgtgcagccttgtggttta

SEQ ID NO: 184066 - DNA, 2079 bp, Homo Sapiens
tcctccttggacccccggagctccccgcgccgcggagcagctggccccaggcccctagagccccgagagctccgagagctccgctcggcgtcccgcgcgcctccctgccgctcccgccccgggctggcgatgctgcgccgccccgctcccgcgctggccccggccgcccggctgctgctggccgggctgctgtgcggcggcggggtctgggccgcgcgagttaacaagcacaagccctggctggagcccacctaccacggcatagtcacagagaacgacaacaccgtgctcctcgaccccccactgatcgcgctggataaagatgcgcctctgcgatttgcaggtgagatttgtggatttaaaattcacgggcagaatgtcccctttgatgcagtggtagtggataaatccactggtgagggagtcattcgctccaaagagaaactggactgtgagctgcagaaagactattcattcaccatccaggcctatgattgtgggaagggacctgatggcaccaacgtgaaaaagtctcataaagcaactgttcatattcaggtgaacgacgtgaatgagtacgcgcccgtgttcaaggagaagtcctacaaagccacggtcatcgaggggaagcagtacgacagcattttgagggtggaggccgtggatgccgactgctcccctcagttcagccagatttgcagctacgaaatcatcactccagacgtgccctttactgttgacaaagatggttatataaaaaacacagagaaattaaactacgggaaagaacatcaatataagctgaccgtcactgcctatgactgtgggaagaaaagagccacagaagatgttttggtgaagatcagcattaagcccacctgcacccctgggtggcaaggatggaacaacaggattgagtatgagccgggcaccggcgcgttggccgtctttccaaatatccacctggagacatgtgacgagccagtcgcctcagtacaggccacagtggagctagaaaccagccacatagggaaaggctgcgaccgagacacctactcagagaagtccctccaccggctctgtggtgcggccgcgggcactgccgagctgctgccatccccgagtggatccctcaactggaccatgggcctgcccaccgacaatggccacgacagcgaccaggtgtttgagttcaacggcacccaggcagtgaggatcccggatggcgtcgtgtcggtcagccccaaagagccgttcaccatctcggtgtggatgagacatgggccattcggcaggaagaaggagacaattctttgcagttctgataaaacagatatgaatcggcaccactactccctctatgtccacgggtgccggctgatcttcctcttccgtcaggatccttctgaggagaagaaatacagacctgcagagttccactggaagttgaatcaggtctgtgatgaggaatggcaccactacgtcctcaatgtagaattcccgagtgtgactctctatgtggatggcacgtcccacgagcccttctctgtgactgaggattacccgctccatccatccaagatagaaactcagctcgtggtgggggcttgctggcaagagttttcaggagttgaaaatgacaatgaaactgagcctgtgactgtggcctctgcaggtggcgacctgcacatgacccagtttttccgaggcaatctggctggcttaactctccgttccgggaaactcgcggataagaaggtgatcgactgtctgtatacctgcaaggaggggctggacctgcaggtcctcgaagacagtggcagaggcgtgcagatccaagcacaccccagccagttggtattgaccttggagggagaagacctcggggaattggataaggccatgcagcacatctcgtacctgaactcccggcagttccccacgcccggaattcgcagactcaaaatcaccagcacaatcaagtgttttaacgaggccactgcatttcggtccccccggtagatggctacgtgatggttttacagcccgaggagcccaagatcagcctgaatggcgtcc

SEQ ID NO: 184067 - DNA, 1702 bp, Homo Sapiens
  misc_feature (180)..(211): n is a, c, g, or t
gaaagcagaaaccgaggtgtcccgggggcacggttcagtaggtgaagggtgaagtcatccccactccagctgctgctgccaggttgcgttctggaggtcgccctgctccccctcctcctcctcgatgctctccggactcggcgctggtgatgtcatcctcttattcgccgtcctcgctgnnnnnnnnnnnnnnnnnnnnnnnnnnnnnnnnactgctgtgctggtcctcataggtctccatggggttgacggtgatggtcagggcagagtcgtcccagtccatctcgttctccttcccggtgtcctgatcccgcatggtccgccgatgtgcggcccggatccgaaatacccccaggataatcatgaacaccaggaagctgacgcacaccacgatcacaactgtcgcagtgctggggacgactgcgaacgggtgggggttggccaggttgtggcctgacaggtcaacaaaggagcggtgttccgggtgcacgaactgtggctgggcagccatgtggttggcgtgttccatggggttggccgtgtggattacattcacctccaccttaaattcgttgctgatgtagcggccattcagctctgagcagatgagcttaaacttccggtcaagcaaggacctggcatgccagttccgatagcgcagcaggtgcaaaacctcctcgtagctggccatggtgtccacgcctgtgaaggtcatgcccagttcagagctgctcacttcaatgcccttctgctgcaggcgggccatgtccacctccaggctctcctgctcgtggttcagctcctctccctccaccgtgacctcacaggtatccaggtcgtgcacgatctcctcggacaccagtgattcttgaactgtggggtcctcagccccgtccccttcaggctccacttctctcgtgatggtgctgatgatgcgaagctcagggaaaaggaacaccccttctgagctttcaaattcagaagctgctcgggcaaaatggtggacgccactcaggctgatcttgggctcctcgggctgtaaaaccatcacgtagccatctaccggggggaccgaaatgcaggtggcctcgttaaaacacttgattgtgctggtgattttgagtctgcgaattccgggcgtggggaactgccgggagttcaggtacgagatgtgctgcatggccttatccaattccccgaggtcttctccctccaaggtcaataccaactggctggggtgtgcttggatctgcacgcctctgccactgtcttcgaggacctgcaggtccagcccctccttgcaggtatacagacagtcgatcaccttcttatccgcgagtttcccggaacggagagttaagccagccagattgcctcggaaaaactgggtcatgtgcaggtcgccaccttgccagcaagcccccaccacgagctgagtttctatcttggatggatggagcgggtaatcctcagtcacagagaagggctcgtgggacgtgccatccacatagagagtcacactcgggaattctacattgaggacgtagtggtgccattcctcatcacagacctgattcaacttccagtggaactctgcaggtctgtatttcttctcctcagaaggatcctgacggaagaggaagatcagccggcacccgtggacatagagggagtagtggtgccgattcatatctgtttccaa

SEQ ID NO: 184068 - DNA, 1339 bp, Homo Sapiens
  misc_feature (587)..(621): n is a, c, g, or t
  misc_feature (1130)..(1185): n is a, c, g, or t
gggagagggatttcaacccccctgatggcagggggtgctctggggaggagagaggagagaacaggctgttttggaaaattccagcactttgacttcgggccatgcgtctctcctggacgttctgagtacggatcgctcaggcctcctgccgtctccaaaaggagtggtcagccggtctgcaggacacctctcagtttctccttttaccagcaggaaaatgtacatttaagcataaaccacaaggctgcacacggtgagaccaggccacttgtagctaccctgatccagtctcttgagcagcacagctagaggcctgtggcccccgactcccagccatactcagacctgagcaggggctggggcggggctgggcggggtgggcctctccctctggggtctggggagggaggacccggcgggaagagcccgtgctcagagctccgaacttcactttacattccagtcccgggttacactagcacaaaggacacaaggaatccgatttatttacaaaatattaaaaagtcagttaatcatctacacagtaccccccatcgtgccattatttatacatgcactagtttggnnnnnnnnnnnnnnnnnnnnnnnnnnnnnnnnnnntgattaccgggtgggagtgagcatgttttaccctttgtcaacgagcccagctggcatggcttttctggagtgcgaggggccagtgtcctctccccggggggagactccagacacaaacgcggggcctgaggcgctgggaggcccctgtgcgagccggatggcggccagagaggacgtgtcagctcctcgtgggactgaagagcgcgaccaggcagagggtgggcggggagcctagggtcctacacaccaagcacagcgacgatcgtggcggggaggggtctgcacacctactggccgaaatgactttgtacatcgtggacccttgggactgggagaacggatggcagcagagtcttcgaaagcagaaaccgaggtggccgggggcacgggtcagtagctgagggtggagtcatcccactccagctgctgctgccgggttgcgttctgggggtcgccctgctccccctcctcctcctcgctgctctccgactcggcgctggtgatgtcannnnnnnnnnnnnnnnnnnnnnnnnnnnnnnnnnnnnnnnnnnnnnnnnnnnnnnnactgctgtgctggtcctcataggtctccatggggttgacggtgatggtcagggcagagtcgtcccagtccatctcgttctccttcccggtgtcctgatcccgcatggtccgccgatgtgcggcccggatccgaaatacccccaggataatccaa

SEQ ID NO: 184069 - DNA, 1687 bp, Homo Sapiens
  misc_feature (132)..(142): n is a, c, g, or t
aatttaagctgcttttactcaatcacaaaagaatttgcatatgtatttcttaattactgagaagactttatataattttgattgattactagtcaaaactctacaaaacatttaggtaattctgagaaagtnnnnnnnnnnntttagttgaaaacattatgaattcacaagcagaaacagaaaggtgccaaagagctggtgatactgacttttgctaataaacactaccaggacagatcagtcggaaaaggtgtggcagcagcaagtaaacaggaatccccaaatgcccctacctcttctccattccagattacaaagcacctgctataatgtactagagtttagtgatttcatattagaaacattataaatacgtcttaaagagtctataggaaatatacatataaaatcatagtatattttaaaatagtttaaaaactaaaaattaggtataagcatatctatcaacatcaaacatcaatttttctccacatcagttgggttttgtacccacctaatgacatagtcaaagcccaccataaacccaacttacttatacactgacgttagagatacacacacacagatatatatatacactcatacaaacatatgtaactgttaacaaacatacaaacacacacatccgttgagtcttcacagaaaaaaaggcacagtggctgacaaagcatcttttcatagatatttgtgtctgcaaagtgtttcaatgtggaaaaataatttttcactgaattctgcttcaaattgagcacagtgggcataacagttttagctgcctatcacattctaaacaagtttcttggtttcgttacagtaaaagatttgagtgttcatatataacaattgttcacatttcctgtgtgaagggtctattcttgattgggtatagaatcaaacgggttttcagcgtactgtgacaacagcaaggatttatgagcatgctacagtccctaccaaaatacccgagcctgtgcttatccaactccttctctccagtaaaccacgcagcttgagagaaaattctgggcttcagattttaccatgtgcaccctggaagttgtggaatgtccgtaatgagttctgtgtcatggatgctataacgctagcagccagaaacccaggctttctacctgtttctttgatgtttaatcacaataaactcctggctatacaaaaccatcgcaacttgctttttaatggcatcaataaaatagctcatttcttggaagacccatgaggaaaacgaatgttttccttgtcttgggattacacgggccagctagcatgcctggtaatgttcaccatgctgtcctgggaaatgtcacccagcctcatccaatgaactatttaatgatttgtacgagaaatagttcatgagaagcaaatacactgcaaataaacagtccactattagggaatcctaaaaagtaaaatatgacaattagagaatcttacatgtaaaaatttgtttactcatttacaagggttaactgtgtttatatagctttaattcaatttgattctttttagtttccagttttaaataatcatgttttttaaaccaaaatgtttgattccccaatcactgatgggttattgtataacactggagcttgtattattaggcttagtgtagtcatttgaaagcaaatggaataaaaaccaa

SEQ ID NO: 184070 - DNA, 1818 bp, Homo Sapiens
  misc_feature (102)..(111): n is a, c, g, or t
  misc_feature (328)..(336): n is a, c, g, or t
  misc_feature (760)..(1068): n is a, c, g, or t
ttggatctgtcctggtaggtgtttattagcaaaagtcagtatcaccagctctttggcacctttctgtttctgcttgtgaattcataatgttttcaactaaannnnnnnnnnactttctcagaattacctaaatgttttgtagagttttgactagtaatcaatcaaaattatataaagtcttctccagtaattaagaaatacatatgcaaattcttttgtgattgagtaaaagcagcttaaattacttttcttttctacattaagaaatatattctcaacattttcagtgagaatttcttgtaatggcacctcaaattttatactcttnnnnnnnnncaataatttgtgaattaccaccaaaaggcaatggcagtcctacatttaagaatagagctatgcaaactctgttaaaaactatgaggaaaacttatattagaacttttgatatatactaaaatactgattatcttaatcacattttccccagagataaacattgagagaacgaaagccaaagtgtcatttaagagagatatatatgaaaaagtaacattaatatatagaactttaccatcaccagccgtagttgatagaaaatattagtttcagaattaccctcctttaaaaaataagagactgtttgttttcttttaatttctatgaataaaagaaatttttaaaaactttaaaattttaaatattagtcaaaatactttttaagtcctgagtgcttacaggtagttgttaaaaaaattttaannnnnnnnnnnnnnnnnnnnnnnnnnnnnnnnnnnnnnnnnnnnnnnnnnnnnnnnnnnnnnnnnnnnnnnnnnnnnnnnnnnnnnnnnnnnnnnnnnnnnnnnnnnnnnnnnnnnnnnnnnnnnnnnnnnnnnnnnnnnnnnnnnnnnnnnnnnnnnnnnnnnnnnnnnnnnnnnnnnnnnnnnnnnnnnnnnnnnnnnnnnnnnnnnnnnnnnnnnnnnnnnnnnnnnnnnnnnnnnnnnnnnnnnnnnnnnnnnnnnnnnnnnnnnnnnnnnnnnnnnnnnnnnnnnnnnnnnnnnnnnnnnnnnncaccttaattagaatctatttttacctattttctaaatttatttaaatgcttagcaggaagcataaggaaaagccatcggcctccaatacccatgatgacagagggagcacttgagccttgccttccctcctcttaaatcagggtgtgttccgagattacagaacatcacaccttggcgtgatgaaatcatgccaagattctgactctccctttccggtgatactgctcatgatttctcctaatacgcttcaagcaactgttaccacaaaaaatacagtttccgcagggctttaaaggattgagtttagcatgtatatcatgcgttattaaagttcacgtgattcatgtgaaattaactgtcctttttgctagtgccaaaacagtgccttctctgcacactttacttgtttataaagttctcccacatgtccttaaatatcaagggggaaagtatggatattcgcgtagcaataatgccagcaaaggtcattttcattttttagtcatatagatatgaaaataagttcatatagatatgaaattgcttgactttattgttttggggagattttttttccttacatgattatattaaacactttaaaatagccttccggtttctggattttgagaagcctgatctgttattgttgtggttgttggtgtttgtaatattcattattgtttgtatatacacggtttagtcttactgatttcaaatgcattttgttattgctcaacccaactgg

SEQ ID NO: 184071 - DNA, 830 bp, Homo Sapiens
ctttgtacaaaaaagttggatttcaaatgcattttgttattgctcaacccaactggtaacactgtttgctgggagcattatacttaactttgattcaccatggttgatgccactgccatgatcgctgggtcttaaagagctttccctagccactgacagccccgtggagatcataatcagggccccaggctggttccaggatcaggcagcctatagagtgtgagcatctatgtgtagctacccttgttgggtgggctcttagactgatggggtaggatatgaagtgaaagacttcaaatgcaagtaaggtagtttgggctccttaattccaaacatcccatgagtatatcaagatgaataaggaccacgggacctctgtgactcatagaagggctggctgaatcctgaagtagcatagtgggacctggtctacaatttatgcacatgcactgacagccttgctgtgccacgtgtctcaccaagacccagttgggaaagagcgtcatattgcctacaggttgggtttctctggcctacacctgattaatgggccctttatctttggtgtcccctatgagtgtccagttgttttattgctgtattttgttattgcagtacttaataaaaattgttgatagggcccaaaaccctacagaaattctatgtctgtaaaaacccacaaaggcattggacttgtgtgaatgtacagggtttttttagtagtaactttaaatttaaatgttttaagtgatcatcagtgttcctttttacttataaagttggattcttttttaagaatttgtaataaataaaaactgctgctttaccac

SEQ ID NO: 184072 - DNA, 1778 bp, Homo Sapiens
  misc_feature (175)..(183): n is a, c, g, or t
  misc_feature (508)..(567): n is a, c, g, or t
  misc_feature (607)..(915): n is a, c, g, or t
  misc_feature (1485)..(1493): n is a, c, g, or t
tttgtacaaaaaagttggataaagtcttccccagtaattaagaaatacatatgcaaattcttttgtgattgagtaaaagcagcttaaattacttttcttttctacattaagaaatatattctcaacattttcagtgagaatttcttgtaatggcacctcaaattttatactcttnnnnnnnnncaataatttgtgaattaccaccaaaaggcaatggcagtcctacatttaagaatagagctatgcaaactctgttaaaaactatgaggaaaacttatattagaacttttgatatatactaaaatactgattatcttaatcacattttccccagagataaacattgagagaacgaaagccaaagtgtcatttaagagagatatatatgaaaaagtaacattaatatatagaactttaccatcaccagccgtagttgatagaaaatattagtttcagaattaccctcctttaaaaaataagagactatttgttttcttttaatttctannnnnnnnnnnnnnnnnnnnnnnnnnnnnnnnnnnnnnnnnnnnnnnnnnnnnnnnnnnngtcctgagtgcttacaggtagttgttaaaaaaattttaannnnnnnnnnnnnnnnnnnnnnnnnnnnnnnnnnnnnnnnnnnnnnnnnnnnnnnnnnnnnnnnnnnnnnnnnnnnnnnnnnnnnnnnnnnnnnnnnnnnnnnnnnnnnnnnnnnnnnnnnnnnnnnnnnnnnnnnnnnnnnnnnnnnnnnnnnnnnnnnnnnnnnnnnnnnnnnnnnnnnnnnnnnnnnnnnnnnnnnnnnnnnnnnnnnnnnnnnnnnnnnnnnnnnnnnnnnnnnnnnnnnnnnnnnnnnnnnnnnnnnnnnnnnnnnnnnnnnnnnnnnnnnnnnnnnnnnnnnnnnnnnnnnnncactttaattagaatctatttttacctattttctaaatttatttaaatgcttagcaggaagcataaggaaaagccatcggcctccaatacccatgatgacagagggagcacttgagccttgccttccctcctcttaaatcagggtgtgttccgagattacagaacatcacaccttggcgtgatgaaatcatgccaagattctgactctccctttccggtgatactgctcatgatttctcctaatacgcttcaagcaactgttaccacaaaaaatacagtttccgcagggctttaaaggattgagtttagcatgtatatcatgcgttattaaagttcacgtgattcatgtgaaattaactgtcctttttgctagtgccaaaacagtgccttctctgcacactttacttgtttataaagttctcccacatgtccttaaatatcaagggggaaagtatggatattcgcgtagcaataatgccagcaaaggtcattttcattttttagtcatatagatatgaaaataagttcatatagatatgaaattgcttgactttattgttttggggagannnnnnnnnccttacatgattatattaaacactttaaaatagccttccggtttctggattttgagaagcctgatctgttattgttgtggttgttggtgtttgtaatattcattattgtttgtatatacacggtttagtcttactgatttcaaatgcattttgttattgctcaacccaactggtaacactgtttgctgggagcattatacttaactttgattcaccatggttgatgccactgccatgatcgctgggtcttaaagagctttccctagccactgacagccccgtgga

SEQ ID NO: 184073 - DNA, 905 bp, Homo Sapiens
ctttgtacaaaaaagttgggttccgagattaccgaacatcacaccttggcgtgatgaaatcatgccaagattctgactctccctttccggtgatactgctcatgatttctcctaatacgcttcaagcaactgttaccacaaaaaatacagtttccgcagggctttaaaggattgagtttagcatgtatatcatgcgttattaaagttcacgtgattcatgtgaaattaactgtcctttttgctagtgccaaaacagtgccttctctgcacactttacttgtttataaagttctcccacatgtccttaaatatcaagggggaaagtatggatattcgcgtagcaataatgccagcaaaggtcattttcattttttagtcatatagatatgaaaataagttcatatagatatgaaattgcttgactttattgttttggggagattttttttccttacatgattatattaaacactttaaaatagccttccggtttctggattttgagaagcctgatctgttattgttgtggttgttggtgtttgtaatattcattattgtttgtatatacacggtttagtcttactgatttcaaatgcattttgttattgctcaacccaactggtaacactgtttgctgggagcattatacttaactttgattcaccatggttgatgccactgccatgatcgctgggtcttaaagagctttccctagccactgacagccccgtggagatcataatcaggggccccaggctggttccaggatcaggcagcctatagagtgtgagcatctatgtgtagctacccttgttgggtgggctcttagactgatggggtaggatatgaagtgaaagacttcaaatgcagtaaggtagtttgggctccttaattccaaacatccc

SEQ ID NO: 184074 - DNA, 2985 bp, Homo Sapiens
ttggatttttttcggtagctgactggaaataccggcatgcaggattgatggccttatctgccattggtgaagggtgccaccagcaaatggaaggaattctaaatgagatcgtaaattttgttttactttttctccaggatcctcatccaagagtaaggtatgcagcctgtaatgccgtgggacagatggctacagattttgcacctggtttccaaaagaaatttcatgagaaggtgattgcagctctgctgcagaccatggaagaccaaggcaatcaacgtgtgcaggcccatgcagctgctgccctcattaactttactgaagactgtcccaagtcactacttattccatacttggataatttggtgaaacatctgcattccattatggtactgaagcttcaagagctgattcagaaaggcaccaagttagttttggaacaagttgtgacatccattgcatcagttgccgatactgcagaagaaaaatttgtcccctactatgatttatttatgccatcactgaagcacatcgttgagaatgcggttcaaaaagaactgagacttctgagaggaaaaactattgaatgcattagcctcattggtctggctgttgggaaggaaaaattcatgcaggatgcatcagatgtgatgcagcttttgttaaagacccagacagacttcaatgatatggaagatgatgatcctcagatctcttacatgatctcagcatgggccagaatgtgcaaaatccttggaaaagaatttcagcaataccttccagtggttatggggcctttaatgaagacggcttcaattaagcccgaagtagcccttttagatacccaagacatggagaatatgagtgatgatgatggttgggaatttgtgaaccttggagatcagcaaagctttggtattaaaactgcaggactagaagaaaaatcaactgcttgccagatgttggtttgctatgctaaggagttaaaggaaggctttgtggagtacaccgaacaggttgtcaaactgatggtccctttactgaaattttatttccacgatggtgttcgagtggcagcagcggaatccatgcctcttctcctggagtgtgcaagagtccgtggtcctgagtatctcacacagatgtggcattttatgtgtgatgctctaattaaggccattggtacagaaccagattcagacgtcctctcagaaataatgcattcttttgcaaagtgcattgaagtaatgggagatggatgccttaataatgaacactttgaagaactgggaggtatattgaaagcaaagcttgaagaacattttaaaaatcaagaattacgacaagttaaaagacaagatgaagactatgatgaacaggtcgaagagtcactacaagatgaggatgataatgatgtttatattctgaccaaagtgtcagatattttacactcaatattcagtagctacaaagaaaaggtgttaccatggtttgaacagctgcttccattaattgtcaacctcatttgtccacatagaccatggccagacagacaatggggattatgcatctttgatgatgtcatagaacactgtagtccagcctcatttaaatacgcagaatatttcttaagaccaatgctccaatatgtatgtgacaacagcccagaagtcaggcaagcagctgcatatggcctgggagtcatggcacagtacggtggagataattatcgccctttttgtacagaagcacttcccctgctggtaagagttattcagtctgcggattctaagaccaaagaaaatgtcaatgctacagagaactgcatctcagcagtagggaaaatcatgaagttcaagcctgactgtgtaaacgttgaagaggtccttccacactggttgtcttggcttccactacatgaagataaagaagaagctgttcagactttcaattatctgtgtgacctgattgaaagtaatcatccaattgttcttggcccaaacaataccaatctgcccaaaatatttagtataattgcggaaggagaaatgcacgaggcaattaaacatgaagatccttgtgccaaacgtctggccaatgtcgttcgccaagtacagacttctggaggactgtggactgagtgcatagcacagctcagtcctgagcagcaggccgccattcaggagctcctgaactctgcgtgaagggccttaatgtcacccaccagaaaactaactccaaataaacgcttaccctttcctttaggtttctttgttttgtttttgagcaaaagagatcggtagtgttgtgtgtaggccattcttctggagagccacaagcaggaagagcagcgctgtgttgcagaatggagtttccatggatttctaccagaccactgaaggagttcctggaagccctgcggtagctagcactgaagactatttttctattggtataacccgcccacctgaaggggaaagggaaatcaaattaatttttctcgttagacataaggaaatttaaggaaaaacagctttaagaacagttactcagcgtagatgtgtgttcacacaaattgctctgcattcagtgttcattgtgaattgggagtgtgagtctttctgtagggtagaaagaagcctcctacccagcaaaccagtagacccaaaagttgaaaaaaactgatgacagacaacaagcatgaagatggcatatttgatgtcactttggttctttttcccagaaggcttatacagtgactcagtcgggaagctttccagcttccagcccttgaatgtgaagtgtcattggcatgtctggcagtagtctctcattcactcctcaataaacaacattgaatacaaaagaggcttgtgtaaaaactcagtactgtctggcttggattcatttcatgtttttaatataagaatgatctaatatttttttaaagtatagctatcagtaatagctgagtgttttttcccc

SEQ ID NO: 184075 - DNA, 1681 bp, Homo Sapiens
cccgggtggccgctggcggcgctgggagccctccccactgcagcccaccgggcgccgccccattactactggagaatggggctttctcggtcgcttagcccttagggtgagaccgagagcgggaaaggcccgcgcagtcggcagcccctccagcggctgattctatgtcctcaacacgactgggcgcctgtggcccacacgctctcaggacctgcacagtaagagcaaggcgcgtccatcgcgtctctcgcacgtcacacgcgtggggcgcgttgcccttatagattgtgtaggaagcccaagtcctctttgaagaagctcataaaccatgcgggcaaagctgggccttccccagacgtgtgcctgttagtggtggtgttgttcaagaacatcttgtccatgcctttgagcgcctcggtgagatagttctgcagggccgtgagcgcggcgcaaatggccggggcgccgaagccgtgcgtgatgaggctgaagtgcgtgaggcagctctggatccccggctccaggatggggctgggtcggctgttccctatcggtgtccggtcctgcgccagtagatccgtaaattctttacaaagttgcttggtggccaacagcatattctttcgggagtgcaggtcactcgggtctgtgtgctgccggttcaaatactcagagacggctttggcgggaaactccgtttcgcaaatgtacccaaaatccctagctaagtgaacagcttctccttccaccagggaggtgagtaacgtgacatttgctgctttgcgcctgcccgcgggtaaattcaaaccgattttttctagcctttctcgcaaagatctccccccatttttcgatttggctcttctgaggactccgccgaggagagatgcattgaggcattcagggggcgacagccgtctctgaacttctcccacagttactttgtacttcgaagttgaactgagcagagacaaacggcctgggacggagcaaaacacctcgccggtgttgacagacatgcctcccaggaagccgtctttattcatcattagagaagtcaccgatttgggaggaactggaacttttttaatgacagactggtccaatagattcatgccgctgttattggcatcttcaactgactggacgtcttccattccgggatggccgaggccgtgcagcgagaggctgtcacccatgcccgcgtccaggccgtggtgcgccgaatgcagcagcacgtccggccggcggaccgagtggtagtccctccgggggtcaaggcccgagagctggggcaaggcggcccgaggctggggcaggagagagccggcttccgaacccacttcttgccgctgccgttgcccccagggatgttgctggggctggtgcagtgggttcagggagtaggggtcgttgacgtgggagtaggggtcctggctctggtggtaggggagcggctggtaggggggtgggaagtagggcggctggaagtccgacgacggggtgtgggacagcggcggggcgctcgagtagggtccttgggacaccgagcccagctgggagagccgcgagctgtggctcgggacaccatcgtgccggtcctcatagatatcttcgtacttgacattctccacaagcttccagagcatgatggcagcctggtctctaggaggtgagccaa

SEQ ID NO: 184076 - DNA, 2394 bp, Homo Sapiens
ttggcaaccacttaaattttaacaaaaatgatgtcatcaccgtcctggaacagcaagacatgtggtggtttggagaagttcaaggtcagaagggttggttccccaagtcttacgtgaaactcatttcagggcccataaggaagtctacaagcatggattctggttcttcagagagtcctgctagtctaaagcgagtagcctctccagcagccaagccggtcgtttcgggagaagaatttattgccatgtacacttacgagagttctgagcaaggagatttaacctttcagcaaggggatggattttggttaccaagaaagatggtgactggtggacaggaacagtgggcgacaaggccggagtcttcccttctaactatgtgaggcttaaagattcagagggctctggaactgctgggaaaacagggagtttaggaaaaaaacctgaaattgcccaggttattgcttcatacaccgccaccggccccgagcagctcactctcgcccctggtcagctgattttgatccgaaaaaagaacccaggtggatggtgggaaggagagctgcaagcacgtgggaaaaagcgccagataggctggttcccagctaattatgtaaagcttctaagccctgggacgagcaaaatcactccaacagagccacctaagtcaacagcattagcggcagtgtgccaggtgattgggatgtacgactacaccgcgcagaatgacgatgagctggccttcaacaagggccagatcatcaacgtcctcaacaaggaggaccctgactggtggaaaggagaagtcaatggacaagtggggctcttcccatccaattatgtgaagctgaccacagacatggacccaagccagcaatgaatcatatgttgtccatccccccctcaggcttgaaagtcctcaaagagacccctatcccatatcactgcccagagggatgatgggagatgcagccttgatcatgtgacttccagcatgatcacctactgccttctgagtagaagaactcactgcagagcagtttacctcattttaccttagttgcatgtgatcgcaatgttttgagttattactttgcagagataggagcaaaaattacaaaaacacacaggggtagtggggtccctttgtggctttcttagttactcaaattgactttcccccacctttgcacaggtgcttttcaataggttttaaaattatttttaaatatatattttagctttttaataaacaaaataaataaatgacttctttgctattttggttttgcaaaaagacccactatcaaggaatgctgcatgtgctattaaaaattgttccaaatgtccataaatctgagacttgatgtattttttcattttgtccagtgttaccaactaaattgtgcagtttggggcttttcccccttaccatagaagtgcagaggagttcagtatctctgttttaaagacgtatagaatgagcccaattaaagcgaaggtgtttgtgcttgtttgtgtgtatcagctgtaccttgttgagcatgtaatacatcctgtacataagaaattagttctttccatggcaaagctattaccttgtacgatgctctaatcatattgcatttaattttattttgcacagtgaccttgtagccacatgagaaagcactctgtgtttttgttcggtctcagatttatctggttgagttggtgttttgtttggggtttttaattttgcgtgtttgcatagcataaaatcagtagacaacaccactgaggtcgttacgatcaacgatatccacagtctctttttagtctctgttacatgaagttttattccagttacttttcatggaatgacctattttgaacaagtaattttcttgacaagaaagaatgtatagaagtctccctgcaattaatttccaatgtttacattttttaactagactgtggaatttctacagattaatatgaaatggagctcatggtccgtttgtgtgttagatatgctgtagctgaagccctgtttgtcttttaaacactagttggaagctctcaataaaaatgcctgctgctcacagcacagaaaatggggcagggggagcctcaagcacaatctagctgtcctcctaaagactctgtaatgctcactcccctcgcgttctcccggcgctgtcgggaggctgtgctggtggtcgtgtagaggtccttctcctttcacatggtgcacagagcgaggacctctcctcctcgttcagttgcacttcagtattttcacggatatgaatgtaaaatatataaatatataaacctgcggctttacaactgtaatacaacctttttgaattagttccgtgtatagataaataaattcttcatacaaaagtt

SEQ ID NO: 184077 - DNA, 1281 bp, Homo Sapiens
ttggctgttttctctgaaaaggaactaaaacaagcataatccagatagggcctatttccctgggtctacctaatctaaaatgccagttaatgatctcatgatagttcataaaatgtctgctccactgttaatcctccactaaaaatgccagtcaaattggaaatggggaggtgtcccgggcaacttgagagtgaaaatagaaccaaaatataaagggcacacagccagatgcaacagaataattgtgacctcctggctttttgaaatagagagttctagatggtcagacaatgactttgtgaagaggctggaaggctttggcctccacttttggaaataaacaattgttgggaaacagtgaagcatccagccctcctgctgtgctgcctcagggccctttgtggctgtgtgtgcttgtctggcctgtgcttgttggagaggtgccatgctcacgtctgccctaattgataacaaagcgcaacataacgagaggtcctttatgttattccacacaagggtgaaaaggtggaggggctacaagctcaagccctatatccttggagagccaaaaaagacaaccacttaaattttaacaaaaatgatgtcatcaccgtcctggaacagcaagacatgtggtggtttggagaagttcaaggtcagaagggttggttccccaagtcttacgtgaaactcatttcagggcccataaggaagtctacaagcatggattctggttcttcagagagtcctgctagtctaaagcgagtagcctctccagcagccaagccggtcgtttcgggagaagaatttattgccatgtacacttacgagagttctgagcaaggagatttaacctttcagcaaggggatgtgattttggttaccaagaaagatggtgactggtggacaggaacagtgggcgacaaggccggagtcttcccttctaactatgtgaggcttaaagattcagagggctctggaactgctgggaaaacagggagtttaggaaaaaaacctggtccctcctgtaacgtgaaataaaaagaaagaaatttgccctgccatgatttgcacctgatattcagggatcactctcaaaataaattgcccaggttattgcctcatacaccgccaccggccccgagcagctcactctcgcccctggtcagctgattttgatccgaaaaaaagaacccaggtggatggtgggaaaggagagctgcaagcacgtggggaaaaagcgccagatagctggttcccagctaattatgtaaagcttct

SEQ ID NO: 184078 - DNA, 1665 bp, Homo Sapiens
  misc_feature (1108)..(1168): n is a, c, g, or t
ttggctcattttcttcctttccccccacagagataagtacacacactctccttgcgtattttacttactggcataccctgggaaaacttttgttatcataaactggggcttttagtattgtacttcctgatgtttgccaatttcttttcatttttaacagtactttaattctcttacatttcaaaactagtgtcattttcatttttcttccttaaaggtgtgggaggtgctgaaccttttctggccatgaaccattataaaatcccaacatatatactgaaaatactgaaactgctttgaaaatttggaatttctgatacctccagtgggccgagagacacggtgggtaaaggatgtgggcagcagcagggaagacaacagaaacacaaggaggcggctgtggccgggctggactgtgcgggggtttgttgtgatggccactcggtgacctggcggtccctacgcaatagcagctgcctgtggggaagaggggctgcccagccagctggttctcccgggacaccagcagatccacaccctgggcacctccgtgtttggtcttttttttcccctgtgtgaaagaagaaacggcacgaccccttctcaagctggctcactcagacacattgggacaaaccctggacagccatgccagagagaggcctttgaccggccccagagctaaaagcaccagagaaaatcaaatgcttcctactcagcgtgacccaacttttctagtgtgccacggccccaccacctcctgcagtacccacaccatcaccactgctttctcttccaacagtgatctgtattcttagtttcattattttcttttgattgatatgacactatataaaattttcatttgagaatttctcaattgtatctagttaaatagcacagtttggaaacttgtctgagactgactttatcaataatctaaccgacaaagatcatatccatgtgtatgtggttagacatttttatttcattgactaacccaggacagtttcagtgatgcaaattgtgtgccctctggttcagctgaaacagtcctggactttcaaaaaccttgaataagtctcccacagttgtataaattggacannnnnnnnnnnnnnnnnnnnnnnnnnnnnnnnnnnnnnnnnnnnnnnnnnnnnnnnnnnnngttaatgcaaacaggacttaaatgaactttgatctctgttttaaagattattaaaaaacattgtgtatctatacatatggctcttgaggacttagctttcactacactacaggatatgatctccatgtagtccatataaacctgcagagtgattttccagagtgctcgatactgttaattacatctccattagggctgaaaagaatgacctacgtttctgtatacagctgtgttgcttttgatgttgtgttactgtacacagaagtgtgtgcactgaggctctgcgtgtggtccgtatggaaagcctggtagccctgcgagtaagtactgcttccattcattgtttacgctggaattttctcctcatggaatgtaagtaaaacttaagtgtttgtcatcaatcaatggtaatacctaaatttttttgttaatttattctcaatgcccttactgctatgtgggcccctcccaacctgcccatatcctttctttatttt

SEQ ID NO: 184079 - DNA, 1899 bp, Homo Sapiens
  misc_feature (125)..(183): n is a, c, g, or t
ttggggcgcctgagcggctcttcagcgtttgcgccggcggctgccgcgtctctctcggctcccgcttcctttgaccgcctccccccccggcccggcggcgcccgcctcctccacggccactccgnnnnnnnnnnnnnnnnnnnnnnnnnnnnnnnnnnnnnnnnnnnnnnnnnnnnnnnnnnncgccgccaccgcccaggaccgccggccgggggacgagctcggagcagcagccagagtttattaaccacttaacctctcagaactgaacaaagacaacattgttcctggaacgccctctttttaaaaaagaaagcataacccctactgtagaactaaatgcactgtgcatgaaacttggaaaaaaaccaatgtataagcctgttgacccttactctcggatgcagtccacctataactacaacatgagaggaggtgcttatcccccgaggtacttttacccatttccagttccacctttactttatcaagtggaactttctgtgggaggacagcaatttaatggcaaaggaaagacaagacaggctgcgaaacacgatgctgctgccaaagcgttgaggatcctgcagaatgagcccctgccagagaggctggaggtgaatggaagagaatccgaagaagaaaatctcaataaatctgaaataagtcaagtgtttgagattgcacttaaacggaacttgcctgtgaatttcgaggtggcccgggagagtggcccaccccacatgaagaactttgtgaccaaggtttcggttggggagtttgtgggggaaggtgaagggaaaagcaagaagatttcaaagaaaaatgccgccatagctgttcttgaggagctgaagaagttaccgcccctgcctgcagttgaacgagtaaagcctagaatcaaaaagaaaacaaaacccatagtcaagccacagacaagcccagaatatggccaggggatcaatccgattagccgactggcccagatccagcaggcaaaaaaggagaaggagccagagtacacgctcctcacagagcgaggcctcccgcgccgcagggagtttgtgatgcaggtgaaggttggaaaccacactgcagaaggaacgggcaccaacaagaaggtggccaagcgcaatgcagccgagaacatgctggagatccttggtttcaaagtcccgcaggcgcagcccaccaaacccgcactcaagtcagaggagaagacacccataaagaaaccaggggatggaagaaaagtaaccttttttgaacctggctctggggatgaaaatgggactagtaataaagaggatgagttcaggatgccttatctaagtcatcagcagctgcctgctggaattcttcccatggtgcccgaggtcgcccaggctgtaggagttagtcaaggacatcacaccaaagattttaccagggcagctccgaatcctgccaaggccacggtaactgccatgatagcccgagagttgttgtatgggggcacctcgcccacagccgagaccattttaaagaataacatctcttcaggccacgtaccccatggacctctcacgagaccctctgagcaactggactatctttccagagtccagggattccaggttgaatacaaagacttccccaaaaacaacaagaacgaatttgtatctcttatcaattgctcctctcagccacctctgatcagccatggtatcggcaaggatgtggagtcctgccatgatatggctgcgctgaacatcttaaagttgctgtctgagttggaccaacaaagtacagagatgccaagaacaggaaacggaccaatgtctgtgtgtgggagtgctgaaccttttctggccatgaaccattataaatcccaacatatatactgaaatactgaaactg

SEQ ID NO: 184080 - DNA, 1173 bp, Homo Sapiens
tcccattttcatccccagagccaggttcaaaaaaggttacttttcttccatcccctggtttctttatgagtgtcttctcctctgacttgagtgcgagattggtgagctgcgcctgcagagactttgaaaccaaagaatctccagcatgttctcagctgcattgcgcttggccaccttcttgttggtgcccgttccttctgcagtgtggtttccaaccttcacctgcatcacaaactccctgcggcgcgggaggcctcgctctgtgaggagcgtgtactctggctccttctccttttttgcctgctggatctgggccagtcggctaatcggattgatcccctggccatattctgggcttgtctgtggcttgactatgggttttgttttctttttgattctaggctttactcgttcaactgcaggcaggggcggtaacttcttcagctcctcaagaacagctatggcggcatttttctttgaaatcttcttgcttttcccttcaccttcccccacaaactccccaaccgaaaccttggtcacaaagttcttcatgtggggtgggccactctcccgggccacctgtttcagagggaaagactcgaaattcacaggcaagttccgtttaagtgcaatctcaaacacttgacttatttcagatttattgagattttcttcttcggattctcttccattcacctccagcctctctggcaggggctcattctgcaggatcctcaacgctttggcagcagcatcgtgtttcgcagcctgtcttgtctttcctttgccattaaattgctgtcctcccacagaaagttccacttgataaagtaaaggtggaactggaaatgggtaaaagtacctcgggggataagcacctcctctcatgttgtagttataggtggactgcatccgagagtaagggtcaacaggcttatacattggtttttttccaagtttcatgcacagtgcatttagttctacagtaggggttatgctttcttttttaaaaagagggcgttccaggaacaatgttgtctttgttcagttctgagaggttaagtggttaataaactctggctgctgctccgagctcgtcccccggccggcggtcctgggcggtggcggcgaggaggggaaggaagaaggaaaaaagggagaggaagaagccaa

SEQ ID NO: 184081 - DNA, 1902 bp, Homo Sapiens
  misc_feature (1463)..(1485): n is a, c, g, or t
aactttgtacaaaaaagttgggttcaggatgccttatctaagtcatcagcagctgcctgctggaattcttcccatggtgcccgaggtcgcccaggctgtaggagttagtcaaggacatcacaccaaagattttaccagggcagctccgaatcctgccaaggccacggtaactgccatgatagcccgagagttgttgtatgggggcacctcgcccacagccgagaccattttaaagaataacatctcttcaggccacgtaccccatggacctctcacgagaccctctgagcaactggactatctttccagagtccagggattccaggttgaatacaaagacttccccaaaaacaacaagaacgaatttgtatctcttatcaattgctcctctcagccacctctgatcagccatggtatcggcaaggatgtggagtcctgccatgatatggctgcgctgaacatcttaaagttgctgtctgagttggaccaacaaagtacagagatgccaagaacaggaaacggaccaatgtctgtgtgtgggaggtgctgaaccttttctggccatgaaccattataaaatcccaacatatatactgaaaatactgaaactgctttgaaaatttggaatttctgatacctccagtgggccgagagacacggtgggtaaaggatgtgggcagcagcagggaagacaacagaaacacaaggaggcggctgtggccgggctggactgtgctggggtttgttgtgatggccactcggtgacctggcggtccctacgcaatagcagctgcctgtggggaagaagggctgcccagccagctggttctcccgggacaccagcagatccacaccctgggcacctccgtgtttggtcttttttttcccctgtgtgaaagaagaaacggcacgaccccttctcaagctggctcactcagacacattgggacaaaccctggacagccatgccagagagaggcctttgaccggccccagagctaaaagcaccagagaaaatcaaatgcttcctactcagcgtgacccaacttttctagtgtgccacggccccaccacctcctgcagtacccacaccatcaccactgctttctcttccaacagtgatctgtattcttagtttcattattttcttttgattgatatgacactatataaaattttcatttgagaatttctcaattgtatctagttaaatagcacagtttggaaacttgtctgagactgactttatcaataatctaaccgacaaagatcatatccatgtgtatgtggttagacatttttatttcattgactaacccaggacagtttcagtgatgcaaattgtgtgccctctggttcagctgaaacagtcctggactttcaaaaaccttgaataagtctcccacagttgtataaattggacaatttaggaattttaaactttagatgatcatttggttccnnnnnnnnnnnnnnnnnnnnnnngttaatgcaaacaggacttaaatgaactttgatttttgttttaaagattattaaaaaacattgtgtatttatacatatggcttttgaggacttagctttcactacactacaggatatgatttccatgtagtccatataaacctgcagagtgattttccagagtgctcgatactgttaattacatttccattagggctgaaaagaatgacctacgtttttgtatacagctgtgttgcttttgatgttgtgttactgtacacagaagtgtgtgcactgaggctttgcgtgtggtccgtatggaaagcctggtagccctgcgagttaagtactgcttccattcattgtttacgctggaatttttttccccatggaatgtaagtaaaacttaagtgtttgtcatcaataaatggtaatact

SEQ ID NO: 184082 - DNA, 1419 bp, Homo Sapiens
ttggcgctcgctgaggcaaaaggaggcgctcggcccgcggcctgacagggacttagcccgcagagatcgaccccgcgcgcgtgaccccacacccacccactcatccatctatccactccctgcgccgcctcctcccaccctgagcagagccgccgaggatgataaacacccaggacagtagtattttgcctttgagtaactgtccccagctccagtgctgcaggcacattgttccagggcctctgtggtgctcctgatgcccctcacccactgtcgaagatccccggtgggcgagggggcggcagggatccttctctctcagctctaatatataaggacgagaagctcactgtgacccaggacctccctgtgaatgatggaaaacctcacatcgtccacttccagtatgaggtcaccgaggtgaaggtctcttcttgggatgcagtcctgtccagccagagcctgtttgtagaaatcccagatggattattagctgatgggagcaaagaaggattgttagcactgctagagtttgctgaagagaagatgaaagtgaactatgtcttcatctgcttcaggaagggccgagaagacagagctccactcctgaagaccttcagcttcttgggctttgagattgtacgtccaggccatccctgtgtcccctctcggccagatgtgatgttcatggtttatcccctggaccagaacttgtccgatgaggactaatagtcatagaggatgctttacccaagagccacagtgggggaagaggggaagttaggcagccctgggacagacgagagggctcctcgctgtctagggaaggacactgaggggctcagggtgagggttgcctattgtgttctcggagttgactcgttgaaattgttttccataaagaacagtataaacatattattcacatgtaatcaccaatagtaaatgaagatgtttatgaactggcattagaagctttctaaactgcgctgtgtgatgtgttctatctagcctaggggaggacattgcctagagggggagggactgtctgggttcaggggcatggcctggagggctggtgggcagcactgtcaggctcaggtttccctgctgttggctttctgttttggttattaagacttgtgtattttctttctttgcttcctgtcaccccaggggctcctgagtataggcttttcagtccctgggcagtgtccttgagttgttttttgacactcttacctgggcttctctgtgtgcatttgcgtctggcctgagtaagcaggtccgacccctccttctttacagcttatgttattctggcatttggttaagctggcttaatctgtttaatgttatcagtacattttaaataggggcattgaaatttactcccaccaccagggcttttttggggga

SEQ ID NO: 184083 - DNA, 1079 bp, Homo Sapiens
ttggctggtattaaccacgacgatttaattaacagtcagggccgatccttgcctggaactcccgatcactggacgctggcttccactgtgtaaccctcgttcacttgttgagcgtaaggatgactgaatttctgtccacttcgcatgctatgttgggacaataaggacttcatgatttgctccataccaatggctagatgtactattatcgaggagcacaaaagagtgtttaacatcttgattcccctttcttttactggatggtgttaatgaatatgcctatttttcccataaatacttttgaaccctgcctacttttcttttaaggaatctttttgcgttgcgaccgtcctccctattttcttcccaatttcgttttcttttcctgggaaaattttggaatgggggactcaggaggacctgtgaagcatgtagttatctacatctgggtaatttcatgtttattaaactcgaagtttggctagttaaactcatattgaaacttcgtctagtctcttaattttttaacactaaattcaagtcatttgtttaaagtctctaaaaaagaagattgcagtcatccattcatatgcatggtgtctgatcgcaaatacactaaatgtggagtgtaggaaccaaaatgaaacctgctgtatggaaactactttcacttatggttcattggtttttgtaccaatattttttatgcacttcagtgcaagtcttgtcagttaaccttactttatgagtaagctaaataacccaaattacatttctttaaacctgttttactactatggcactttgataaaatggtcaggaactcttttttactggcaaaagggtccatgtaccaccttgtgctggaccatctgttctacatgtggatatctatgaatggtcatgttttccttcatgtaagtgcctattcagagtttcaaaattttaaaatgccaaatattttcatggtcatttgcatgtagtaagccagaaaatattcaaagagattttgaaaaccaattgtatttaaccagcctcaaattgtgcaaccatgatgtataataaagaatttgaaacag

SEQ ID NO: 184084 - DNA, 1748 bp, Homo Sapiens
ccagacattttcttgaactgtggataattctcaacaaacgccttcatgtctgctatgattctagtttttgctgttcttttggtttcttcttctgaaaatcttccatgagattctttatattgctaccaatctcagcaaagttcaggtacatattattagcatagaattcatcattttcagcagataggaccacttctcttaagtctttactgattcccggcactctggaaagatcaatccgattgttgtttatgcctagtagttcgtggaccatggcctgatatgtccactggtttagcaatggggtgatggcatcatcacagcgatctaaaataaggagcaatggaggaacctctgtccgacggaattcaaacagttcatattctttagttatcacttgcttaacgcactctgcaagtctctttgctgcctctgatgagagctgataacgaatcatgggacacttcttcagagataaaaggagagctgtaagcccttgagttgttctagatagctgggctggatcccaatttcgaccctttttgttaaaaacatatattcagagaaaatatttgaattttctcttacaagtctaattatttgctgaattaactctcgactgataaattaaacctttccttccatacctggcagcaacccaaaatattgagggaaaacaaatgtgggttcacagcaatgtaatcaccataaaattcctgcaaataaagcaccaagaatagtcattccataaacttcaattgtatcaagcagtaatattttcataagtgatataatatgatatagccaaactttgtgaaatacaggtgtaaagagatacaaaattgttcaattaataattgggtaacaacagtcaacgtgggagaattaaaataattacaaaacagtagcaataataataaatctaacaaataaaggttgtaaggttatacacattatatttctggagacctctatgcatacttatcaattagtaaaaataaaatactgctaataggagatacaatgttctactcagataaaaaagaactttgctgtccaatgtgttgtcatgagagagaatataatttaaaacaggtattctttttattcatttatcacctatcacatccttctgaaaaattcaaaactagtttatttgctgcctctgaaaacaatattcctcatttatgtgataaacatattcaagtattcataataaaacttcttttgagacagacctttccttattttttatttttagactcaaatatttaaaaagggccaacatacgagatgtgttacaggaccaatatgtttacctgaacctcagccacaacttcctgttcatcagcttcagccaatgacttcacgtcactcttgctgatcacattactgaaataaatgaaatatatagtgtatttgggtcttcggagctcctgaataatataatccacattctcctttgtaggtcgaagaaaacaaattgccttcaggtgtttcatgatctctcgattttgagaatcaatgcgttcaaagaggtacacttccttctgtagaatctccgattgtgtgtataccatactcactatgccagtcgtctctttatccatgagaagtactttcataccaggcccgctgtcctctatcattttggaaatgtactgcttcacagcaaaaaccacgttcatggcggcgaattgacaagtaccctacagcccttcccgcccccttttctggctaaattccaa

SEQ ID NO: 184085 - DNA, 1392 bp, Homo Sapiens
ttggcatatcctaacctcttaaatagtatgctactaaactttgtgagacttttgaatccttcatatggaagatctatgtgggtgcaaagaactattgttaaatgtagtgtttattaatttcctatttatatcatttctatatgtaactagatggttgcacaaaccatctttctctctcacccacagcaagtgataactaaagaatatgaactgtttgaattccgtcggacagaggttcctccattgctccttattttagatcgctgtgatgatgccatcaccccattgctaaaccagtggacatatcaggccatggtccacgaactactaggcataaacaacaatcggattgatctttccagagtgccgggaatcagtaaagacttaagagaagtggtcctatctgctgaaaatgatgaattctatgctaataatatgtacctgaactttgctgagattggtagcaatataaagaatctcatggaagattttcagaagaagaaaccaaaagaacagcaaaaactagaatcaatagcagacatgaaggcgtttgttgagaattatccacagttcaagaaaatgtctgggactgtttcaaagcatgtgacagtggttggagaactgtctcgattggtcagtgaacggaatctgctggaggtttcagaggttgagcaagaactggcctgtcaaaatgaccattctagtgctctccagaatataaaaaggcttctgcagaaccccaaagtgacagagtttgatgctgcccgcctggtgatgctttatgctttacattatgagcgacacagcagcaatagcctgccaggactaatgatggacctcaggaataaaggtgtttctgagaagtatcgaaagctcgtgtctgcagttgttgaatatggtggtaaacgagtcagaggaagtgacctcttcagccccaaagatgctgtggctatcaccaaacaattcctcaaaggactgaagggagtagaaaatgtatatacacagcatcaacctttcctacatgaaaccctggatcatctcatcaaaggaaggcttaaggaaaacctatatccttatttaggccccagcacactcagagacagacctcaggatatcattgtgtttgtaattggaggagccacctatgaagaggctctaacagtttataacctgaaccgcaccactcctggagtgaggattgtcctgggaggcaccacagtgcacaacacgaaaagtttcctagaggaagttctggcttctggactgcacagccgaagcaaggagagctctccagtcacatcaaggtcagcgagcagaagatgaaacggtggttgggggaaggcacagcttctctcttgtccccactacaggttttcccctactaaacaaagt

SEQ ID NO: 184086 - DNA, 1200 bp, Homo Sapiens
acaaaaaatttggcactgagctctgccgcctggctctagccgcctgcctggcccccgccgggactcttgcccaccctcagccatggctccgatatctctgtcgtggctgctccgcttggccaccttctgccatctgactgtcctgctggctggacagcaccacggtgtgacgaaatgcaacatcacgtgcagcaagatgacatcaaagatacctgtagctttgctcatccactatcaacagaaccaggcatcatgcggcaaacgcgcaatcatcttggagacgagacagcacaggctgttctgtgccgacccgaaggagcaatgggtcaaggacgcgatgcagcatctggaccgccaggctgctgccctaactcgaaatggcggcaccttcgagaagcagatcggcgaggtgaagcccaggaccacccctgccgccgggggaatggacgagtctgtggtcctggagcccgaagccacaggcgaaagcagtagcctggagccgactccttcttcccaggaagcacagagggccctggggacctccccagagctgccgacgggcgtgactggttcctcagggaccaggctccccccgacgccaaaggctcaggatggagggcctgtgggcacggagcttttccgagtgcctcccgtctccactgccgccacgtggcagagttctgctccccaccaacctgggcccagcctctgggctgaggcaaagacctctgaggccccgtccacccaggacccctccacccaggcctccactgcgtcctccccagccccagaggagaatgctccgtctgaaggccagcgtgtgtggggtcagggacagagccccaggccagagaactctctggagcgggaggagatgggtcccgtgccagcgcacacggatgccttccaggactgggggcctggcagcatggcccacgtctctgtggtccctgtctcctcagaagggacccccagcagggagccagtggcttcaggcagctggacccctaaggctgaggaacccatccatgccaccatggacccccagaggctgggcgtccttatcactcctgtccctgacgctccaggctgccactcggaggcaggcggtggggctgctggccttccttggcctcctcttctgcctgggggtggccatgttcacctaccagagcctccaggctgctcctcgaaagatgg

SEQ ID NO: 184087 - DNA, 1403 bp, Homo Sapiens
  misc_feature (1092)..(1135): n is a, c, g, or t
ttggcaagggcggcggggagcacacggagcactgcaggcgccgggttgggacagcgtcttcgctgctgctggatagtcgtgttttcggggatcgaggatactcaccagaaaccgaaaatgccgaaaccaatcaatgtccgagttaccaccatggatgcagagctggagtttgcaatccagccaaatacaactggaaaacagctttttgatcaggtggtaaagactatcggcctccgggaagtgtggtactttggcctccactatgtggataataaaggatttcctacctggctgaagctggataagaaggtgtctgcccaggaggtcaggaaggagaatcccctccagttcaagttccgggccaagttctaccctgaagatgtggctgaggagctcatccaggacatcacccagaaacttttcttcctccaagtgaaggaaggaatccttagcgatgagatctactgcccccctgagactgccgtgctcttggggtcctacgctgtgcaggccaagtttggggactacaacaaagaagtgcacaagtctgggtacctcagctctgagcggctgatccctcaaagagtgatggaccagcacaaacttaccagggaccagtgggaggaccggatccaggtgtggcatgcggaacaccgtgggatgctcaaagataatgctatgttggaatacctgaagattgctcaggacctggaaatgtatggaatcaactatttcgagataaaaaacaagaaaggaacagacctttggcttggagttgatgcccttggactgaatatttatgagaaagatgataagttaaccccaaagattggctttccttggagtgaaatcaggaacatctctttcaatgacaaaaagtttgtcattaaacccatcgacaagaaggcacctgactttgtgttttatgccccacgtctgagaatcaacaagcggatcctgcagctctgcatgggcaaccatgagttgtatatgcgccgcaggaagcctgacaccatcgaggtgcagcagatgaaggcccaggcccgggaggagaagcatcagaagcagctggagcggcaacagctggaaacnnnnnnnnnnnnnnnnnnnnnnnnnnnnnnnnnnnnnnnnnnnntgatgcgcgagaaggaggagttgatgctgcggctgcaggactatgaggagaagacaaagaaggcagagagagagctctcggagcagattcagagggccctgcagctggaggaggagaggaagcgggcacaggaggaggccgagcgcctagaggctgaccgtatggctgcactgcgggctaagaggagctggagagacaggcggtggatcagataaagagccaggagcagctggctgcggagcttgcagaatacactgccaagattgcc

SEQ ID NO: 184088 - DNA, 1974 bp, Homo Sapiens
  misc_feature (373)..(436): n is a, c, g, or t
  misc_feature (806)..(826): n is a, c, g, or t
  misc_feature (1747)..(1772): n is a, c, g, or t
ttggatcaactatttcgagataaaaaacaagaaaggaacagacctttggcttggagttgatgcccttggactgaatatttatgagaaagatgataagttaaccccaaagattggctttccttggagtgaaatcaggaacatctctttcaatgacaaaaagtttgtcattaaacccatcgacaagaaggcacctgactttgtgttttatgccccacgtctgagaatcaacaagcggatcctgcagctctgcatgggcaaccatgagttgtatatgcgccgcaggaagcctgacaccatcgaggtgcagcagatgaaggcccaggcccgggaggagaagcatcagaagcagctggagcggcaacagctggaaacnnnnnnnnnnnnnnnnnnnnnnnnnnnnnnnnnnnnnnnnnnnnnnnnnnnnnnnnnnnnnnnnttgatgctgcggctgcaggactatgaggagaagacaaagaaggcagagagagagctctcggagcagattcagagggccctgcagctggaggaggagaggaagcgggcacaggaggaggccgagcgcctagaggctgaccgtatggctgcactgcgggctaaggaggagctggagagacaggcggtggatcagataaagagccaggagcagctggctgcggagcttgcagaatacactgccaagattgccctcctggaagaggcgcggaggcgcaaggaggatgaagttgaagagtggcagcacagggccaaagaagcccaggatgacctggtgaagaccaaggaggagctgcacctggtgatgacagcannnnnnnnnnnnnnnnnnnnngtgtacgagccggtgagctaccatgtccaggagagcttgcaggatgagggcgcagagcccacgggctacagcgcggagctgtctagtgagggcatccgggatgaccgcaatgaggagaagcgcatcactgaggcagagaagaacgagcgtgtgcagcggcagctgctgacgctgagcagcgagctgtcccaggcccgagatgagaataagaggacccacaatgacatcatccacaacgagaacatgaggcaaggccgggacaagtacaagacgctgcggcagatccggcagggcaacaccaagcagcgcatcgacgagttcgaggccctgtaacagccaggccaggaccaagggcagaggggtgctcatagcgggcgctgccagccccgccacgcttgtctttagtgctccaagtctaggaactccctcagatcccagttcctttagaaagcagttacccaacagaaacattctgggctgggaaccagggaggcgccctggtttgttttccccagttgtaatagtgccaagcaggcctgattctcgcgattattctcgaatcacctcctgtgttgtgctgggagcaggactgattgaattacggaaaatgcctgtaaagtctgagtaagaaacttcatgctggcctgtgtgatacaagagtcagcatcattaaaggaaacgtggcaggacttccatctgtgccatacttgttctgtattcgaaatgagctcaaattgattttttaatttctatgaaggatccatctttgtatatttacatgcttagaggggtgaaaattattttggaaattgagtctgaagcactctcgcacacacagtgattccctcctcccgtcactccacgcagctggcagagagcacagtgatcaccagcgtgagtggtggaggaggacacttggannnnnnnnnnnnnnnnnnnnnnnnnngcttaacagttttaaaatacattgtacttatacaccttattaatgatcagctatatactatttatatacaagtgataatacagatttgtaacattagttttaaaaagggaaagttttgttctgtatattttgttaccttttacagaataaaaaaattacatatgaaaaaccctctaaaccccggcacttgatgtgatgtggc

SEQ ID NO: 184089 - DNA, 1540 bp, Homo Sapiens
  misc_feature (1108)..(1169): n is a, c, g, or t
ttggcggcaggaggacgaggcagggcgggcgggcgctctaagggttctgctctgactccaggttgggacagcgtcttcgctgctgctggatagtcgtgttttcggggatcgaggatactcaccagaaaccgaaaatgccgaaaccaatcaatgtccgagttaccaccatggatgcagagctggagtttgcaatccagccaaatacaactggaaaacagctttttgatcaggtggtaaagactatcggcctccgggaagtgtggtactttggcctccactatgtggataataaaggatttcctacctggctgaagctggataagaaggtgtctgcccaggaggtcaggaaggagaatcccctccagttcaagttccgggccaagttctaccctgaagatgtggctgaggagctcatccaggacatcacccagaaacttttcttcctccaagtgaaggaaggaatccttagcgatgagatctactgcccccctgagactgccgtgctcttggggtcctacgctgtgcaggccaagtttggggactacaacaaagaagtgcacaagtctgggtacctcagctctgagcggctgatccctcaaagagtgatggaccagcacaaacttaccagggaccagtgggaggaccggatccaggtgtggcatgcggaacaccgtgggatgctcaaagataatgctatgttggaatacctgaagattgctcaggacctggaaatgtatggaatcaactatttcgagataaaaaacaagaaaggaacagacctttggcttggagttgatgcccttggactgaatatttatgagaaagatgataagttaaccccaaagattggctttccttggagtgaaatcaggaacatctctttcaatgacaaaaagtttgtcattaaacccatcgacaagaaggcacctgactttgtgttttatgccccacgtctgagaatcaacaagcggatcctgcagctctgcatgggcaaccatgagttgtatatgcgccgcaggaagcctgacaccatcgaggtgcagcagatgaaggcccaggcccgggaggagaagcatcagaagcagctggagcggcaacagctggaaannnnnnnnnnnnnnnnnnnnnnnnnnnnnnnnnnnnnnnnnnnnnnnnnnnnnnnnnnnnnngagttgatgctgcggctgcaggactatgaggagaagacaaagaaggcagagagagagctctcggagcagattcagagggccctgcagctggaggaggagaggaagcgggcacaggaggaggccgagcgcctagaggctgaccgtatggctgcactgcgggctaaggaggagctggagagacaggcggtggatcagataaagagccaggagcagctggctgcggagcttgcagaatacactgccaagattgccctcctggaagagcgcggaggcgcaaggaggatgaagttgaagagtggcagcacagggccaaagaagctcaggatgacctggtgaagaccaaggaggagctgcacctggtgatgacagca

SEQ ID NO: 184090 - DNA, 1369 bp, Homo Sapiens
  misc_feature (494)..(556): n is a, c, g, or t
aactaaagtggtcactttaaaggggacccagaggtatagttacaattacatagtccgacacaaaaaaacccttgggtgatcagggaattggaaggttacaaaataacgagggtaacactgggtacaggacaaaaagctgttccagaacctggagagccaggctaattaatacggcctctccctgcgatcctgtctgtgctcacccctggaatctatcttgccagggccaaagccacctctgtccccaccaccccggccccctcggaagcctccacggtccccgccgcggccccggtagccgcctcgatcatagcctcctctgccaccacgacgatcatccccgtagttaccccccatgtgagagccacctggtccccctcctgggccatctggtttaggggccttacactggttgcattcattcctccaagagaagttcatattctcacaggtgggattaggacacttccagtcaccagctcgctgctgtcctnnnnnnnnnnnnnnnnnnnnnnnnnnnnnnnnnnnnnnnnnnnnnnnnnnnnnnnnnnnnnnntagcctccacggcccatgggtcctcctcgccctcggcctccacgaccattgccaccaccccgattaaagtctgcccggcgagtagcaaatgagaccttgataggatttccggagaattctttaccatcaaaccagtcaatagctgctttagctgaaggtgggtcatcaaaagagaccgttgcctctcccttcagcttgccagtttccctgtctgtgtacaaattaatcatgggctgtcccgttttcttgtttgtctgaagaaagcaaaatgaggtaacatcaattttaaaggctacagtactccctttccatcttcttcctctagaacatgaggtttataattcccaaacttcagctcccctcttcccagttacttcttcctacctcacatgtaaacctccattaaagaaaactgtctctcactccaatattgaaagataaaactaaaagttactatagagtgcaaatctcaagagtttagggtactctgataagttatactttttgtgttaagatagaacttctcttttagaaaacagtaactaaggctctttcctcaacaaattaagctggcaacaaccactaagacttgtttttactgctggcaaccattaaagacttgcttttactaatgtgtgaaatccacaagcctacaacactgacagaaagctcccactcctctccacaagtaccttaataataccaatctgcttgaagtaatcagccacagactcaattgtaacattctcacccaggccttgcacaaagatggtgttgttgtctgaattatcctgttctgcttgttgaacagag

SEQ ID NO: 184091 - DNA, 1694 bp, Homo Sapiens
  misc_feature (561)..(601): n is a, c, g, or t
ttggtgtatttttccaaaatgacttcttaaacaaaacaaatattataatgaattgtctggagaggacctcttcatttgagcattagcgttattttgtattggtgtgtgtgagcttgttcttgtgaatctgtgatagcaccgtttgttctgtgagctggaaacagaaggaaaaaacatacccttgggtacccatagccaataactggaagaaaatgatgtgaatttcatgtaaatgaccagaggaaagatggataagatgataatttcttaaatagacattttccttttttctttgtgcttcatggtggagctgtcatctggtccttggtattacaggatgtggttgatgaaggtttccaatatggtttcaggccaaaaccagggaagattctagcttcagcctcatgtccatttccagtctgtcagcattagacatggtcactgttcaagtttcaagacatccattcttaactatagagaagagttactcccctggcgtcttaacctatggaaaacatgcacggataggatatatttgattgcctcctcttccctttcagnnnnnnnnnnnnnnnnnnnnnnnnnnnnnnnnnnnnnnnnngttcatcagtttgctgttctctgcagtgagcagaatcaaatgggcaatatgtgtcctgggagacctgtgccgcacccaggtccccgtgttaacgtgtgcctgcggttgtggttggcaccctcgggtggtagctcttctactgtaatgagacaagcctttcttctgtcactgcagaaatttagaagggccgtgagcagtcttcccaagcatgatccaggagcagctcagagagggtgggtgaggatgcatgcatccagggaacaggcatcaagaagccagggccgtgcctggagcactgcagagatgactttggagaaagcaaagcagtgacccagtgaccaggcacattactcgtgagcgaggtattcccagtcttcctgctaagcctaatccaagccttacccagctgtgctactgtcatttgcaaagcaaggaaatactactactggtaataaaactacacatgcaagatgtcagataagaaataggtttatatttaccttcctgcgatgtggggttggtgcttgaagataaatgtgctgtttctagtttcttaaatagcccacacccctggatgcaaaaaggcagggttatttttacccatgagcatcctgtgcaggcaatagacttccctcactgtctccgcctgcagggaggagaatgtaccccactgcacctgagctcctggtccctcagccaagacctcaggggtccccagccagcctgctgctggggacccctgtgcttgctgcagtgtatggagcctcttgccttcccctggggaggcacccctgtaccccagcttccttcccctggccttttctggccccagtgctcctcctttacatagacttgttcacacagaaacgtgcacgcccccttttctccgccacttcaccaatttctgaaatccaacctcccagacttcacaggaagatagatattcttgagataatgaaaagtgatatcttcgcatacgaaaggaaaaaatgttgttgtatatatgatttttaactgtattaggggtgtatgaaccactctcaaaacgaggttttatttactgtgaagatgaatgcaaatcacaaccaatgat

SEQ ID NO: 184092 - DNA, 1707 bp, Homo Sapiens
  misc_feature (1567)..(1588): n is a, c, g, or t
ttggcaacatggcgggcggagaagctggagtgactctagggcagccgcatctttcgcgtcaggatctcaccaccttggatgttaccaagttgacgccactttcacatgaagttatcagcagacaagccacaattaacataggtacaattggtcatgtagctcatgggaaatccacagtcgtcaaagctatttctggagttcatactgtcaggttcaaaaatgaactagaaagaaatattacaatcaagcttggatatgctaatgctaagatttataagcttgatgacccaagttgccctcggccagaatgttatagatcttgtgggagcagtacacctgacgagtttcctacggacattccagggaccaaagggaacttcaaattagtcagacatgtttcctttgttgactgtcctggccacgatattttgatggctactatgctgaacggtgcagcagtgatggatgcagctcttctgttgatagctggtaatgaatcttgccctcagcctcagacatcggaacacctggctgctatagagatcatgaaactgaagcatattttgattctacaaaataaaattgatttggtaaaagaaagtcaggctaaagaacaatacgagcagatccttgcatttgtccaaggtacagtagcagagggagctcccattattccaatttcagctcagctgaaatacaatattgaagttgtttgtgagtacatagtaaagaaaattccagtacccccaagagactttacttcagagccccggcttattgttattagatcttttgatgtcaacaaacctggctgtgaagttgatgaccttaagggaggtgtagctggtggtagtatcctaaaaggagtattaaaggtgggccaggagatagaagtaagacctggtattgtttccaaagatagtgaaggaaaactcatgtgtaaaccaatcttttccaaaattgtatcactttttgcggagcataatgatctgcaatatgctgctccaggcggtcttattggagttggaacaaaaattgaccccactttgtgccgggctgacagaatggtggggcaagtacttggtgcagtcggagctttacctgagatattcacagaattggaaatttcctatttcctgcttagacggcttctaggtgtacgcactgaaggagacaagaaagcagcaaaggttcaaaagctgtctaagaatgaagtgctcatggtgaacataggatccctgtcaacaggagggagagttagtgctgtcaaggccgatttgggtaaaattgttttgaccaatccagtgtgcacagaggtaggagaaaaaattgcccttagccgaagagttgaaaaacactggcgtttaattggttggggtcagataagaagaggagtgacaatcaagccaacagtagatgatgactgaagaataccagttaaataatacattcggatggatttggaagttggaattcctcttaacaaccaaggggtttattttcaaagcaatattggggaattgatttcacagttcgttaccttagtaggtaacggtaaggttattcnnnnnnnnnnnnnnnnnnnnnnggttatgaaaactttcggactaaaattaatataaaaattgggcataatgttggattgaatctacattttggcagaagttaaacatttccacataatgtcaaattataacatcatgcagt

SEQ ID NO: 184093 - DNA, 940 bp, Homo Sapiens
ttggcaatatggcggatggcgaggagccggagaagaaaagaaggagaatagaggagctgctggctgagaaaatggctgttgatggtgggtgtggggacactggagactgggaaggtcgctggaaccatgtaaagaagttcctcgagcgatctggacccttcacacaccctgatttcgaaccgagcactgaatctctccagttcttgttagatacatgtaaagttctagtcattggagctggcggcttaggatgtgagctcctgaaaaatctggccttgtctggttttagacagattcatgttatagatatggacactatagatgtttccaatctaaataggcagtttttatttaggcctaaagatattggaagacctaaggctgaagttgctgcagaatttctaaatgacagagttcctaattgcaatgtagttccacatttcaacaagattcaagattttaacgacactttctatcgacaatttcatattattgtatgtggactggactctatcatcgccagaagatggataaatggcatgctgatatctcttctaaattatgaagatggtgtcttagatccaagctccattgtccctttgatagatggggggacagaaggttttaaaggaaatgcccgggtgattctgcctggaatgactgcttgtatcgaatgcacgctggaactttatccaccacaggttaattttcccatgtgcaccattgcatctatgcccaggctaccagaacactgtattgagtatgtaaggatgttgcagtggcctaaggagcagccttttggagaagggttccattagatggagatgatcctgaacatatacaatggattttccaaaaatccctagagagagcatcacaatataatattagggtgttacgtataggctcactcaaggggtagtaaaagattcattcctgc

SEQ ID NO: 184094 - DNA, 1906 bp, Homo Sapiens
ctttgtacaaaaaagttggtaaagttctagtcattggagctggcggcttaggatgtgagctcctgaaaaatctggccttgtctggttttagacagattcatgttatagatatggacactatagatgtttccaatctaaataggcagtttttatttaggcctaaagatattggaagacctaaggctgaagttgctgcagaatttctaaatgacagagttcctaattgcaatgtagttccacatttcaacaagattcaagattttaacgacactttctatcgacaatttcatattattgtatgtggactggactctatcatcgccagaagatggataaatggcatgctgatatctcttctaaattatgaagatggtgtcttagatccaagctccattgtccctttgatagatggggggacagaaggttttaaaggaaatgcccgggtgattctgcctggaatgactgcttgtatcgaatgcacgctggaactttatccaccacaggttaattttcccatgtgcaccattgcatctatgcccaggctaccagaacactgtattgagtatgtaaggatgttgcagtggcctaaggagcagccttttggagaaggggttccattagatggagatgatcctgaacatatacaatggattttccaaaaatccctagagagagcatcacaatataatattaggggtgttacgtataggctcactcaaggggtagtaaaaagaatcattcctgcagtagcttccacaaatgcagtcattgcagctgtgtgtgccactgaggtttttaaaatagccacaagtgcatacattcccttgaataattacttggtgtttaatgatgtagatgggctgtatacatacacatttgaagcagaaagaaaggaaaactgcccagcttgtagccagcttcctcaaaatattcagttttctccatcagctaaactacaggaggttttggattatctaaccaatagtgcttctctgcaaatgaaatctccagccatcacagccaccctagagggaaaaaatagaacactttacttacagtcggtaacctctattgaagaacgaacaaggccaaatctctccaaaacattgaaagaattggggcttgttgatggacaagaactggcggttgctgatgtcaccaccccacagactgtactattcaaacttcattttacttcttaaggaaaatctccacataatagaaaactcatggaaataatatactttgtggatgctaagaagttgaatcgatgtcatttttagcaatagtgttgccacgatttgtctttttttatataatgaaccactcttttttaactttgtaaccttcccttgaagacagaattttggtgttggtgcttgtaagcattttcattaataatatgagaaatgatacctggagagagagattatgagcaaatgtattgcttcttttagaggaggaagcatacaacctcttttgtgtgaattttgttattatggtcaaagaatgcattcctaagttttcatttgagtacccaaatacacaaaaggtgtccctttaaggattttaaagaattaagttttaaataacattacattttacaatctgacctctggagtatattgaacataggctatttcttgatataacactcatttaattgtggccatccaaatgaatattattgcagaatttatcttgttcataatgatttgtaaatggtgttatagctgaatacctgtgcatgaaaatgggcaatattttcatctgtttacttgtagtgccatagaggccaatatgcacaatattaactaatgccaagacatggctgtttaaaaaatttaaatgttcaaaagttatcactgatgcttttgcactatttattaataaaatcaatatattg

SEQ ID NO: 184095 - DNA, 2044 bp, Homo Sapiens
  misc_feature (1416)..(1457): n is a, c, g, or t
  misc_feature (1960)..(1985): n is a, c, g, or t
ttggccagttttaaaagcatgagctgtcgtcacctccaggaagtagtgggagtgcttagccctgtgtttcttaggagctcttccttaaaagaaaccgtgggggccaaaaataggaactttggtacccctgtatgccagcacccacagggaaggaacctcaccctttcacacagacaaatggtaccatccagttaagcccgtgacaaaaatggaaatttctaaatagcccaagtctccagggcaattgggaacagctttgaacccactaagatggggtctgctatgccaaaacatagatacagaattcacagtttgtcctgcattaggacattctcttcaactttgccactgtagaaagtggaggtaggtcagcggatggtgccacattaacagccgccttactgaagtgtagtccaacagggtcttactgccactgtgacacgtgccttgccttgggggtgcgtttccccacctctccttgctctgcagcttgtccgaaaaccagtccttgctgaggatgcccccctgggagaacatctggctcgtgggctccatctgcctgtccatgtcactccacttcctgatcctctatgtcgaacccttgccactcatcttccagatcacaccgctgaacgtgacccagtggctgatggtgctgaaaatctccttgcccgtgattctcatggatgagacgctcaagtttgtggcccgcaactacctggaacctggtaaagagtgtgtgcagcctgccaccaaatcctgctcgttctcggcatgcaccgatgggatttcctggccgtttgtgctgctcataatgcccctggtgatctgggtctatagcacagacactaactttagcgatatgttctggtcttgactgacagttttccataaagaagatgtttaacttaatcaattaatttttttattgtttaaagcaactgtctatttctgctgaattttcacatgaacatactggctggtgatggaggtttcatactctagattttgttttgctttttctgactccagtggggcaagattttccttttttatacacataattaaagtgtccattgacatgtacagagaactaacactattttatgcaaatatttttttgtagatgaaaaagcatgtacagtgttctgtttaatactcatccttgtatagttgagccagcagacattgtcagcaaattaattggcagcagattttaggaaatgaatgtgtgtggttttttttctaaaactaaatagcatgtattgtgtcttttgcatgatgatccggatttaatttgatatcacagtctaatttttattcataagccaatttttctgcactgagcagagtcttgctacctcagtcagtattgttttggtttgctacttccctcacccactttggcctccgttnnnnnnnnnnnnnnnnnnnnnnnnnnnnnnnnnnnnnnnnnngcttggcttcttctttaggattgtgatggttcgttctgtttacatcagttttaacgagaggtatgcctgtactcgcttgtgcagaaaacattgttccagattcaatcgactgggtttatgtcccttcacatagtttttaaggttatttatttaaatgtctaatgtattttattgtaacagacattgttttgccaacattgcctatttcagtggcacgtcatctagttttaaaaaaataaaacattttaaatggacagagaaaaataactgtcttgtctttaactcgtaagtggcttacctgggactaacagacatgtccaactttctctccagttcttagctcagaactttagttgtactctgcttgaggggaagaaggctcctgctctgctgtgtaggtagtcataggaattgtattcttaatgtacaggcactaattgtcatctgtgatgtacattttatgcaagtttctgctggcctggtatagagaacataagggcaannnnnnnnnnnnnnnnnnnnnnnnnntttgtaaaatctgtaaatagcacatgaccaaatgaacatattgtatagaactattttta

SEQ ID NO: 184096 - DNA, 2619 bp, Homo Sapiens
  misc_feature (2451)..(2492): n is a, c, g, or t
ttgggtagaattagcaacaatttgtgctctttgtaatgactctgctttggattacaatgaggcaaagggtgtgtatgaaaaagttggagaagctacagagactgctctcacttgcctagtagagaagatgaatgtatttgataccgaattgaagggtctttctaaaatagaacgtgcaaatgcctgcaactcagtcattaaacagctgatgaaaaaggaattcactctagagttttcacgtgacagaaagtcaatgtcggtttactgtacaccaaataaaccaagcaggacatcaatgagcaagatgtttgtgaagggtgctcctgaaggtgtcattgacaggtgcacccacattcgagttggaagtactaaggttcctatgacctctggagtcaaacagaagatcatgtctgtcattcgagagtggggtagtggcagcgacacactgcgatgcctggccctggccactcatgacaacccactgagaagagaagaaatgcaccttgaggactctgccaactttattaaatatgagaccaatctgaccttcgttggctgcgtgggcatgctggatcctccgagaatcgaggtggcctcctccgtgaagctgtgccggcaagcaggcatccgggtcatcatgatcactggggacaacaagggcactgctgtggccatctgtcgccgcatcggcatcttcgggcaggatgaggacgtgacgtcaaaagctttcacaggccgggagtttgatgaactcaacccctccgcccagcgagacgcctgcctgaacgcccgctgttttgctcgagttgaaccctcccacaagtctaaaatcgtagaatttcttcagtcttttgatgagattacagctatgactggcgatggcgtgaacgatgctcctgctctgaagaaagccgagattggcattgctatgggctctggcactgcggtggctaaaaccgcctctgagatggtcctggcggatgacaacttctccaccattgtggctgccgttgaggaggggcgggcaatctacaacaacatgaaacagttcatccgctacctcatctcgtccaacgtcggggaagttgtctgtattttcctgacagcagcccttggatttcccgaggctttgattcctgttcagctgctctgggtcaatctggtgacagatggcctgcctgccactgcactggggttcaaccctcctgatctggacatcatgaataaacctccccggaacccaaaggaaccattgatcagcgggtggctctttttccgttacttggctattggctgttacgtcggcgctgctaccgtgggtgctgctgcatggtggttcattgctgctgacggtggtccaagagtgtccttctaccagctgagtcatttcctacagtgtaaagaggacaacccggactttgaaggcgtggattgtgcaatctttgaatccccatacccgatgacaatggcgctctctgttctagtaactatagaaatgtgtaacgccctcaacagcttgtccgaaaaccagtccttgctgaggatgcccccctgggagaacatctggctcgtgggctccatctgcctgtccatgtcactccacttcctgatcctctatgtcgaacccttgccactcatcttccagatcacaccgctgaacgtgacccagtggctgatggtgctgaaaatctccttgcccgtgattctcatggatgagacgctcaagtttgtggcccgcaactacctggaacctggtaaagagtgtgtgcagcctgccaccaaatcctgctcgttctcggcatgcaccgatgggatttcctggccgtttgtgctgctcataatgcccctggtgatctgggtctatagcacagacactaactttagcgatatgttctggtcttgactgacagttttccataaagaagatgtttaacttaatcaattaatttttttattgtttaaagcaactgtctatttctgctgaattttcacatgaacatactggctggtgatggaggtttcatactctagattttgttttgctttttctgactccagtggggcaagattttccttttttatacacataattaaagtgtccattgacatgtacagagaactaacactattttatgcaaatatttttttgtagatgaaaaagcatgtacagtgttctgtttaatactcatccttgtataaaaaaaatagttgagccagcagacattgtcagcaaattaattggcagcagattttaggaaatgaatgtgtgtggttttttttctaaaactaaatagcatgtattgtgtcttttgcatgatgatccggatttaatttgatatcacagtctaatttttattcataagccaatttttctgcactgagcagagtcttgctacctcagtcagtattgttttggtttgctacttccctcacccactttggcctccgttnnnnnnnnnnnnnnnnnnnnnnnnnnnnnnnnnnnnnnnnnngcttggcttcttctttaggattgtgatggttcgttctgtttacatcagttttaacgagaggtatgcctgtactcgcttgtgcagaaaacattgttccagattcaatcgactgggtttatgtcccttc

SEQ ID NO: 184097 - DNA, 1963 bp, Homo Sapiens
ttggcggggcttttctcgcgctggtctcttcggtggtcagggatggcgcggaagtcgaacttgcctgtgcttctcgtgccgtttctgctctgccaggccctagtgcgctgctccagccctctgcccctggtcgtcaacacttggccctttaagaatgcaaccgaagcagcgtggagggcattagcatctggaggctctgccctggatgcagtggagagcggctgtgccatgtgtgagagagagcagtgtgacggctctgtaggctttggaggaagtcctgatgaacttggagaaaccacactagatgccatgatcatggatggcactactatggatgtaggagcagtaggagatctcagacgaattaaaaatgctattggtgtggcacggaaagtactggaacatacaacacacacacttttagtaggagagtcagccaccacatttgctcaaagtatggggtttatcaatgaagacttatctaccagtgcttctcaagctcttcattcagattggcttgctcggaattgccagccaaattattggaggaatgttataccagatccctcaaaatactgcggaccctacaaaccacctggtatcttaaagcaggatattcctatccataaagaaacagaagatgatcgtggtcatgacactattggcatggttgtaatccataagacaggacatattgctgctggtacatctacaaatggtataaaattcaaaatacatggccgtgtaggagactcaccaatacctggagctggagcctatgctgacgatactgcaggggcagccgcagccactgggaatggtgatatattgatgcgcttcctgccaagctaccaagctgtagaatacatgagaagaggagaagatccaaccatagcttgccaaaaagtgatttcaagaatccagaagcattttccagaattctttggggctgttatatgtgccaatgtgactggaagttacggtgctgcttgcaataaactttcaacatttactcagtttagtttcatggtttataattccgaaaaaaatcagccaactgaggaaaaagtggactgcatctaatccatctttactgtcaacatctgtatttaaagaagaaagaaacaaaggctgaaaaggctgctcactctcatcatctagtgttcctcatgtgttctaaagtctttttgtaaaataaacacaaaaataaatttatgttgaattggcactttctatatctgaaattgtattatctatttttatttcacctttcttatattatctgaagatgaatatgtatgtggctgtattttgtatatatttaagttttaagtgacacttggatttctgatcagtgttgcaaaaaattgctactttgagatttatttccacagtgatatattaaacccaaaaggaatcatcatatttggatgcttaaaatagagtatacaagttttttagacccaaagaaaaaaacagcagagtctcagcatgatcagtcctgattgaatttcattatgtcacagtgatgcatgtcttagcactgattattgattttacttaatattccctaaaaacttgaggaaggaagatgatagaacatgagatactctttgttttgtacatactagaaaatacagctatcttctgatgagcaattgtgttgattttctttgcttttttcctcttatggagctctcagtgtgtgaaagttctaaagccacaagaatcaatgatgttttagctgctaatatttagtattgatcgtttcttttaaaaatgatttggggaacttgatctgtactgtaattttactaattccttgtgcagaggtgggtatggcaattagaagtcaagaaatggggttgtttagcttggtttgtttccctaacttctgattaactctctgtatgacaacttctacaaaagttgtggccgtgcttctcagcagcatttttccttc

SEQ ID NO: 184098 - DNA, 1551 bp, Homo Sapiens
ttggggatgcggctgtgggcgccggggccgggtagctgctccaggcgcgcgagctaaccgagtgcggcgagggcctaccaggggcgacagggtttctctccgcaagcgcgcgatgcagcgggcggcggcgctggtccggcggggctgtggtccccggacccccagctcctggggccgcagccagagcagcgcggccgccgaggcctcggcggtgctcaaggtgcggcccgagcgcagccggcgcgagcgcatcctcacgctggagtccatgaacccgcaggtgaaggcggtggagtacgccgtgcggggacccatcgtgctcaaggccggcgagatcgagctcgagctgcagcggggtatcaaaaagccattcacagaggtcatccgagccaacatcggggacgcccaggctatggggcagcagccaatcaccttcctccggcaggtgatggcactatgcacctacccaaacctgctggacagccccagcttcccagaagatgctaagaaacgtgcccggcggatcctgcaggcttgtggcgggaacagcctggggtcctacagtgctagccagggtgtcaactgcatccgtgaagatgtggctgcctacatcaccaggagggatggcggtgtgcctgcggaccccgacaacatctacctgaccacgggagctagtgacggcatttctacgatcctgaagatcctcgtctccgggggcggcaagtcacggacaggtgtgatgatccccatcccacaatatcccctctattcagctgtcatctctgagctcgacgccatccaggtgaattactacctggacgaggagaactgctgggcgctgaatgtgaatgagctccggcgggcggtgcaggaggccaaagaccactgtgatcctaaggtgctctgcataatcaaccctgggaaccccacaggccaggtacaaagcagaaagtgcatagaagatgtgatccactttgcctgggaagagaagctctttctcctggctgatgaggtgtaccaggacaacgtgtactctccagattgcagattccactccttcaagaaggtgctgtacgagatggggcccgagtactccagcaacgtggagctcgcctccttccactccacctccaagggctacatgggcgagtgtggttacagaggaggctacatggaggtgatcaacctgcaccctgagatcaagggccagctggtgaagctgctgtcggtgcgcctgtgccccccagtgtctgggcaggccgccatggacattgtcgtgaaccccccggtggcaggagaggagtcctttgagcaattcagccgaaagaaggagtcggtcctgggtaatctggccaaaaaagcaaagctgacggaagacctgtttaaccaagtcccaggaattcactgcaaccccttgcagggggccatgtacgccttccctcggatcttcattcctgccaaagctgtggaagctgctcaagcccatcaaatggctccagacatgttctactgcatgaagctcctggaggagactggcatctgtgtcgtgcc

SEQ ID NO: 184099 - DNA, 1683 bp, Homo Sapiens
  misc_feature (1169)..(1232): n is a, c, g, or t
  misc_feature (1404)..(1437): n is a, c, g, or t
ttggctccctccttccttccgccgcaacatggctaacaacagccccgcgctgacaggcaactcgcagccgcagcaccaggcggctgcagctgcggctcagcaacagcagcagtgcggcggcggcggcgctaccaagccggcggtctccggcaagcagggcaatgtgctcccgctctggggcaacgagaagaccatgaacctcaaccccatgatcctgaccaacatcctgtcgtcgccttacttcaaagtacagctctacgagctcaagacctaccacgaggtggtggacgagatctactttaaggtcacgcacgttgaaccatgggagaaaggaagcaggaaaacagcgggccagacagggatgtgcggaggggttcgaggtgttggaacaggaggaattgtttctacagcattttgcctgttatacaaattatttaccctgaagttaactcgaaagcaagtgatgggtcttataacacacacagactctccatatattagagcgcttggatttatgtatataagatatacacagccccctacagatctgtgggactggtttgaatccttccttgatgatgaagaggacctagatgtgaaggctggtggaggctgtgtaatgaccattggagaaatgctacgatcttttctcacaaaactggagtggttttctaccttgtttccaagaattccagttccagttcaaaagaatattgatcaacagattaaaacccgacctagaaaaatcaagaaagatgggaaggaaggtgctgaggaaatagacagacatgttgaacgcagacgttcaaggtctccaaggagatctctgagtccacggaggtccccaagaaggtcaagaagtagaagtcatcatcgggagggccatgggtcttctagttttgacagagaattagaaagagagaaagaacgccagcgactagagcgtgaagccaaagaaagggagaaagaacggcgaagatcccgaagtattgaccgggggttagaacgcaggcgcagcagaagtagggaaaggcatagaagtcgcagtcgaagtcgtgataggaaaggggatagaagggacagggatcgagaaagagagaaagaaaatgagagaggtagaagacgagatcgtgactatgataaggaaagaggaaatgaacgagaaaaannnnnnnnnnnnnnnnnnnnnnnnnnnnnnnnnnnnnnnnnnnnnnnnnnnnnnnnnnnnnnnnaacataaagaagacaaagatgataggcggcacagagatgacaaaagagattccaagaaagagaaaaaacacagtagaagcagaagcagagaaaggaaacacagaagtaggagtcgaagtagaaatgcagggaaacgaagtagaagtagaagcaaagagaaatcaagtaaacnnnnnnnnnnnnnnnnnnnnnnnnnnnnnnnnnnaagtcgaagtggcagtcaaggaagaactgacagtgttgaaaaatcaaaaaaacgggaacatagtcccagcaaagaaaaatctagaaagcgtagtagaagcaaagaacgttcccacaaacgagatcacagtgatagtaaggaccagtcagacaaacatgatcgtcgaaaggagccaaagtatagaacaagagagccaggaaaaacagcataaaaacaaagatgagactgtgtgaaaatattttgtaa

SEQ ID NO: 184100 - DNA, 1303 bp, Homo Sapiens
  misc_feature (76)..(109): n is a, c, g, or t
ttggcagaagtaggagtcgaagtagaaatgcagggaaacgaagtagaagtagaagcaaagagaaatcaagtaaacnnnnnnnnnnnnnnnnnnnnnnnnnnnnnnnnnnaagtcgaagtggcagtcaaggaagaactgacagtgttgaaaaatcaaaaaaacgggaacatagtcccagcaaagaaaaatctagaaagcgtagtagaagcaaagaacgttcccacaaacgagatcacagtgatagtaaggaccagtcagacaaacatgatcgtcgaaggagccaaagtatagaacaagagagccaagaaaaacagcataaaaacaaagatgagactgtgtgaaaatattttgtaaaagtggatcacattgaatcctataaatgattaaatctgcttttttcccccacgttgagattgtgcagtagttcgcactcctcaagctctccctgtaggctgcattttcatttcctctttcgtgtagggaagtgcctttgtaattccatttattgcattggtgttttcacccaattgttaagtttgatacatgatgcacagattgttcttgcatttttattgtttgtttttgaaatgtacagtctgtacatatgtcctgaaaatgttttaattcctttggcatggttgccatgttggttaaatttgtataaggcaataaactgccactaatctatttttgttttgtaggtgtgggattatggtttgtgtactgaagttagcatggctgtgcttttcgtaatagaatgctaaagactttgagaatggatcttggatgtctattataggagaagtatgtgctgccaatgtacaagaaggcagcattgtaggattaacattcttgtctactgtatattatcttggaaggctcttgttaatatgttacacttaatattctccacagttacctttagagagaatttatgagaagttagtttctgatgcagaggtttttaggctgtgatttcatcaaaagtccttttagcattctacctcaaagggacacttagtatgcctaaaatttattcacttagttttccttttttatttgaaaaaatacatgacatgtaatctttttttcttgaattctttctcagattttaaagtactatattaaagaaaaaaattaatgtctaaagcctagcattcttgcagaaccctatactaaccatgtaatggggagagggtggggcagatgagtagagaaacaattcaagcctcaagcttccaaagcatttttataaatggaaaatccttaaattatgaaacagcttgatatagtgtcctttttt

SEQ ID NO: 184101 - DNA, 871 bp, Homo Sapiens
  misc_feature (313)..(376): n is a, c, g, or t
  misc_feature (548)..(581): n is a, c, g, or t
ttgggtagaagtcatcttcgggagggccatgggtcttctagttttgacagagaattagaaagagagaaagaacgccagcgactagagcgtgaagccaaagaaagggagaaagaacggcgaagatcccgaagtattgaccgggggttagaacgcaggcgcagcagaagtagggaaaggcatagaagtcgcagtcgaagtcgtgataggaaaggggatagaagggacagggatcgagaaagagagaaagaaaatgagagaggtagaagacgagatcgtgactatgataaggaaagaggaaatgaacgagaaaaannnnnnnnnnnnnnnnnnnnnnnnnnnnnnnnnnnnnnnnnnnnnnnnnnnnnnnnnnnnnnnnaacataaagaagacaaagatgataggcggcacagagatgacaaaagagattccaagaaagagaaaaaacacagtagaagcagaagcagagaaaggaaacacagaagtaggagtcgaagtagaaatgcagggaaacgaagtagaagtagaagcaaagagaaatcaagtaaacnnnnnnnnnnnnnnnnnnnnnnnnnnnnnnnnnnaagtcgaagtggcagtcaaggaagaactgacagtgttgaaaaatcaaaaaaacgggaacatagtctcagcaaagaaaaatctagaaagcgtagtagaagcaaagaacgttctcacaaacgagatcacagtgatagtaaggatcagtcagacaaacatgatcgtcgaaggagccaaagtatagaacaagagagctaagaaaaacagcataaaaacaaagatgagactgtgtgaaaatattttgtaaaagtggatcacattgaatcctataaatgattaaatctgctttttt

SEQ ID NO: 184102 - DNA, 1436 bp, Homo Sapiens
actttgtacaaaaaagttggcatgattcgtgggggactcaggcagaggtaaaagtgtgaaacttttcagcattacctaagaagcaaaggctcaattttggctgcttcattcttatctcttctgccacagttctaacgtgcctgatctactgagaccaaggatgaccaatgactcagaagggaaaatgggatttaaacacccaaagatcatggggaatttcagaggtcatgccctccctggaaccttcttttttattattggtctttggtggtgtacaaagagtattctgaagtatatctgcaaaaagcaaaagcgaacctgctatcttggttccaaaacattattctatcgattggaaattttggagggaattacaatagttggcatggctttaactggcatggctggggagcagtttattcctggagggccccatctgatgttatatgactataaacaaggtcactggaatcaactcctgggctggcatcatttcaccatgtatttcttctttgggctgttgggtgtggcagatatcttatgtttcaccatcagttcacttcctgtgtccttaaccaagttaatgttgtcaaatgccttatttgtggaggcctttatcttctacaaccacactcatggccgggaaatgctggacatctttgtgcaccagctgctggttttggtcgtctttctgacaggcctcgttgccttcctagagttccttgttcggaacaatgtacttctggagctattgcggtcaagtctcattctgcttcaggggagctggttctttcagattggatttgtcctgtatccccccagtggaggtcctgcatgggatctgatggatcatgaaaatattttgtttctcaccatatgcttttgttggcattatgcagtaaccattgtcatcgttggaatgaattatgctttcattacctggttggttaaatctagacttaagaggctctgctcctcagaagttggacttctgaaaaatgctgaacgagaacaagaatcagaagaagaaatgtgactttgatgagcttccagtttttctagataaaccttttcttttttacattgtctttgttcttggttttgtttctcgatcttttgtttggagaacagctggctaaggatgactctaagtgtactgtttgcatttccaatttggttaaagtatttgaatttaaatattttctttttagctttgaaaatattttgggtgatactttcattttgcacatcatgcacatcatggtattcaggggctagagtgatttttttccagattatctaaagttggatgcccacactatgaaagaaatatttgttttatttgccttatagatatgctcaaggttactgggcttgctactattttgtaactcccttgaccaatggaattatactttgtttatctttgttgctgc

SEQ ID NO: 184103 - DNA, 1018 bp, Homo Sapiens
ttggagcatgtgagtgggaggaagaaaagagagttttctggagctgttgcaatgtgtatgctggtgaaatctacttgagcattaagcagtatctcccagcattgttagctactgagtggcacatcttcagtacgcatgattcgtgggggactcaggcagaggtaaaagtgtgaaacttttcagcattacctaagaagcaaaggctcaattttggctgcttcattcttatctcttctgccacagttctaacgtgcctgatctactgagaccaaggatgaccaatgactcagaagggaaaatgggatttaaacacccaaagatcatggggaatttcagaggtcatgccctccctggaaccttcttttttattattggtctttggtggtgtacaaagagtattctgaagtatatctgcaaaaagcaaaagcgaacctgctatcttggttccaaaacattattctatcgattggaaattttggagggaattacaatagttggcatggctttaactggcatggctggggagcagtttattcctggagggccccatctgatgttatatgactataaacaaggtcactggaatcaactcctgggctggcatcatttcaccatgtatttcttctttgggctgttgggtgtggcagatatcttatgtttcaccatcagttcacttcctgtgtccttaaccaagttaatgttgtcaaatgccttatttgtggaggcctttatcttctacaaccacactcatggccgggaaatgctggacatctttgtgcaccagctgctggttttggtcgtctttctgacaggcctcgttgccttcctagagttccttgttcggaacaatgtacttctggagctattgcggtcaagtctcattctgcttcaggggagctggttctttcagattggatttgtcctgtatccccccagtggaggtcctgcatgggatctgatggatcatgaaaatattttgtttctcaccatatgcttttgttggcattatgcagtaacc

SEQ ID NO: 184104 - DNA, 1112 bp, Homo Sapiens
  misc_feature (164)..(190): n is a, c, g, or t
  misc_feature (221)..(335): n is a, c, g, or t
ttgggtcataaatgggtagatagtaagtggggactaaaactgtcaagggtgatctaattggggtgggctcatagtagtacttctgtgtgaatgctttggtggacccttaaggtactacatggaccagcctgggcaacatgatgagaccctgtctctacagattnnnnnnnnnnnnnnnnnnnnnnnnnnnaaattagctgagtatggtggtgtgtgcctgnnnnnnnnnnnnnnnnnnnnnnnnnnnnnnnnnnnnnnnnnnnnnnnnnnnnnnnnnnnnnnnnnnnnnnnnnnnnnnnnnnnnnnnnnnnnnnnnnnnnnnnnnnnnnnnnnnnggtactacatggagataagcttgaagttactgtaaaaaagctacctttactcttgccctaagttatttattctgatacgtcctatgtacaagtcagtcagttcagtcctcatatctactaaaagctacctttatgcccaaggtgctagatgagaagacagggcccctgccctggtagagctgagttgggcctggtctcaaaatcccgactagagcctgctttgtttgctccttgaaggtgttagcccagctctcttttatctgccccttccccaggctttggggagaagatacggaccacggagacacaggtgcttgtggcatctgcacagaagaagctgctagaggaaagactaaagcttgtctcagaactgtgggatgctgggatcaaggctgagctgctgtacaagaagaacccaaagctactgaaccagttacagtactgtgaggaggcaggcatcccactggtggctatcatcggcgagcaggaactcaaggatggggtcatcaagctccgttcagtgacgagcagggaagaggtggatgtccgaagagaagaccttgtggaggaaatcaaaaggagaacaggccagcccctctgcatctgctgaactgaacaaactatcagaggaaaggaactgggactggcactatttgaggttaagacaaactgcatatgtacttcaattgctttgcatttttccgtttcagcggaagacctgaagagtggtcagaacagaggctttgatttttattatggttattttattgattatta

SEQ ID NO: 184105 - DNA, 1847 bp, Homo Sapiens
ttggcgccctccggccgggaagcatggggcttcccaggctggtctgcgccttcttgctcgccgcctgctgctgctgtcctcgcgtcgcgggtgtgcccggagaggctgagcagcctgcgcctgagctggtggaggtggaagtgggcagcacagcccttctgaagtgcggcctctcccagtcccaaggcaacctcagccatgtcgactggttttctgtccacaaggagaagcggacgctcatcttccgtgtgcgccagggccagggccagagcgaacctggggagtacgagcagcggctcagcctccaggacagaggggctactctggccctgactcaagtcaccccccaagacgagcgcatcttcttgtgccagggcaagcgccctcggtcccaggagtaccgcatccagctccgcgtctacaaagctccggaggagccaaacatccaggtcaaccccctgggcatccctgtgaacagtaaggagcctgaggaggtcgctacctgtgtagggaggaacgggtaccccattcctcaagtcatctggtacaagaatggccggcctctgaaggaggagaagaaccgggtccacattcagtcgtcccagactgtggagtcgagtggtttgtacaccttgcagagtattctgaaggcacagctggttaaagaagacaaagatgcccagttttactgtgagctcaactaccggctgcccagtgggaaccacatgaaggagtccagggaagtcaccgtccctgttttctacccgacagaaaaagtgtggctggaagtggagcccgtgggaatgctgaaggaaggggaccgcgtggaaatcaggtgtttggctgatggcaaccctccaccacacttcagcatcagcaagcagaaccccagcaccagggaggcagaggaagagacaaccaacgacaacggggtcctggtgctggagcctgcccggaaggaacacagtgggcgctatgaatgtcagggcctggacttggacaccatgatatcgctgctgagtgaaccacaggaactactggtgaactatgtgtctgacgtccgagtgagtcccgcagcccctgagagacaggaaggcagcagcctcaccctgacctgtgaggcagagagtagccaggacctcgagttccagtggctgagagaagagacaggccaggtgctggaaagggggcctgtgcttcagttgcatgacctgaaacgggaggcaggaggcggctatcgctgcgtggcgtctgtgcccagcatacccggcctgaaccgcacacagctggtcaacgtggccatttttggccccccttggatggcattcaaggagaggaaggtgtgggtgaaagagaatatggtgttgaatctgtcttgtgaagcgtcagggcacccccggcccaccatctcctggaacgtcaacggcacggcaagtgaacaagaccaagatccacagcgagtcctgagcaccctgaatgtcctcgtgaccccggagctgttggagacaggtgttgaatgcacggcctccaacgacctgggcaaaaacaccagcatcctcttcctggagctggtcaatttaaccaccctcacaccagactccaacacaaccactggcctcagcacttccactgccagtcctcataccagagccaacagcacctccacagagagaaagctgccggagccggagagccggggcgtggtcatcgtggctgtgattgtgtgcatcctggtcctggcggtgctgggcgctgtcctctatttcctctataagaagggcaagctgccgtgcaacgctcagggaagcaagagatcacgctacccccgtctcgtaagagcgaacttg

SEQ ID NO: 184106 - DNA, 971 bp, Homo Sapiens
ccaactttgtacaaaaaagttggatatacttctaaaagaaacttttatgttataagagttactttttggataagatttattaatctcagttacctactattctgacattttaggaaggaggtaattgtttttaatgatggataaacttgtgctggtgttttggatcttatgatgctgagcatgttctgcactggtgctaatgtctaatataattttatatttacacacatacgtgctacccagagattaatttagtccatatgaactattgacccattgttcattgagacagcaacatacgcactcctaaatcagtgtgtttagacttttcaagtatctaactcatttccaaacatgtaccatgttttataaacctcttgatttccagcaacatactatagaaaacacctgctactcaaaacacaacttctcagtgtcatccattgctgtcgtgagagacaacatagcaatatctggtatgttgcaagctttcaagatagcctgaacttaaaaagttggtgcattagttgtatctgatggatataaatttgcctcctagttcactttgtgtcaagagctaaaactgtgaacctaactttctcttattggtgggtaataactgaaaataaagatttattttcatgctcacttcttaaaagtcataaaaacaatcaaataggatcatgtttattgtcatgtgtttcctggtttctgacctgtgtgcacacccctgtgtgtttataatttttaaattgaattttatatggggtttttatttgctaaaaaccaggctgttgaatcacatttgggaagggtacttatcttaatgactaatgacttaattgggaaagttgaattcttgtaaaatacaaaatccaaggacttcttggatttaatctgattgtcacttcttagcagatcacttttttgataatgaaagttaagcatactgaatgctacttttgattgac

SEQ ID NO: 184107 - DNA, 1947 bp, Homo Sapiens
  misc_feature (334)..(344): n is a, c, g, or t
tttgtacaaaaaagttggctgaagattcgccttatgagaccatcatttccggaagccagcaaatgatataacgtctcagctggagatcaattttggagaccttggccgcccaggacgtggcggcaggggaggacgaggtggacgtgggcgtggtgggcgcccaaaccgtggcagcaggaccgacaagtcaagtgcttctgctcctgatgtggatgacccagaggcattcccagctctggcttaactggatgccataagacaaccctggttcctttgtgaacccttctgttcaaagcttttgcatgcttaaggattccaaacgactaagaaattnnnnnnnnnnngactgtcattcataccattcacacctaaagactgaattttatctgttttaaaaatgaacttctcccgctacacagaagtaacaaatatggtagtcagttttgtatttagaaatgtattggtagcagggatgttttcataattttcagagattatgcattcttcatgaatacttttgtattgctgcttgcaaatatgcatttccaaacttgaaatataggtgtgaacagtgtgtaccagtttaaagctttcacttcatttgtgttttttaattaaggatttagaagttcccccaattacaaactggttttaaatattggacatactggttttaatacctgctttgcatattcacacatggtcaactgggacatgttaaactttgatttgtcaaattttatgctgtgtggaatactaactatatgtattttaacttagttttaatattttcatttttggggaaaaatcttttttcacttctcatgatagctgttatatatatatgctaaatctttatatacagaaatatcagtacttgaacaaattcaaagcacatttggtttattaacccttgctccttgcatggctcattaggttcaaattataactgatttacattttcagctatatttactttttaaatgcttgagtttcccattttaaaatctaaactagacatcttaattggtgaaagttgtttaaactacttattgttggtaggcacatcgtgtcaagtgaagtagttttataggtatgggttttttctcccccttcaccagggtgggtggaataagttgatttggccaatgtgtaatatttaaactgttctgtaaaataagtgtctggccatttggtatgatttctgtgtgtgaaaggtcccaaaatcaaaatggtacatccataatcagccaccatttaacccttccttgttctaaaacaaaaaccaaagggcgctggttggtagggtgaggtgggggagtattttaatttttggaatttgggaagcagacagctttactttgtaaggttggaacagcagcactatacatgaaatataaaccaaaaacctttactgtttctaaatttcctagattgctattatttggttgtaagttgagtattccacagaaagtggtaattatctcttctctcttcctccattagaaaattaggtaaataatggattcctataatgggagcatcaccacttattaaaacacacatagaatgatgaattaaaaaagttttctaggattgtcttttattctgccacatttattgataaacagtgaaggaatttttaaaaaatttttaagaattgtttgtcacgtcatttttagaaatgttctacctgtatatggtaatgtccagttttaaaaatattggacatcttcaatcttaaacatttctatttagctgattggttctcacatatacttctaaaagaaacttttatgttataagagttactttttggataagatttattaatctcagttacctactattctgacattttaggaaggaggtatttgtttttaatgatggataaacttgtgctggtgttttggatcttatgatgctgagcatgttctgcactggtgc

SEQ ID NO: 184108 - DNA, 1004 bp, Homo Sapiens
ttgtacaaaaaagttggcaaaaaagtaacccttataaaataaaatttctcttttagaagtatatgtgagaaccaatcagctaaatagaaatgtttaagattgaagatgtccaatatttttaaaatgggacattaccatatacaggtagaacatttctaaaaatgatgtgacaattcataaaactttttaaaaaatttcttcactgtttatcaataaatgtggcagaataaaagacaatcctagaaaaatttttttattcatcattctatgtgtgttttaataagtggtgatgctcccattataggaatccattatttacctaattttctaatggaggaagagagaagagataaattaccactttctgtggaatactcaacttacaaccaaataatagcaatctaggaaatttagaaacagtaaaggtttttgttttatatttcatgtatagtgctgctgttccaaccttacaaagtaaagctgtctgcttcccaaattccaaaaattaaaatactcccccacctcaccctaccaaccagcgccctttggtttttgttttagaacaaggaagggttaaatggtggctgattatggatgtaccattttgattttgggacctttcacacacagaaatcataccaaatggccagacacttattttacagaacagtttaaatattacacattggccaaatcaacttattccacccaccctggtgaagggggagaaaaaacccatacctataaaactacttcacttgacacgatgtgcctaccaacaataagtagtttaaacaactttcaccaattaagatgtctagtttagattttaaaatgggaaactcaagcatttaaaaagtaaatatagctgaaaatgtaaatcagttataatttgaacctaatgagccatgcaaggagcaagggttaataaaccaaatgtgctttgaatttgttcaagtactgatatttctgtatataaagccaacttttttgtacaaagttgg

SEQ ID NO: 184109 - DNA, 1509 bp, Homo Sapiens
  misc_feature (1003)..(1015): n is a, c, g, or t
  misc_feature (1145)..(1155): n is a, c, g, or t
ttggggaagcaggaggaagccgatcgaaaactcagagaggaggaagagaagaggaggctaaaggaagagattgaaaggcgaagagcagaagctgctgagaaacgccagaagatgccagaagatggcttgtcagatgacaagaaaccattcaagtgtttcactcctaaaggttcatctctcaagatagaagagcgagcagaatttttgaataagtctgtgcagaaaagcagtggtgtcaaatcgacccatcaagcagcaatagtctccaagattgacagcagactggagcagtataccagtgcaattgagggaacaaaaagcgcaaaacctacaaagccggcagcctcggatcttcctgttcctgctgaaggtgtacgcaacatcaagagtatgtgggagaaagggaatgtgttttcatcccccactgcagcaggcacaccaaataaggaaactgctggcttgaaggtaggggtttctagccgcatcaatgaatggctaactaaaaccccagatggaaacaagtcacctgctcccaaaccttctgacttgagaccaggagacgtatccagcaagcggaacctctgggaaaagcaatctgtggataaggtcacttcccccactaaggtttgagacagttccagaaagaacccaagctcaagacgcaggacgagctcagttgtagagggctaattcgctctgttttgtatttatgttgatttactaaattgggttcattatcttttatttttcaatatcccagtaaacccatgtatattatcactatatttaataatcacagtctagagatgttcatggtaaaagtactgcctttgcacaggagcctgtttctaaagaaacccatgctgtgaaatagagacttttctactgatcatcataactctgtatctgagcagtgataccaaccacatctgaagtcaacagaagatccaagtttaaaattgcctgcggaatgtgtgcagtatctagaaaaatgaaccgtagnnnnnnnnnnnnnaaatacagaagtcatgttgtttctgcactttataataaagcatggaagaaattatcttagtaggcaattgtaacactttttgaaagtaacccatttcagatttgaaatactgcaataatggttgtctttnnnnnnnnnnngaaatgtactgttaaggtattactttttttcatgctgatgattcatatctaaattacattattatgttagctgacagtggtactgattttttaggttggttgttttgtggatttctttagtagtgatagtagcctgaaccacattttagataactcaattatgtatgtatgtgcatacacatatacaaacacactaatggtagaatgcttttttatgtgctagactattatatttagtagtatgtcattgtaactagccaatatcacagcttttgaaaattaaaaaatcacactatattaatatttcatatttgccacagaaacatggcagatagtatcaatatgttttcaatg

SEQ ID NO: 184110 - DNA, 2020 bp, Homo Sapiens
  misc_feature (55)..(67): n is a, c, g, or t
  misc_feature (197)..(208): n is a, c, g, or t
acaaaaaagttggctgcggaatcgtcgtgcagtatctagaaaaatgaaccgtagnnnnnnnnnnnnnaaatacagaagtcatgttgtttctgcactttataataaagcatggaagaaattatcttagtaggcaattgtaacactttttgaaagtaacccatttcagatttgaaatactgcaataatggttgtctttnnnnnnnnnnnngaaatgtactgttaaggtattactttttttcatgctgatgattcatatctaaattacattattatgttagctgacagtggtactgattttttaggttggttgttttgtggatttctttagtagtgatagtagcctgaaccacattttagataactcaattatgtatgtatgtgcatacacatatacaaacacactaatggtagaatgcttttttatgtgctagactattatatttagtagtatgtcattgtaactagccaatatcacagcttttgaaaaattaaaaaatcacactatattaatatttcatatttgccaacagaaacatggcagataggtatcaatatgttttcaatgcctgatgacctataagaagaaagtattgaaaagaagagagattagaactgttagaaggagttgaaattttctaaaagacatagtatttagtttataattaaatgcattcttgaagtccagtgtgaattttattaatgctatcatctcgaccaagctcaaagcctacttattagaaacaatgaagttcacaataggtcataaggtctcttccttttctaaaattgaaagacaagaaatttagtgccaatattgtacagacagaaattccatgtatgagtctcaacaaagactacctttggctaaatgtctagaagcagagaagtaaagtgagcaaaatccagtgttgaggagtcatgacagtactttgatctttatatactctgaagcatttcttcaaacttttctacttttgtcattgatacctgtagtaagttgacaatgtggtgaaatttcaaaattatatgtaacttctactagttttactttctcccccaagtcttttttaactcatgatttttacacacacaatccagaacttattatatagcctctaagtctttattcttcacagtagataatgaaagagtcctccagtgtcttggcaaaatgttctagtatagctggatacatacagtggagttctataaactcatacctcagtggacttaaccaaaattgtgttagtctcaattcctaccacactgagggagcctcccaaataactattttcttatctgcagtattcctccagaagagctaaccagggcagggctggcatgagaagtgacatctgcgttacaaagtctatcttcctcataagtctgtaaagagcaattgaatcttctagctttagcaaacctaagccaaaggaaggaaagccacgaagaatgcagaagtcaaaccctcatgacaaagtaggcacaagtctacaataagctaaatcagaatttacaaatacaagtgtcccaggtagcattgactcccgtcattggagtgaaatggatcaaagtttgaattaaggcctatggtaaggtaacattgctttgttgtacttttgaacaagagctcctcctgatcactattacatatttttctagaaaatctaaagttcagaagagaatgtatcactgctgacttttattccaatatttggatggagtaagttttagggtagaattttgttcagtttggatttaatcttttgaaaagtaaattccttgtttactggtttgactataattctctgttatctttacgaggtaaaactgcaagctgactagcatgttctgtgaatctgccattcctaaaaattttataaacacttgatacttttcactgataatggatcgctccaataaacatatattgtgaaaatgcatccacaataaatggaattccttcctgcaaaatgtctttttctcacttatttttatgtacaatattgatagtgaaagg

SEQ ID NO: 184111 - DNA, 1269 bp, Homo Sapiens
  misc_feature (130)..(142): n is a, c, g, or t
  misc_feature (272)..(284): n is a, c, g, or t
ttggcttttctactgatcatcataactctgtatctgagcagtgataccaaccacatctgaagtcaacagaagatccaagtttaaaattgcctgcggaatgtgtgcagtatctagaaaaatgaaccgtagnnnnnnnnnnnnnaaatacagaagtcatgttgtttctgcactttataataaagcatggaagaaattatcttagtaggcaattgtaacactttttgaaagtaacccatttcagatttgaaatactgcaataatggttgtctttnnnnnnnnnnnnngaaatgtactgttaaggtattactttttttcatgctgatgattcatatctaaattacattattatgttagctgacagtggtactgattttttaggttggttgttttgtggatttctttagtagtgatagtagcctgaaccacattttagataactcaattatgtatatgtgcatacacatatacaaacacactaatggtagaatgcttttttatgtgctagactattatatttagtagtatgtcattgtaactagccaatatcacagcttttgaaaaattaaaaaatcacactatattaatattttatatttgccaacagaaacatggcagataggtatcaatatgttttcaatgcctgatgacctataagaagaaagtattgaaaagaagagagattagaactgttagaaggagttgaaattttctaaaagacatagtatttagtttataattaaatgcattcttgaagtccagtgtgaattttattaatgctatcatctcgaccaagctcaaagcctacttattagaaacaatgaagttcacaataggtcataaggtctcttccttttctaaaattgaaagacaagaaatttagtgccaatattgtacagacagaaattccatgtatgagtctcaacaaagactacctttggctaaatgtctagaagcagagaagtaaagtgagcaaaatccagtgttgaggagtcatgacagtactttgatctttatatactctgaagcatttcttcaaacttttctacttttatttgtcattgatacctgtagtaagttgacaatgtggtgaaatttcaaaattatatgtaacttctactagttttactttctcccccaagtcttttttaactcatgatttttacacacacaatccagaacttattatatagcctctaagtctttattcttcacagtagataatgaaagagattctccaagtgtcttggcaaatgttctagtatagctgga

SEQ ID NO: 184112 - DNA, 2680 bp, Homo Sapiens
  misc_feature (1269)..(1329): n is a, c, g, or t
  misc_feature (2097)..(2110): n is a, c, g, or t
  misc_feature (2240)..(2251): n is a, c, g, or t
ttggaccatcgtgaatgcacctcacctgttttcacactcatcttttaagaatggatgagatgatataagtgaagtgatttgaattcctttaccccctcccccacaaaaagctatgtaaattcagtatacttttaaataatctgtctcacttactgaaagaaacacaaaacgcacaaaatatgaaagctaacacctgccctccatatatcatcttcctatgtctcccaccacaaccacaaaactacttccagagaactaaatttttattgacaatggaaatcaaggtaaaccctggaatttttcctattccattctaactttaatggtttagatgactacagacatgttctcacagaccccacatatctttggatcctcctactaaaggtagggttagtaaatgtcccatccttgggacataatttactcagttgattaaaatactggtcttcgccagagttggtttggcagatctagctaaactgataggtttccttttctttctttcccatttgtgtctctctcacagattctctcaccatccaggaagaaacctgtctaagcaacgtggtcattcttccatcaaagccatcctaataattgctcttcccagtgggaactgcaaacagctacttttacatgaagttcccagaacttagtggtttccaaacaatagtactaccactgctcttgaaaataaaaacctcagtgagatcagggatgatcttaccttcttaaaattgtggtaaaggtgtttgttcacaggctaaaggaccatagctcattctctaagaatttcacctgattccaactctaccacatctgagtggtttctttctgagttttctgccttcctaacaattttgggtcttacttgatgataccaaccaaaacctaataagatttttcttgttctgtttcttcctgatatgtactgttggttagatcaaagatgaaaagattaaaaaggacaaagaacccaaagaagaagttaagagcttcatggatcgaaagaagggatttacagaagttaagtcgcagaatggagaattcatgacccacaaacttaaacatactgagaatactttcagccgccctggagggagggccagcgtggacaccaaggaggctgagggcgccccccaggtggaagccggcaaaaggctggaggagcttcgtcgtcgtcgcggggagaccgagagcgaagagttcgagaagctcaaacagaagcagcaggaggcggctttggagctggaggaactcaagaannnnnnnnnnnnnnnnnnnnnnnnnnnnnnnnnnnnnnnnnnnnnnnnnnnnnnnnnnnnngccgatcgaaaactcagagaggaggaagagaagaggaggctaaaggaagagattgaaaggcgaagagcagaagctgctgagaaacgccagaagatgccagaagatggcttgtcagatgacaagaaaccattcaagtgtttcactcctaaaggttcatctctcaagatagaagagcgagcagaatttttgaataagtctgtgcagaaaagcagtggtgtcaaatcgacccatcaagcagcaatagtctccaagattgacagcagactggagcagtataccagtgcaattgagggaacaaaaagcgcaaaacctacaaagccggcagcctcggatcttcctgttcctgctgaaagtgtacgcaacatcaagagtatgtgggagaaagggaatgtgttttcatcccccactgcagcaacacaccaaataagaaactgctggcttgaagtaggggtttctagccgcatcaatgaatggctaactaaaaccccagatggaaacaagtcacctgctcccaaaccttctgacttgagaccaggagacgtatccagcaagcggaacctctgggaaaagcaatctgtggataaggtcacttcccccactaaggagcctgtttctaaagaaacccatgctgtgaaatagagacttttctactgatcatcataactctgtatctgagcagtgataccaaccacatctgaagtcaacagaagatccaagtttaaaattgcctgcggaatgtgtgcagtatctagaaaaatgaaccgtagnnnnnnnnnnnnnnaaatacagaagtcatgttgtttctgcactttataataaagcatggaagaaattatcttagtaggcaattgtaacactttttgaaagtaacccatttcagatttgaaatactgcaataatggttgtctttnnnnnnnnnnnngaaatgtactgttaaggtattactttttttcatgctgatgattcatatctaaattacattattatgttagctgacagtggtactgattttttaggttggttgttttgtggatttctttagtagtgatagtagcctgaaccacattttagataactcaattatgtatgtatgtgcatacacatatacaaacacactaatggtagaatgcttttttatgtgctagactattatatttagtagtatgtcattgtaactagccaatatcacagcttttgaaaaattaaaaaatcacactatattaatatttcatatttgccaacagaaacatggcagataggtatcaatatgttttcaatgcctgatgacctataagaagaaagtattgaaaagaagagagattagaactgttagaaggagttgaaatttttc

SEQ ID NO: 184113 - DNA, 829 bp, Homo Sapiens
  misc_feature (607)..(634): n is a, c, g, or t
tttgtacaaaaaagttggctttttcttttctgtagcactcaggttcctcagctgtaaaattgaaaaatatatgtattaataatattattaataataataatggtaatgtagtacttgtttgtaaagcactttgagatccttggttgaaaggcaccataggagtgccaagtattattatgtggccaagggggttatttaaactgtcagttcccaaaggccaggaaaggttggggtcatttttcttaaagacgagctgtaaatatcaactaggcagccaatagtgttgactatgaagatgcaaaactattactaggctgataaaatcatagtttcttaatggctaccaataaggcaaatatcacaataataaacgccaaattccttagggcggactatttgacaaccacatggaaaactttgggggaggcatgaggggggaacatctcaaaatgccaatgtaaaatttaacttacagcaatattcaccagcagaaaatgtctttcatatggaatgatttcatgttgctaagaaaaagaattcaatttgtagtcctgatttgaatactagaatgttggctataatagttctgttcttacaacacatgaannnnnnnnnnnnnnnnnnnnnnnnnnnncatagtgcatgttcatttctactcacaaacatgttcttggtgtatttcttatgcaaacaatcttcaggcagcaaagatgtctgttacatctaaacttgaataataaagttttaccaccagttacacataacggcgttggtatggtttatatggattcactttcatccttctagcaataggaaatacagatcattg

SEQ ID NO: 184114 - DNA, 1223 bp, Homo Sapiens
  misc_feature (1099)..(1110): n is a, c, g, or t
gccatactgagactcttcagtttattaagaaaaatgtatttcctcaggcattttaaaatatatatacatttaatattttttggagctgtatctgcattggatcataatagattatgtgcacatgtgcaattataaacataatgtgctaccacaggcttcaactaagagctgttaaagatacttttctcccttctcattaatattaccttagaaaagaatccccatgcttgttttataaaaatctaccttcactaaaacagaacagtttagaacagaacatcattatcttaaaagttgattaaaaaaaatctcaatatgtcatgtagagagaattgggcatactcttttccttttgaattacagagttatcaattagagctctgtccttttctcatatacttggagtcatgtagtgtctctctcaatccacaacgttatgagatgggttggctctttatgatttttctatcccaaacaacagaatgaatacagaggtgagtgatgagagaaagagtgagaaaaggaagaatgagaacgcatgagctggtcctggcctaaagtttgatccaaagctcaatttagaatatagacaaataattttaaaatattttcagtttttaaatggcacacaattttagctggcacatcattttcatcacaggggaagccttttccaagagagaaaattcctaaatcatcatgaaattcctcattaaaaaaagttccgtaccataatagctcgtttaaaatcacaatttaagataaaataattcagaaatcttaaattaaaaaaataaattttataatatatcttgagagatggaataaaggctttaatatgtcaaaaaaggagtgtttagtgttataataaatttttgtctctttcaaaaaagcccaacctcttctccaccaaaatatgtataataatgaaagcaaaaaatgaaaataaaattatcaataataaagaagtatggaataagatctatcgtgtcaacgctatccaaaaatattctactaaaaagtagactgaccataaatattccaagaatagtgatatgtattttccaatgctagtcgttactactatgtctgtctgagnnnnnnnnnnnnttgaatgaaaataaaaaggcatacatgccaaaaataaagaacctatttgtgtccgacacactagagaaattgcttaatgagtagttttgcccaaaaagtaatacttgtcccaa

SEQ ID NO: 184115 - DNA, 2192 bp, Homo Sapiens
  misc_feature (423)..(432): n is a, c, g, or t
  misc_feature (638)..(653): n is a, c, g, or t
  misc_feature (786)..(804): n is a, c, g, or t
  misc_feature (936)..(944): n is a, c, g, or t
  misc_feature (1143)..(1168): n is a, c, g, or t
  misc_feature (1685)..(1695): n is a, c, g, or t
  misc_feature (1829)..(1882): n is a, c, g, or t
  misc_feature (1989)..(2049): n is a, c, g, or t
ttggtctaaggttacgttaccacagactgacagttggtatatgtaccagccaatcccttcattaaatgtatacagatttagttaagtagcattaaataggattcttagaagtatgtcctcatagaacttttaatacttaaggctttgtaaaaactatccatgaagggaaagctcctcagcataactgctcagggaaatagggctaaataactgaacattaaataattggttaaaggtgctgttagtcgagcctcaatgcttgctacaaggatgtatgtacaaggactgactttaataatttgcattatattgtcccaaccagtagtttattttttgccacggagatgtagaagatattacaagctactggatgcactgtcagattaacttatttcattaaagaagttgggagaacaaataggnnnnnnnnnncttatttttctagtaaatattaatgtattacatttcaaataatggtgcctgacatattgaataattattttctacagtgtacgtatgcaacaaagatattccatcatgcattagagtcagttctggctctgcctagctgtttacatttgcaaatgtagcaaacaaggtaatgaagcaactatttctattgcagtagatatcctttnnnnnnnnnnnnnnnncattaaagttgtaaacggtaacatgaaacaaatgaaagttcttgctataatggtatggaaaacaagaaggaaatgaaaatatttttatgcctacttaggaaaaaaagggtagcacttattcattccaagtacnnnnnnnnnnnnnnnnnnnaagctcttaactcacattgttatgcttaagatgataaacatatatcctctttttattgctttgtctatgtttcatatgaaacatttcagaaattattttgataagtgttgctggaatctgcaacgctgatgnnnnnnnnngcattctgtagtcgcatttgcactccatttttacattaattcgcagttgctttgtatcattgttttgtttgggttttgtttctttttcacagtgccgggtcttcgtttcttaaagttggatggcaggtagagttcaaccagttcgtgactgttgtagcgaatgaagttaaaaaaatgtctttctgatgttgtgttgtcnnnnnnnnnnnnnnnnnnnnnnnnnngcatattaaaaaaagagaaaagagaaagcaagagacagaaatcaggactaagtcctctgcttcagtttcattgttaacgggccttattctgatctcacctgtcgcgtagctctaatattcacataaactgaaataaagaagtggaatgaggagctttgacattcaaattatgtgatgtaatttatcttccttaggaattttgatggatgcatctcaaaatgtatagccagacttgagaggtgacaattaaagatctaaaaaagagaggagattcccccaaacaacaatatttaattttcttagtaaaaagaataacagaatgcatcgtggcaatccttaagcaacattatctatgtggactgcttaaatcagcaaaacaccagaagtttggttaacttgggcaatatgacaagtattactttttgggcaaaactactcattaagcaatttctctagtgtgtcggacacaaataggttctttatttttggcatgtatgcctttttattttcattcaannnnnnnnnnnctcagacagacatagtagtaacgactagcattggaaaatacatatcactattcttggaatatttatggtcagtctactttttagtagaatatttttggatagcgttgacacgatagatcttattccatacttcnnnnnnnnnnnnnnnnnnnnnnnnnnnnnnnnnnnnnnnnnnnnnnnnnnnnnnggtggagaagaggttgggcttttttgaaagagacaaaaatttattataacactaaacactccttttttgacatattaaagcctttattccatctctcaagatatatnnnnnnnnnnnnnnnnnnnnnnnnnnnnnnnnnnnnnnnnnnnnnnnnnnnnnnnnnnnnnaacgagctattatggtacgggaactttttttaatgaggaatttcatgatgatttagaattttctctcttggaaaaggcttcccctgtgatgaaaatgatgtgccagctaaaattgtgtgccatttaaaaactgaaaatatttt

SEQ ID NO: 184116 - DNA, 1164 bp, Homo Sapiens
  misc_feature (256)..(265): n is a, c, g, or t
  misc_feature (471)..(486): n is a, c, g, or t
  misc_feature (619)..(637): n is a, c, g, or t
  misc_feature (951)..(1001): n is a, c, g, or t
ttggctcctcagcataactgctcagggaaatagggctaaataactgaacattaaataattggttaaaggtgctgttagtcgagcctcaatgcttgctacaaggatgtatgtacaaggactgactttaataatttgcattatattgtcccaaccagtagtttattttttgccacggagatgtagaagatattacaagctactggatgcactgtcagattaacttatttcattaaagaagttgggagaacaaataggnnnnnnnnnncttatttttctagtaaatattaatgtattacatttcaaataatggtgcctgacatattgaataattattttctacagtgtacgtatgcaacaaagatattccatcatgcattagagtcagttctggctctgcctagctgtttacatttgcaaatgtagcaaacaaggtaatgaagcaactatttctattgcagtagatatcctttnnnnnnnnnnnnnnnncattaaagttgtaaacggtaacatgaaacaaatgaaagttcttgctataatggtatggaaaacaagaaggaaatgaaaatatttttatgcctacttaggaaaaaaagggtagcacttattcattccaagtacnnnnnnnnnnnnnnnnnnnaagctcttaactcacattgttatgcttaagatgataaacatatatcctctttttattgctttgtctatgtttcatatgaaacatttcagaaattattttgataagtgttgctggaatctgcaacgctgatgttttttttgcattctgtagtcgcatttgcactccatttttacattaattcgcagttgctttgtatcattgttttgtttgggttttgtttctttttcacagtgccgggtcttcgtttcttaaagttggatggcaggtagagttcaaccagttcgtgactgttgtagcgaatgaagttaaaaaannnnnnnnnnnnnnnnnnnnnnnnnnnnnnnnnnnnnnnnnnnnnnnnnnncatattaaaaaaagagaaaagagaaagcaagagacagaaatcaggactaagtcctctgcttcagtttcattgttaacgggccttattctgatctcacctgtcgcgtagctctaatattcacataaactgaaataaagaagtggaatgaggagctttgacattc

SEQ ID NO: 184117 - DNA, 1442 bp, Homo Sapiens
  misc_feature (1295)..(1310): n is a, c, g, or t
actttgtacaaaaaagttggcaaaacccatacattagtaagcctaaatttataatgatcatgaaaccctaggcagaggaggagaaattgaaggtccagggcaatgaaagaaaaatggcgccctctcaatttagtcttctctcattggccatgtttcagattttgacctaaaaatgcgagctgtggttaggcttggttagagtgcagcaagcaacatgacagatggtggcacgctgtttttacccagccctgcctgtacatacacatgcacaccctctctgatatttttgtcctttagatgttcaaatactcagtagtccttttgtttgcggtttagattcattttgtccacacatgtacccattttaaaaaacaatgtcctcgatgcttctgtagtgatttcattttagccaggtatttctttcttgtgtgtgatgaaccagtatggatttgcttttctaagcctcctgttggttactaatctcacttggcacattataactaaaggaatcccctcaattcaaaagcatagatggatacaaatgtcagaccgtgggtttaatttgtttagaacacatggcatttcttcacaaggtaacctgctgtatttatttattttcttttggttaaatataatttccaaactttgtggtcaggcagcgtctaaggttacgttaccacagactgacagttggtatatgtaccagccaatcccttcattaaatgtatacagatttagttaagtagcattaaataggattcttagaagtatgtcctcatagaacttttaatacttaaggctttgtaaaaactatccatgaagggaaagctcctcagcataactgctcagggaaatagggctaaataactgaacattaaataattggttaaaggtgctgttagtcgagcctcaatgcttgctacaaggatgtatgtacaaggactgactttaataatttgcattatattgtcccaaccagtagtttattttttgccacggagatgtagaagatattacaagctactggatgcactgtcagattaacttatttcattaaagaagttgggagaacaaataggaaaaacaaaacttatttttctagtaaatattaatgtattacatttcaaataatggtgcctgacatattgaataattattttctacagtgtacgtatgcaacaaagatattccatcatgcattagagtcagttctggctctgcctagctgtttacatttgcaaatgtagcaaacaaggtaatgaagcaactatttctattgcagtagatatcctttnnnnnnnnnnnnnnnncattaaagttgtaaacggtaacatgaaacaaatgaaagttcttgctataatggtatgggaaaacaagagggaaatgaaaatatttttatgcctacttaggaaaaaagggtagcacttattcattccaagtac

SEQ ID NO: 184118 - DNA, 1621 bp, Homo Sapiens
  misc_feature (120)..(178): n is a, c, g, or t
  misc_feature (1175)..(1196): n is a, c, g, or t
ttggatattttggtggagaagaggttgggcttttttgaaagagacaaaaatttattataacactaaacactccttttttgacatattaaagcctttattccatctctcaagatatattannnnnnnnnnnnnnnnnnnnnnnnnnnnnnnnnnnnnnnnnnnnnnnnnnnnnnnnnnnaacgagctattatggtacggaactttttttaatgaggaatttcatgatgatttaggaattttctctcttggaaaaggcttcccctgtgatgaaaatgatgtgccagctaaaattgtgtgccatttaaaaactgaaaatattttaaaattatttgtctatattctaaattgagctttggatcaaactttaggccaggaccagctcatgcgttctcattcttccttttctcactctttctctcatcactcacctctgtattcattctgttgtttgggatagaaaaatcataaagagccaacccatctcagaacgttgtggattgagagagacactacatgactccaagtatatgagaaaaggacagagctctaattgataactctgtagttcaaaaggaaaagagtatgcccaattctctctacatgacatattgagattttttttaatcaacttttaagatagtgatgttctgttctaaactgttctgttttagtgaaggtagatttttataaaacaagcatggggattcttttctaaggtaatattaatgagaagggaaaaaagtatctttaacagctctttgttgaagcctgtggtagcacattatgtttataattgcacatgtgcacataatctattatgatccaatgcaaatacagctccaaaaatattaaatgtatatatattttaaaatgcctgaggaaatacatttttcttaataaactgaagagtctcagtatggctattaaaataattattagcctcctgttgtgtggctgcaaaacatcacaaagtgaccggtcttgagacctgtgaactgctgccctgtttagtaaataaaattaatgcatttctagagggggaatatctgccatccagtggtggaaatgtggagtaaagaagctggtggtctgcttctgtgctgtatgccagccttttgccttaagttgagaggaggtcaactttagctactgtctttggtttgagagccatggcnnnnnnnnnnnnnnnnnnnnnngatcaagtcgtctttggtgagccagtaaggtgaaagcttgctgactgtccaaggcacaagagaaaattgaggaattgaaatgcaacctgagtatcaaactaaatattctaatcaaaggtaggtactgttaggtggaattctatcagcaggcaactgcaaatgagaagaagatagaaggacgcccgtcgggactttggagggcattgttattttcccaaagaaagacggccaagggcagaggcatggattctttgcagagcacttccttttggtttttcagtactgtttcatagacagtgggctcacatgttcctgatagtgctgcagttgcttagaaagcatcccagttaattgcagtaattagaacttctggaatatgctaaggcagaagtatgtcaagtatgtcacatgaagaaatgtgaaat

SEQ ID NO: 184119 - DNA, 1274 bp, Homo Sapiens
  misc_feature (276)..(298): n is a, c, g, or t
  misc_feature (929)..(948): n is a, c, g, or t
  misc_feature (956)..(1013): n is a, c, g, or t
ttgggaagagtctccgtatggctattaaaataattattagcctcctgttgtgtggctgcaaaacatcacaaagtgaccggtcttgagacctgtgaactgctgccctgtttagtaaataaaattaatgcatttctagagggggaatatctgccatccagtggtggaaatgtggagtaaagaagctggtggtctgcttctgtgctgtatgccagccttttgccttaagttgagaggaggtcaactttagctactgtctttggtttgagagccatggcnnnnnnnnnnnnnnnnnnnnnnngatcaagtcgtctttggtgagccagtaaggtgaaagcttgctgactgtccaaggcacaagagaaaattgaggaattgaaatgcaacctgagtatcaaactaaatattctaatcaaaggtaggtactgttaggtggaattctatcagcaggcaactgcaaatgagaagaagatagaaggacgcccgtcgggactttggagggcattgttattttcccaaagaaagacggccaagggcagaggcatggattctttgcagagcacttccttttggtttttcagtactgtttcatagacagtgggctcacatgttcctgatagtgctgcagttgcttagaaagcatcccagttaattgcagtaattagaacttctggaatatgctagggcagaagtatgtcaagtatgtcacatgaagaaaatgtgaaattcaagagtaatccacacgtgagaaactagacaatgtacattcatgtgttctcttgaaaggaaagggagagctgtaagcttcactctgtcctacaccggagaaaagcaggaataactttaccgtggaaataatgtttagcttttatcagagaaaattgtccttctagagcatagagtcccaaaactcaattctggttttcccctgnnnnnnnnnnnnnnnnnnnncccaacannnnnnnnnnnnnnnnnnnnnnnnnnnnnnnnnnnnnnnnnnnnnnnnnnnnnnnnnntgaaaaatatatgtattaataatattattaataataataatggtaatgtagtacttgtttgtaaagcactttgagatccttggttgaaaggcaccataggagtgccaagtattattatgtggcccaagggggttatttaaactgtcagttcccaaagggccagggaaaggttggggtcatttttcttaaaacgagctgtaatatcaactatgcacccaatagtgttgactatgaaatgcaaaactattactaggctgataa

SEQ ID NO: 184120 - DNA, 4897 bp, Homo Sapiens
ctttccccaagtatgccagggttgtgaataaatacagggtttgtatgggaagatgaagcgtttcctatgtacagatcagctctcaaaatgtcttctgtgtcttctgagcgtcttctaagacaattgcattagcctcctgctagttgactaatagaattaataattgtaaaaagcactctaaagccacatgccttatgaagtcaatgctgggtatgattttacaaatatggtccggaaaaagaacccccctctgagaaacgttgcaagtgaaggcgagggccagatcctggagcctataggtacagaaagcaaggtatctggaaagaacaaagaattttctgcagatcagatgtcagaaaatacggatcagagtgatgctgcagaactaaatcataaggaggaacatagcttgcatgttcaagatccatcttctagcagtaagaaggacttgaaaagcgcagttctgagtgagaaggctggcttcaattatgaaagccccagtaagggaggaaactttccctcctttccgcatgatgaggtgacagacagaaatatgttggctttctcatctccagctgctgggggagtctgtgagcccttgaagtctccgcaaagagcagaggcagatgaccctcaagatatggcctgcaccccctcaggggactcactggagacaaaggaagatcagaagatgtcaccaaaggctacagaggaaacagggcaagcacagagtggtcaagccaattgtcaaggtttgagcccagtttcagtggcctcaaaaaacccacaagtgccttcagatgggggtgtaagactgaataaatccaaaactgacttactggtgaatgacaacccagacccggcacctctgtctccagagcttcaggactttaaatgcaatatctgtggatatggttactacggcaacgaccccacagatctgattaagcacttccgaaagtatcacttaggactgcataaccgcaccaggcaagatgctgagctggacagcaaaatcttggcccttcataacatggtgcagttcagccattccaaagacttccagaaggtcaaccgttctgtgttttctggtgtgctgcaggacatcaattcttcaaggcctgttttactaaatgggacctatgatgtgcaggtgacttccggtggaacattcattggcattggacggaaaacaccaaattgccaagggaacaccaagtatttccgctgtaaattctgcaatttcacttatatggggcaactcatccacccgaattagaacaacatttttcttcagactcacccaaacaaaataaaagcttctctcccctcctctgaggttgcaaaacctacagagaaaaactctaacaagaccatccctgcacttcaatccagtgattctggagacttgggaaaatggcaggacaagataacagtcaatgcaggaaatgacactcctgttgggtactcagtgcccataaagcccctcgattcctctagacaaaatggtacagaggccaccagttactactggtgtaaattttgtagtttcagctgtgagtcatctagctcacttaaactgctagaacattatggcaagcagcacggagcagtgcagtcaggcggccttaatccagagttaaatgataagctttccaggggctctgtcattaatcagaatgatctagccaaaagttcagaaggagagacaatgaccaagacagacaagagctcgagtggggctaaaaagaaggacttctccagcaagggagccgaggataatatggtaacgagctataattgtcagttctgtgacttccgatattccaaaagccatggccctgatgtaattgtagtggggccacttctccgtcattatcaacagctccataacattcacaagtgtaccattaaacactgtccattctgtcccagaggactttgcagcccagaaaagcaccttggagaaattacttatccgtttgcttgtagaaaaagtaattgttcccactgtgcactcttgcttctgcacttgtctcctggggcggctggaagctcgcgagtcaaacatcagtgccatcagtgttcattcaccacccctgacgtagatgtactcctctttcactatgaaagtgtgcatgagtcccaagcatcggatgtcaaacaagaagcaaatcacctgcaaggatcggatgggcagcagtctgtcaaggaaagcaaagaacactcatgtaccaaatgtgattttattacccaagtggaagaagagatttcccgacactacaggagagcacacagctgctacaaatgccgtcagtgcagttttacagctgccgatactcagtcactactggagcacttcaacactgttcactgccaggaacaggacatcactacagccaacggcgaagaggacggtcatgccatatccaccatcaaagaggagcccaaaattgacttcagggtctacaatctgctaactccagactctaaaatgggagagccagtttctgagagtgtggtgaagagagagaagctggaagagaaggacgggctcaaagagaaagtttggaccgagagttccagtgatgaccttcgcaatgtgacttggagaggggcagacatcctgcgggggagtccgtcatacacccaagcaagcctggggctgctgacgcctgtgtctggcacccaagagcagacaaagactctaagggatagtcccaatgtggaggccgcccatctggcgcgacctatttatggcttggctgtggaaaccaagggattcctgcagggggcgccagctggcggagagaagtctggggccctcccccagcagtatcctgcatcgggagaaaacaagtccaaggatgaatcccagtccctgttacggaggcgtagaggctccggtgttttttgtgccaattgcctgaccacaaagacctctctctggcgaaagaatgcaaatggcggatatgtatgcaacgcgtgtggcctctaccagaagcttcactcgactcccaggcctttaaacatcattaaacaaaacaacggtgagcagattattaggaggagaacaagaaagcgccttaacccagaggcacttcaggctgagcagctcaacaaacagcagaggggcagcaatgaggagcaagtcaatggaagcccgttagagaggaggtcagaagatcatctaactgaaagtcaccagagagaaattccactccccagcctaagtaaatacgaagcccagggttcattgactaaaagccattctgctcagcagccagtcctggtcagccaaactctggatattcacaaaaggatgcaacctttgcacattcagataaaaagtcctcaggaaagtactggagatccaggaaatagttcatccgtatctgaagggaaaggaagttctgagagaggcagtcctatagaaaagtacatgagacctgcgaaacacccaaattattcaccaccaggcagccctattgaaaagtaccagtacccactttttggacttccctttgtacataatgacttccagagtgaagctgattggctgcggttctggagtaaatataagctctccgttcctgggaatccgcactacttgagtcacgtgcctggcctaccaaatccttgccaaaactatgtgccttatcccaccttcaatctgcctcctcatttttcagctgttggatcagacaatgacattcctctagatttggcgatcaagcattccagacctgggccaactgcaaacggtgcctccaaggagaaaacgaaggcaccaccaaatgtaaaaaatgaaggtcccttgaatgtagtaaaaacagagaaagttgatagaagtactcaagatgaactttcaacaaaatgtgtgcactgtggcattgtctttctggatgaagtgatgtatgctttgcatatgagttgccatggtgacagtggacctttccagtgcagcatatgccagcatctttgcacggacaaatatgacttcacaacacatatccagaggggcctgcataggaacaatgcacaagtggaaaaaaatggaaaacctaaagagtaaaaccttagcacttagcacaattaaatagaaataggttttcttgatgggaattcaatagcttgtaatgtcttatgaagacctattaaaaaaatacttcatagagcctgccttatccaacatgaaattcccttcttttgttattctttcttttgatgagtaggttaccaagattaaaaagtgagataaatggtcaatgagaaagaatggaagatggtaaacaatcactttttaaaacctgttaagtcaaaaccatcttggctaatatgtactggggaaataatccataagagatatcaccagactagaattaatatatttataaagaaagagaccaaaactgtctagaatttgaaagggtttacatattattatactaaagcagtactggactggccattggaccatttgttccaaaacccataaattgttgcctaaatttataatgatcatgaaaccctaggcagaggaggagaaattgaaggtccagggcaatgaaagaaaaatggcgccctctcaatttagtcttctctcattggccatgtttcagattttgacctagaaatgcgagctgtggttaggcttggttagagtgcagcaagcaacatgacagatggtggcacgctgtttttacccagccctgcctgtacatacacatgcacaccctctctgatatttttgtcctttagatgttcaaatactcagtagtccttttgtttgcggtttagattcattttgtccacacatgtacccattttaaaaacaatgtcctcgatgcttctgtagtgatttcattttagccaggtatttctttcttgtgtgtga

SEQ ID NO: 184121 - DNA, 1484 bp, Homo Sapiens
  misc_feature (416)..(427): n is a, c, g, or t
  misc_feature (775)..(802): n is a, c, g, or t
  misc_feature (964)..(1009): n is a, c, g, or t
  misc_feature (1177)..(1196): n is a, c, g, or t
ttggctggtaacataaaagcagttcagtggcccagaggttatttttttcctattgctctgaagactgcactggttgctgcaaagctcaggcctgaatgagcaggaaacaaaaaaggccttgcgacccagctgccataaccaccttagaactaccagacgagcacatcagaaccctttgacagccatcccaggtctaaagccacaagtttcttttctatacagtcacaactgcagtaggcagtgaggaagccagagaaatgcgatagcggcatttctctaaagcgggttattaaggatatatacagttacactttttgctgcttttattttcttccaagccaatcaatcagccagttcctagcagagtcagcacatgaacaagatctaagtcatttcttgatgtgagcactggagcnnnnnnnnnnnnacaacgtgacaggaagaggagggagagggtgacgaacaccaggcatttccaggggctatatttcactgtttgttgttgctctgttctgttatattgttggttgttcatagtttttgttgaagctctagcttaagaagaaactttttttaaaaagactgtttggggattcttgtgccttattatatactgattctacaaaatagaaactacttcattttaattgtatattattcgagcacctttgttgaagctcaaaaaaaatgatgcctctttaaactttagcaattataggagtatttatgtaactatcttatgcttcaaaaaacaaaagtatttgtgtgcatgtgnnnnnnnnnnnnnnnnnnnnnnnnnnnnttatacacatacaatttatgttttcctgttgaatgtatttttatgagattttaaccagaacaaaggcagataaacaggcattccatagcagtgcttttgatcacttacaaattttttgaataacacaaaatctcattctacctgcagtttaattggaaagannnnnnnnnnnnnnnnnnnnnnnnnnnnnnnnnnnnnnnnnnnnnncgcgcgcacgcacgccttgagcagtcagcattgcacctgctatggagaagggtattcctttattaaaatcttcctcatttggatttgctttcagttggttttcaatttgctcactggccagagacattgatggcagttcttatctgcatcactaatcagctcctggannnnnnnnnnnnnnnnnnnncaaacaatggtttgaaacaactactggaatattgtccacaataagctggaagtttgttgtagtatgcctcaaatataactgactgtatactatagtggtaacttttcaaacagcccttagcacttttatactaattaacccatttgtgcattgagttttcttttaaaaatgcttgttgtgaaagacacagatacccagtatgcttaacgtgaaaagaaaatgtgttctgttttgtaaaggaactctcaagtattgttgtaaatacttggacagaggttgctgaacttt

SEQ ID NO: 184122 - DNA, 1745 bp, Homo Sapiens
  misc_feature (905)..(923): n is a, c, g, or t
ttggcttacagatgtgaagaatgcgacaaagttttcagtcgcaaatcacatcttgaaagacataggaggattcatactggagagaaaccatacaaatgtaaggtttgtgacaaggctttccggagtgattcacgtcttgcagaacatcagagagttcatactggagagagaccttacacatgtaatgaatgtggcaaggtttttagtacaaaagcatacctcgcatgtcatcaaaaacttcatactggagagaaactttacgaatgtgaagaatgtgacaaagtttacattcgcaaatcacaccttgaaagacataggaggattcatacaggagagaaacctcacaagtgtggtgattgtggtaaagcctttaattcaccttcacaccttattaggcatcagagaatccatactggacagaaatcttacaaatgtcatcagtgtggcaaggtctttagtctgaggtcactccttgcagaacatcagaaaattccttttggagacaattgtttcaagtgcaatgagtatagcaaaccatcaagcattaattgacatcagagtcaaatcagcattgacctgagtttgagttgacttaacattgatttcaagcattaatcgacattaaactgtttatgttaagaggattgggccaccacacctggcctgttttttgtttctttaacaaaaagttatagaaatttctctgggtattgtgttgaatctacatcacattcagttataatcatttagcaatattattccattcaatatggcttgtatctcttatttgcacatgtttttatcactttgatcaatgtttgtagatttgaaggtagaaacttctcaacttttttcatttattcctaagtatttcttactttaagttctttagcaaatgaaagtgnnnnnnnnnnnnnnnnnnnaaattgtttattgttaatgtatggaaattcaactaatttttggtgctgttattctattcttcaaatccactgcatatgttttttagttccagttgcattttggttgactctttgtgattttctacacagaagatcatgtcatctacaaagaaatagttttacttctttctttctgatttggatgagtttgatttcttttgctatttcattgctctagctaggacagccagtattgattgaatagaaggggtgagagcattcttgcatcatgtgagatcctacaggaaaagcattccattttccctgactggttatttctgctgtggtcatttcatggatggtctttgtattgttgaggtaaatttccttctctttctattttgtttaggatttccatgatgactggatgttgaattttgtgaaatgctttttctccatgtattgagatgatgtggttttcatctttcattatgttcaagtggtatatcacattgatttgcttgactatgttgaaccattttgcatcccagaaataagtggcacttgcatatcaacaatcctttttataacctcttgaatacagttcgctagtacaaggggtcttcaggaagttcatggaaaaatacatattatgagaaaattgtgcatgatatcacattttttgcaccaagataaactggtacaaatccgttataacatgtctgaacagggtttggtttgaggcactcagatgggtaagacatgagtttgaaaagagactcaatcaaggcaatgtaaattctgctaaaactgaaacaagaagaaacatcaaatttgcgatga

SEQ ID NO: 184123 - DNA, 1359 bp, Homo Sapiens
ttggtggagagaaaccttacaagtgtaatgagtgtggcaagaccttcagtcagatgtcaaaccttgtataccatcatagacttcatagtggagagaaaccttaaaagtgtaatgagtgtggcaagaccttcagtcagatgtcaaagcttgtataccatcatagacttcatagtggagagaaaccttaaaagtgtaatgagtgtggcaacaccttccatcacaattcaacccttgtaagtcacaaagccattcatactggagagaaactttacaagtgtaatgaatgtggcaaggtttttaatcaaaagacaacccttgcacgtcatcatagaattcatactgcagagaaactttacaaataggaagaatgtgacaaagttttcggttgcaaatcaaaccttgaaacacataagaaaatgcatactgaagagaaaccacacagatgtaaggtttatgacaagatttttgaatataattcatacctggcaaaacatattagaattcaaactggagagaaaccttacaaatgtgatgagtgtggcaacacctttggtcaaaattcacaccttgtaattcaaaaggcaattcgtactggagagaaaccctacaagtgtaatgaatgtggcatagtttttaatcaacagtcacaccttgcaagtcatcatagtcttcatactgcagagaaatcttacaaatgtgaagactgtgacaaagttgtcagtcacaaatcacagcttgaaagacaggagaattcatactggagaaaaaacatacaaatgtaaggtttgtaacaaggcttttgggagtgattcacacctggcacaccatactagaattcacactggagagaaaccttacaagtgcaatgagtgtggcaaagcctttagtgggcagtcaccacttattcaccatcaagcaatccatagtatagggaaacttgactaatataatgattgtcacaaagttttcagtaatgctacaaccatttcaaatcattggagaatccataatgagagatcttacaagtgtaataaatgtgacagatttttcagatatcgttcatatattgctattcatcatcgaactcatgctggagagaaaccttataaatgtcatgattgtggcaaggtcttcagtcaagtttcatcctatgcaaaacataggattcatacaggagagaaactcacaagtgtgatgattgtggcaaagcgtttacttcacattcacacctcaatagacatcagagaatccatgctggacagaaatcttacaaatgtcatcagtgtggtaaggtcttcagtccgagatcactccttgcagaccatcagacaattccttttggagacagttgtttcaaat

SEQ ID NO: 184124 - DNA, 1526 bp, Homo Sapiens
  misc_feature (314)..(412): n is a, c, g, or t
gaatttccatactttgacaataaccatttttaaagaaaattttaaaacactttccatttggctggagaacttaaagaaatacttagaaataaacgtacaaaggtcagaaagtttgtaccttgaaatctacaaacattgatcaaaatgattaaaaacattgagctacaaccccatattgatagcttggaaaaattaatattgtgaaatgattatataataacccaatgtgatttagattcaacatgatatccataaaaatccctatcagtttttttaaagaaacaaaaaacaggctgggaaaatggctcacgtcnnnnnnnnnnnnnnnnnnnnnnnnnnnnnnnnnnnnnnnnnnnnnnnnnnnnnnnnnnnnnnnnnnnnnnnnnnnnnnnnnnnnnnnnnnnnnnnnnnncaatcctcttaacataaacactaatgtcaattaatgcttgaactcaatgttaagtcaatacaaactcaagtcaatgctgaattgaccctaatgtcaattaatgcttgatggtttgctctactcattgcatatggaccaactacctccaaaatgaattttctcatattctgcaaggagtgaactcagactgaagaccttggcacattgatgacatttgtaagatttctgtccagtatgcattctctgatgtctcatgaggtgtgaagtgaaggctttgccactatcatcacacatgtgaggtttctctcctgtatgaattctcctatgttttgcataggatgaagcttgactgaagaccttgccacagtcatgacatttgtaaggtttctctccagcgttgagttcaccgatgaactgcaaggtatgaacaatgtctgaaaaatctgccacatttattaccctagtatgatctctcttccttatggattctccagtgattcacaatggttgtagcattactgaagactttgtgacaatcattaccttagtaaagtttccctacaccatggattgcctgacggtaaacaagtgttgactgcctactaaaggctttgccacacccattacactggtaaggtttctctccagtgtgaattctagcatgttgtgccaggtgcgaatcatgcccaaaagccttgtcacaaactcttacatttttatggtttctctccagtgtgaattctcctgtctttcacggtttgatgtgcgactgtaaactttgtgacattcttcacatttataagctttctctccagtatgaattctcctgtcttctgaggcttgatttgccactgtaaactttatcacatgcttcacatttctaaggtttctccccagtatgaattctatgatgacctgcaaggtgtgcttgttgattaaaaacctcaccacattcattacacttgtttttctccagtatgaagtctacgatggcatgtaaggtttgacttctgactaaaggtcttgccacactcattacacttgtaaggtttctctccagtaagaagtctatggtggcatataagggatgacttctgactaaagttcttgccaa

SEQ ID NO: 184125 - DNA, 1386 bp, Homo Sapiens
  misc_feature (1131)..(1149): n is a, c, g, or t
ttggggcaaggtttttaatcgaaaagcaaaacttgcacgtcatcatagaattcatactggaaagaaacattagaaatatgaagaatgtgacaaagtttacagttgtaaatcaagtcttgaaagacaggagaattcatactggagagaaagcttacaaatgtaagagtttgtgacaagaatcttgggcgtgattcacacctggcccaacaaactagaagtcacactggagagaaaccttacaagtgtactgagtgtggcaaagcctttagtgggcagtcaacacttattcaccatcaggcaatccatggtatagggaaactttactaatgtaatgattatcacaaagtcttcagtaacactacaaccgtttcaaatcattggagaatccataatgagagattttgaaagtgtaataaatgtggcaaatttttcagacattgttcataccttgcagttcatcggtgaactcatgctggagagaaaccttacaaatgtcatgattgtggcaaggtcttcagtctagcttcatcttatgcaaaacaggagacttcatacaggagacaaacttcacaagtatgatgattgcagcaaagcctttacttcacgttcacacctaattagacatcagagaatccatactggacagaaatcttacaaatgtcatcagtgtggcaaggtcttcagtctgagatcaccccttaaggaacatcagaaaattcatttttgagatgattgtttcaaatgcaatgagtatagcaaaccatcaagcattaattgacatcagagtcaaatcagcattgacctgagtttgagttgacttaacattgatttcaagcattaatcgacattaaactgtttatgttaagaggattgggccaccacacctggcctgttttttgtttctttaacaaaaagttatagaaatttctctgggtattgtgttgaatctacatcacattcagttataatcatttagcaatattattccattcaatatggcttgtatctcttatttgcacatgtttttatcactttgatcaatgtttgtagatttgaaggtagaaacttctcaacttttttcatttattcctaagtatttcttactttaagttctttagcaaatgaaagtgnnnnnnnnnnnnnnnnnnnaaattgtttattgttaatgtatggaaattcaactaatttttggtgctgttattctattcttcaaatccactgcatatgttttttaattccagttgcattttggttgactctttgtgattttctacacagaggatcatgtcatctacaaagaaatagttttacttctttctttctgatttggatgagtttgatttcttttgctatttcattgctctagctaggacagccagtattgat

SEQ ID NO: 184126 - DNA, 1210 bp, Homo Sapiens
ttgggtgtcttgttgcgggcaccgcagtcgccgtgaagatggcgtctaccagccgtttggatgctcttccaagagtcacatgtccaaaccatccagatgcgattttagtggaggactacagagccggtgatatgatctgtcctgaatgtggcttggttgtagggcacaggagctgcaagttttgacgaatttggcaattctaagtaccagaatcggagaacaatgagcagttctgatcgggcaatgatgaatgcattcaaagaaatcactaccatggcagacagaatcaatctacctcgaaatatagttgatcgaacaaataatttattcaagcaagtatatgaacagaagagcctgaagggaagagctaatgatgctatagcttctgcttgtctctatattgcctgtagacaagaaggggttcctaggacatttaaagaaatatgtgccgtatcacgaatttctaagaaagaaattggtcggtgttttaaacttattttgaaagcgctagaaaccagtgtggatttgattacaactggggacttcatgtccaggttctgttccaacctttgtcttcctaaacaagtacagatggcagctacacatatagcccgtaaagctgtggaattggacttggttcctgggaggagccccatctctgtggcagcggcagctatttacatggcctcacaggcatcagctgaaaagaggacccaaaaagaaattggagatattgctggtgttgctgatgttacaatcagacagtcctatagactgatctatcctcgagccccagatctgtttcctacagacttcaaatttgacaccccagtggacaaactaccacagctataaattgaggcagctaacgtcaaattcttgaatacaaaactttgcctgttgtacatagcctatacaaaatgctgggttgagcctttcatgaggaaaaacaaaagacatggtacgcattccagggctgaatactattgcttggcattctgtatgtatatactagtgaaacatatttaatgatttaaatttcttatcaaatttcttttgtagcaatctaggaaactgtattttggaagatatttgaaattatgtaattcttgaataaaacatttttcaaactcaagtttttggtaatgttacatgtaacttatgatacataattacaaataatgcaaatcattgcagctaataaagctga

SEQ ID NO: 184127 - DNA, 1009 bp, Homo Sapiens
  misc_feature (272)..(285): n is a, c, g, or t
cagaataaaaacaattaagctcaaagtacatgtttcactataatagacaccatattcatgaacctgggtttggttttggcaacacataattttggtttagaagtgaacaatgaaaacggatgtttcacattcaatatcctagtctttaaaaacctatgttaaaggacagcacagtctttcaaaggaagaaaactatgtaagctttattttaacagtggaagttaaactaaaccttgatctgcctaattgctgacatctatataaattactannnnnnnnnnnnnnttaatttttgactatttttggaccatctttattccacaggaaaattgtgatttctgcaaaagcagctgcaaagtaccacacatagcagaaagacagaaatttatactggggggttggaagatatggctactgagtctgtaattccatttggaggttcaaaaaaccatttttacattgctattatttgtacagaccaagggacctaaattttgaaacagctagacagtgatataaacaaacatttatctctgggggtagaaaattaattataatacaagaatgaaaatgggcaaacagtatggaaggcacccacacctcctagcaccctttggttttctgatggagttctcacttcacacatcagtgcattggattgcagaaaatattgatattttatttcatcaaaagtgccatttggtatgccactattgaaagcttatcgctgtctttttctccttcagcaagtagaggtcaatgaagcagggtgtgttagttacgcaaattcctataaggcactttacggttttcatattggacagtgaggtacacaggatatatttctagggttcgttgctgttaacaaaaagaagaagaagtagcaccatgttgtgacattagctgagtcaggcttcattatgttcttctcatacagacttggcagcggctgacgtgcgtgcgcagctcccctgcttttggaaggtggacccaacttttttgtacaaag

SEQ ID NO: 184128 - DNA, 881 bp, Homo Sapiens
ttgggagatcaagggaaaccctggagagaagggagaaaaaggaagcattgggatcccaggaatgccagggtccccaggccttaaagggtctcccgggagtgttggctatccaggaagtcctgggctacctggagaaaaaggtgacaaaggcctcccaggattggatggcatccctggtgtcaaaggagaagcaggtcttcctgggactcctggccccacaggcccagctggccagaaaggggagccaggcagtgatggaatcccggggtcagcaggagagaagggtgaaccaggtctaccaggaagaggattcccagggtttccaggggccaaaggagacaaaggttcaaagggtgaggtgggtttcccaggattagccgggagcccaggaattcctggatccaaaggagagcaaggattcatgggtcctccggggccccagggacagccggggttaccgggatccccaggccatgccacggaggggcccaaaggagaccgcggacctcagggccagcctggcctgccaggacttccgggacccatggggcctccagggcttcctgggattgatggagttaaaggtgacaaaggaaatccaggctggccaggagcacccggtgtcccagggcccaagggagaccctggattccagggcatgcctggtattggtggctctccaggaatcacaggctctaagggtgatatggggcctccaggagttccaggatttcaaggtccaaaaggtcttcctggcctccagggaattaaaggtgatcaaggcgatcaaggcgtcccgggagctaaaggtctcccgggtcctcctggccccccaggtccttacgacatcatcaaaggggagcccgggctctctggtcctg

SEQ ID NO: 184129 - DNA, 2700 bp, Homo Sapiens
  misc_feature (2313)..(2326): n is a, c, g, or t
agccaactttgtacaaaaaagttggcaaaggcctcccaggattggatggcatccctggtgtcaaaggagaagcaggtcttcctgggactcctggccccacaggcccagctggccagaaaggggagccaggcagtgatggaatcccggggtcagcaggagagaagggtgaaccaggtctaccaggaagaggattcccagggtttccaggggccaaaggagacaaaggttcaaagggtgaggtgggtttcccaggattagccgggagcccaggaattcctggatccaaaggagagcaaggattcatgggtcctccggggccccagggacagccggggttaccgggatccccaggccatgccacggaggggcccaaaggagaccgcggacctcagggccagcctggcctgccaggacttccgggacccatggggcctccagggcttcctgggattgatggagttaaaggtgacaaaggaaatccaggctggccaggagcacccggtgtcccagggcccaagggagaccctggattccagggcatgcctggtattggtggctctccaggaatcacaggctctaagggtgatatggggcctccaggagttccaggatttcaaggtccaaaaggtcttcctggcctccagggaattaaaggtgatcaaggcgatcaaggcgtcccgggagctaaaggtctcccgggtcctcctggccccccaggtccttacgacatcatcaaaggggagcccgggctccctggtcctgagggccccccagggctgaaagggcttcagggactgccaggcccgaaaggccagcaaggtgttacaggattggtgggtatacctggacctccaggtattcctgggtttgacggtgcccctggccagaaaggagagatgggacctgccgggcctactggtccaagaggatttccaggtccaccaggccccgatgggttgccaggatccatggggcccccaggcaccccatctgttgatcacggcttccttgtgaccaggcatagtcaaacaatagatgacccacagtgtccttctgggaccaaaattctttaccacgggtactctttgctctacgtgcaaggcaatgaacgggcccatggccaggacttgggcacggccggcagctgcctgcgcaagttcagcacaatgcccttcctgttctgcaatattaacaacgtgtgcaactttgcatcacgaaatgactactcgtactggctgtccacccctgagcccatgcccatgtcaatggcacccatcacgggggaaaacataagaccatttattagtaggtgtgctgtgtgtgaggcgcctgccatggtgatggccgtgcacagccagaccattcagatcccaccgtgccccagcgggtggtcctcgctgtggatcggctactcttttgtgatgcacaccagcgctggtgcagaaggctctggccaagccctggcgtcccccggctcctgcctggaggagtttagaagtgcgccattcatcgagtgtcacggccgtgggacctgcaattactacgcaaacgcttacagcttttggctcgccaccatagagaggagcgagatgttcaagaagcctacgccgtccaccttgaaggcaggggagctgcgcacgcacgtcagccgctgccaagtctgtatgagaagaacataatgaagcctgactcagctaatgtcacaacatggtgctacttcttcttctttttgttaacagcaacgaaccctagaaatatatcctgtgtacctcactgtccaatatgaaaaccgtaaagtgccttataggaatttgcgtaactaacacaccctgcttcattgacctctacttgctgaaggagaaaaagacagcgataagctttcaatagtggcataccaaatggcacttttgatgaaataaaatatcaatattttctgcaatccaatgcactgatgtgtgaagtgagaactccatcagaaaaccaaagggtgctaggaggtgtgggtgccttccatactgtttgcccattttcattcttgtattataattaattttctacccccagagataaatgtttgtttatatcactgtctagctgtttcaaaatttaggtcccttggtctgtacaaataatagcaatgtaaaaatggttttttgaacctccaaatggaattacagactcagtagccatatcttccaaccccccagtataaatttctgtctttctgctatgtgtggtactttgcagctgcttttgcagaaatcacaattttcctgtggaataaagatggtccaaaaatagtcaaaaattaannnnnnnnnnnnnntagtaatttatatagatgtcagcaattaggcagatcaaggtttagtttaacttccactgttaaaataaagcttacatagttttcttcctttgaaagactgtgctgtcctttaacataggtttttgaagactaggatattgaatgtgaaacatccgttttcattgttcacttctaaaccaaaaattatgtgttgccaaaaccaaacccaggttcatgaatatggtgtctattatagtgaaacatgtactttgagcttattgtttttattctgtattaaatattttcaggttttaaacactaatcacaaactgaaatgacttgacttcaaaagcaacaacctttaaaggccgtcatttcattagtattcctcattc

SEQ ID NO: 184130 - DNA, 1577 bp, Homo Sapiens
ttggggttcatgtacctgctgagctggctgtcgctcttcatccaggtggccttcatcacgctggccgtcgcggctggactctattacctggcagaactgatagaagaatacacagtggccaccagcaggatcataaaatacatgatctggttctccaccgctgtactgattggcctctacgtctttgagcgcttccccaccagcatgattggagtgggcctattcaccaacctcgtctactttggcctcctccagaccttccccttcatcatgctgacctcgcctaacttcatcctgtcgtgtggactagtggtggtgaatcattacctagcatttcagttttttgcagaagaatattatcccttctcagaggtcctggcctatttcactttctgcctgtggataattccgtttgcgttttttgtgtcactttcggccggggagaacgtcctgccctctaccatgcagccaggagatgatgtcgtctccaattatttcaccaaaggcaagcggggcaaacgcttagggatcctggttgtcttctccttcatcaaagaggccattctacccagtcgtcagaagatatactgacccccatgcaggcaggatgtggggggcaagatcaggagagtcaggcccctgggcctctatgccaggtggggaccagaagtcgggaaggcacctaccacctgccctggctttcttcccctcaactctggagccccatccccaccctccttggggggctcagcttggctcagatctgatgcttcaagaggctgtaacctcagagggcaccaaggagggtggcagagcctgcttagccaggaggccgaggtccctcagtcctcccctgtcccttccaaggtgggtcaggaggttctggccccgctggggcaggcagggcagggtctgtgaagcttaagagcagatggtgacaagttctctgggcaggtggccatggggaggggccatggcttggcatgtccaacagaaatagtttttgctgttgaacggtgatttctgtccaagtgcagatttccgtttgaataaagcttcgcttctaggtggcactgtttgccttaataccctgacagttcatcttcctttcttcctgctaaccttctgctctggactggactcacttttctgctccagggactccttttctgggtttgggtcttgcccttcccaagggactgttcttgtggcccttaatgggaagggggcaggggtgaggagctgagcctgctcaaggagtgggaagtggggctataggcagcctctctgatgcactctcttccatctctttccccaaggctccgtgactgtcaaactgggagtaggagaggggacaatttaggactgggctagattttcagaagaacatctacaatatcctatttataaatcttcctctgggaaaaggagtggtttctggctgaatactatcttatgctcaagagaaacaaaataaaaattagcttccaggcagcctgtttttaaagaaatgggactaatgggagaagctgtttgtcactctaagagcatccaagccctggcccgtctgtgcactc

SEQ ID NO: 184131 - DNA, 1251 bp, Homo Sapiens
  misc_feature (1044)..(1057): n is a, c, g, or t
ctttgtacaaaaaagttggcataagaccacttattagtaggtgtgctgtgtgtgaggcgcctgccatggtgatggccgtgcacagccagaccattcagatcccaccgtgccccagcgggtggtcctcgctgtggatcggctactcttttgtgatgcacaccagcgctggtgcagaaggctctggccaagccctggcgtcccccggctcctgcctggaggagtttagaagtgcgccattcatcgagtgtcacggccgtgggacctgcaattactacgcaaacgcttacagcttttggctcgccaccatagagaggagcgagatgttcaagaagcctacgccgtccaccttgaaggcaggggagctgcgcacgcacgtcagccgctgccaagtctgtatgagaagaacataatgaagcctgactcagctaatgtcacaacatggtgctacttcttcttctttttgttaacagcaacgaaccctagaaatatatcctgtgtacctcactgtccaatatgaaaaccgtaaagtgccttataggaatttgcgtaactaacacaccctgcttcattgacctctacttgctgaaggagaaaaagacagcgataagctttcaatagtggcataccaaatggcacttttgatgaaataaaatatcaatattttctgcaatccaatgcactgatgtgtgaagtgagaactccatcagaaaaccaaagggtgctaggaggtgtgggtgccttccatactgtttgcccattttcattcttgtattataattaattttctacccccagagataaatgtttgtttatatcactgtctagctgtttcaaaatttaggtcccttggtctgtacaaataatagcaatgtaaaaatggttttttgaacctccaaatggaattacagactcagtagccatatcttccaaccccccagtataaatttctgtctttctgctatgtgtggtactttgcagctgcttttgcagaaatcacaattttcctgtggaataaagatggtccaaaaatagtcaaaaattaannnnnnnnnnnnnntagtaatttatatagatgtcagcaattaggcagatcaaggtttagtttaacttccactgttaaaataaaagcttacatagttttcttcctttgaaagactgtgctgtcctttaacatatgtttttaaagactaggatattgaatgtgaaacatccgttttcattgttcacttctaaaccaaaaaatatgtgttg

SEQ ID NO: 184132 - DNA, 3430 bp, Homo Sapiens
tgtacaaaaacgttggtaagatacatattttaatcctcaaatggaaggatgtagttcctaaacgtaaagtcctgttaatgcagttatctgctgattttataatactataatatttgtgtatactttgaaaagccttaaaaaaagtttaaattctattttgatatagtaagcagggttttaattacacatgatagaattttaaagagacaaaattaaaatgtttaagtagaatgttttcatggttgatccagaagtcttctgttgaataagcagtaagtattcttccttataaaattttcatagttgttataaatcctgtttatttttggagctatctgataactaaataatcttccttatttcttcttttaatgaaatgtttgatttgtttctcaatcaatgaagatccagctccaggtcccacaggggctcttcttccccacgaaaaagatcttattcaagttcatcatcttctcctgagaggaacagaaagagaagtcgttctagatcttcttcatctggtgatcgcaaaaaaagacgaacaagatcacggtcacccgaaaggtttgggtttctgtagaaataagaatgggtgttcttaagtgtgtttaatagataaagtaaactttcctagtcaagggttagatttttattatctcttgtgttccgactttctacttttcaactttgaacttcaaaaaaacattactttgcttatcctttgtactttgatcaggttgtttagaattgtagatcaaaccattctttgatcattttattgtttaaatttttagttccatttataatttttatagccaactctcggttatttctgtcttttgagattgcaattcagaagctgtatgtcgaagtaatttatgagttgacttttatacttaggcttctttaaatactaatagtcaagaattctagagcatctaataaaaaattaactttcagatcattgggaatctgtcctcatttaaatatgtgtaaatgcatttccacagcaaattgcttcatgccctttgtctataaggaaattattccttgtagctaatacatttttcattttgcagtccaaatcttttttgagaaaggcctatattaggttactttatctgtactgacacttttaatattggaagaatgcaactgtcatctgtcagccttttctgcaacaggctaattactcagtttcattaattttctctttgttcccaattatatagtcattttaatggctttatttgtagtctttgcaaatttttcatattttattagcttgtgaaaataaagattatgtaaagtctattaattgctgggttcagtggtaggattatctcatgattcctacttgtacagaatgattagttttgcttcttcacattttggagtttagatgttaagatttcacacagtcttgcttctctgcatttgtttctttgtaaaaaaaattactctgtttttgagtggaattcattctgttgctttcttaccacttctgcaaatttttatcttagccacatataatccccctagtttgttgtcatctaaacttaatgaacatgttctctattccataagccaggtgattggtgaaaacactaaacaaccctgagcccagggccaacccctacggaacaccactactttacccagacgccacaggtcatcatctggatcatcccattctggttcccgttcaagttcaaaaaagaaataatgtattaaaatttacatcttaaaaaaatccagtacagtgcatgaagcatatttttaaagaagttggtgtcttacttggtcagaagtgctaaatctgctagtagaggtgcatgcctttcattgcttttcaaaacaatacagctgtgtttatttgtgaagttaaaagtaaatagcattttaagccataatgtcccaaaatagatgttctgtcattcattatttacaaccatttgcttcatttaaaaccatttcagctataacaaagtactttgcttcctaatttaaacccatttttgtcatttccaaatacatcctgtccattggctaagacaggattacctaggcttgcctgaactttgggcatggaagaaagactggaaactagttggaaacaacatacttatggaaaagaaagtcagcctttttatgctgttaacagatgtcagagtgattctcaccaaaaaaagttaaactatgttgtaagcagccaactgtaaatgtctattttgaaattccctatgctaagggtgccttagaatcattgtgtctcttttatccagctttacttttttgctccacatttaatgcaaaagaatcttgtgatgtctacaaggagagaagtgggatatattttcctttctgacacataatttggggcaaaaaagaaagtcttaagagtttatcttttctctgctgatacggttgcttgataaagacatctcaaaatgtttaccaatgttttaagaagctttgtgtgatattcttccaaatgtagttaccaaatataatatggtagaaaaggctaaatcatacttaatgagcaaattgaagtaagcttttaaagtatatttctcttttggtgaaaggccaatggagacattgtgaatttaagtgaacatttgcctcaagatgttaactataaacacactgcatacaattttcttctgaataacaaatgaatgcttattgctgcatgatgtaagcaaaagtcattatttttcctattcatttgaaataagttatggcttaaaatgcttttggagtttatttctcaaaattaaaatctggtcacatgagctttagtttgttttctggtttaaaaaataaaaaggtttctcttaacagtatttccagtgacaatgcaaggtaagtatatcaaaggaaatcaacagttgtgcttgggggctttttgttatgggatattgatttcttgttttttttccgtaacattgtctgctgcaatttaaataaaaattacgacattttaagatatttcatagacaaaccaaacaaaaatatatgtttttactttaaagtgaatgtttttctcttcagctgatctaaaaatgaaagcaaaatatcttatgtagaaatattttgataatatttttacagtgagctttcccatgtttttatgtcttaagtttctttgctgcgtttatgtaggttgcacaagaacttttactcacttgtaattgtgcctcagactttttgaaagtctaccttctaaattgccccgacgatctagattctacatgttaccattggtttattcttgtgctttctgtatttaaaactttggctgtactaagcaaatgcaaggttataatttagctaatagtagtttacagacaatttctgatgattatgatttcatttggtttaactaagctgtactagttcatttcataaggaaatgatactg

SEQ ID NO: 184133 - DNA, 2065 bp, Homo Sapiens
  misc_feature (1729)..(1778): n is a, c, g, or t
ttggatatgattcagcagagctttgtataaaagtataaagttcaaaagcaacccccaaaaagctcgggaagtagtggactgtttttacccctcctgggatcaccactgacagcatccatgaagttctgacagaagaacacaccaggatgacaaagtagtgacttttaaagagcagccaacaacaagcatatagggaatctctcagcaaatacagaatccatctgagaatatgctgccacaaataccctttttgctgctagtatccttgaacttggttcatggagtgttttacgctgaacgataccaaatgcccacaggcataaaaggcccactacccaacaccaagacacagttcttcattccctacaccataaagagtaaaggtatagcaggtcttcctgggaagccaggtctgactggaccccctgggaatatgggaccccaaggaccaaaaggcatcccgggtagccatggtctcccaggccctaaaggtgagacagggccagctgggcctgcaggataccctggggctaagggtgaaaggggttcccctgggtcagatggaaaaccagggtacccaggaaaaccaggtctcgatggtcctaagggtaacccagggttaccaggtccaaaaggtgatcctggagttggaggacctcctggtctcccaggccctgtgggcccagcaggagcaaagggaatgcccggacacaatggagaggctggcccaagaggtgcccctggaataccaggtactagaggccctattgggccaccaggcattccaggattccctgggtctaaaggggatccaggaagtcccggtcctcctggcccagctggcatagcaactaagggcctcaatggacccaccgggccaccagggcctccaggtccaagaggccactctggagagcctggtcttccagggccccctgggcctccaggcccaccaggtcaagcagtcatgcctgagggttttataaaggcaggccaaaggcccagtctttctgggacccctcttgttagtgccaaccagggggtaacaggaatgcctgtgtctgcttttactgttattctctccaaagcttacccagcaataggaactcccataccatttgataaaattttgtataacaggcaacagcattatgacccaaggactggaatctttacttgtcagataccaggaatatactatttttcataccacgtgcatgtgaaagggactcatgtttgggtaggcctgtataagaatggcacccctgtaatgtacacctatgatgaatacaccaaaggctacctggatcaggcttcagggagtgccatcatcgatctcacagaaaatgaccaggtgtggctccagcttcccaatgccgagtcaaatggcctatactcctctgagtatgtccactcctctttctcaggattcctagtggctccaatgtgagtacacacagagctaatctaaatcttgtgctagaaaaagcattctctaactctaccccaccctacaaaatgcatatggaggtaggctgaaaagaatgtaatttttattttctgaaatacagatttgagctatcagaccaacaaaccttccccctgaaaagtgagcagcaacgtaaaaacgtatgtgaagcctctcttgaatttctagttagcaatcttaaggctctttaaggttttctccaatattaaaaaatatcaccaaagaagtcctgctatgttnnnnnnnnnnnnnnnnnnnnnnnnnnnnnnnnnnnnnnnnnnnnnnnnnncagaaatagagctctaagttatgtgaaatttgatttgagaaactcggcatttcctttttaaaaaagcctgtttctaactatgaatatgagaacttctaggaaacatccaggaggtatcatataactttgtagaacttaaatacttgaatattcaaatttaaaagacactgtatcccctaaaatatttctgatggtgcactactctgaggcctgtatggcccctttcatcaatatctattcaaatatacaagtgcatatatacttgttaaagctcttatataaaaaaa

SEQ ID NO: 184134 - DNA, 1026 bp, Homo Sapiens
ttggtaaagttcaaaagcaacccccaaaaagctcgggaagtagtggactgtttttacccctcctgggatcaccactgacagcatccatgaagttctgacagaagaacacaccaggatgacaaagtagtgacttttaaagagcagccaacaacaagcatatagggaatctctcagcaaatacagaatccatctgagaatatgctgccacaaataccctttttgctgctagtatccttgaacttggttcatggagtgttttacgctgaacgataccaaacgcccacaggcataaaaggcccactacccaacaccaagacacagttcttcattccctacaccataaagagtaaaggtatagcagtaagaggagagcaaggtactcctggtccaccaggccctgctggacctcgagggcacccaggtccttctggaccaccaggaaaaccaggctacggaagtcctggactccaaggagagccagggttgccaggaccaccgggaccatcagctgtagggaaaccaggtgtgccaggactcccaggaaaaccaggagagagaggaccatatggaccaaaaggagatgttggaccagctggcctaccaggaccccggggcccaccaggaccacctggaatccctggaccggctggaatttctgtgccaggaaaacctggacaacagggacccacaggagccccaggacccaggggctttcctggagaaaagggtgcaccaggagtccctggtatgaatggacagaaaggggaaatgggatatggtgctcctggtcgtccaggtgagaggggtcttccaggccctcagggtcccacaggaccatctggccctcctggagtgggaaaaagaggtgaaaatggggttccaggacagccaggcatcaaaggtgatagaggttttccgggagaaatgggaccaattggcccaccaggtccccaagccctcctggggaacgagggccagaaggcattggaaagccaggagctgctggagccccaagccagccaggga

SEQ ID NO: 184135 - DNA, 1638 bp, Homo Sapiens
  misc_feature (1271)..(1300): n is a, c, g, or t
ttggtacagatcctgaacttggaggagcagtccagcttatgggcctgcttcgaactttagttgacccagagaacatgctagccactgccaataaaacagaaaagactgaatttctgggtttcttctacaagcactgtatgcatgttctcactgctcctttactagcaaatacaacagaagacaaacctagtaaagatgattttcagactgcccaactattggcacttgtattggaattgttaacattttgtgtggagcaccatacctaccacataaagaactacattattaataaggatatcctccggagagtgctagttcttatggcctcgaagcatgctttcttggcattataaaccgtgtcagcatggttgcctggctacctgctcatgaaggacttgattaatagcaaattggcaatttaacgagccacttccatgatctccaaagaaaccaaaatacaaacacaatatttaatcttgccaaccgaagacgatgtgactgcatgaagtgcccttcgttttaaaagaaagattattggattaaaagatgagttttacaaccgctacataatgaaaagttttttgtttgaaccagtagtgaaagcatttctcaacaatggatcccgctacaatctgatgaactctgccataatagagatgtttgaatttattagagtggaagatataaaatcattaactgctcatgtaattgaaaattactggaaagcactggaagatgtagattatgtacagacatttaaaggattaaaactgagatttgaacaacaaagagaaaggcaagataatcccaaacttgacagtatgcgttccattttgaggaatcacagatatcgaagagatgccagaacactagaagatgaagaagagatgtggtttaacacagatgaagatgacatggaagatggagaagctgtagtgtctccatctgacaaaactaaaaatgatgatgatattatggatccaataagtaaattcatggaaaggaagaaattaaaagaaagtgaggaaaaggaagtgcttctgaaaacaaacctttctggacggcagagcccaagtttcaagctttccctgtccagtggaacgaagactaacctcaccagccagtcatctacaacaaatctgcctggttctccgggatcacctggatccccaggatctccaggctctcctggatccgtacctaaaaatacatctcagacggcagctattactacaaagggaggcctcgtgggtctggtagattatccnnnnnnnnnnnnnnnnnnnnnnnnnnnnnnagataaggaagatacgttaccattgtcaaagaaagcaaaatttgattcataataatggcaacggcctaggatcagtacctgttgaaaaaaactggttctccacctctcccccatacaaaatccacaaaaaagcgcagtggtctcttgtgaatgactgacacagatcagcctcttacacttgacttctgctcatcaagtgccaattcaatggagcacgaggaggggatatcatatatttaggggaaagacttaagcctttgagctctccagcttggaccacacattgcccttttctcaggaaaggaaatggaaacaaaagccaacagggcagggttttg

SEQ ID NO: 184136 - DNA, 1383 bp, Homo Sapiens
  misc_feature (1265)..(1294): n is a, c, g, or t
ttggcaaaacagctagagcctaggtataatgctgtggtatgtgtcttagtttttgctttttccgttctctcataataagtgatcctgagtatgtctatttttctctccaggatattttgctcatcaacctcattatagaacatatgatttgtgatacagatcctgaacttggaggagcagtccagcttatgggcctgcttcgaactttagttgacccagagaacatgctagccactgccaataaaacagaaaagactgaatttctgggtttcttctacaagcactgtatgcatgttctcactgctcctttactagcaaatacaacagaagacaaacctagtaaagatgattttcagactgcccaactattggcacttgtattggaattgttaacattttgtgtggagcaccatacctaccacataaagaactacattattaataaggatatcctccggagagtgctagttcttatggcctcgaagcatgctttcttggcattatgtgcccttcgttttaaaagaaagattattggattaaaagatgagttttacaaccgctacataatgaaaagttttttgtttgaaccagtagtgaaagcatttctcaacaatggatcccgctacaatctgatgaactctgccataatagagatgtttgaatttattagagtggaagatataaaatcattaactgctcatgtaattgaaaattactggaaagcactggaagatgtagattatgtacagacatttaaaggattaaaactgagatttgaacaacaaagagaaaggcaagataatcccaaacttgacagtatgcgttccattttgaggaatcacagatatcgaagagatgccagaacactagaagatgaagaagagatgtggtttaacacagatgaagatgacatggaagatggagaagctgtagtgtctccatctgacaaaactaaaaatgatgatgatattatggatccaataagtaaattcatggaaaggaagaaattaaaagaaagtgaggaaaaggaagtgcttctgaaaacaaacctttctggacggcagagcccaagtttcaagctttccctgtccagtggaacgaagactaacctcaccagccagtcatctacaacaaatctgcctggttctccgggatcacctggatccccaggatctccaggctctcctggatccgtacctaaaaatacatctcagacggcagctattactacaaagggaggcctcgtgggtctggtagattatccnnnnnnnnnnnnnnnnnnnnnnnnnnnnnnagataggaagatacgttaccattgtcaaagaaagcaaaatttgattcataataatggcacggcctaggatcagtacctgttgaaaaaaa

SEQ ID NO: 184137 - DNA, 2206 bp, Homo Sapiens
  misc_feature (346)..(376): n is a, c, g, or t
  misc_feature (968)..(982): n is a, c, g, or t
  misc_feature (1692)..(1721): n is a, c, g, or t
ttggcaaaaatattgaagatcaaattatacagtggattgccctaataaaacactggttttttctattaaggtggatataaaaggtcatgttgaattttttcatcttaagtagtgtgataggttcattcatttgtcttagctcttattttagatgtaaattacattttggtcattagtaactggtttattttcaggatttttctggctttctaagacttgtgttctatgatgacatatactacttttagaagacatttttctgataacattttcataatccttatctttaggttcacagttccggaagtgcaaacatcataaataattattgatatgtgttaaacannnnnnnnnnnnnnnnnnnnnnnnnnnnnnnggtaagtctaaagtatggaagagtggtatgtgatttaaacaaccatgcctctgtgtttcaggtgcccttcgttttaaaagaaagattattggattaaaagatgagttttacaaccgctacataatgaaaagttttttgtttgaaccagtagtgaaagcatttctcaacaatggatcccgctacaatctgatgaactctgccataatagagatgtttgaatttattagagtggaagatataaaatcattaactgctcatgtaattgaaaattactggaaagcactggaagatgtagattatgtacagacatttaaaggattaaaactgagatttgaacaacaaagagaaaggcaagataatcccaaacttgacaggtaaattaccatatatttaaacctattcgttcagcatcaagtcgtatggtagtggctttattgtttatttgatattatttggcttgccaaggaacagggaaatcagcagatagcaaatagaaattgtagcttcctgtaagggtcagcataaatgtttccctgaagattaggctggttattagtataatacctcaggcatgtatcaggctagataaggnnnnnnnnnnnnnnngaccaaacagtggaagtgaggcttcatgtgttcaaaataaaatcagaggattatattacttgctttgaatttacaagttactaaggttacaaattattatttaaaattttgtacattaatctaaatacctggatttacattgatattttaatatttgtaaatttcatgttaattccctatgttaacaagtttaataagtcatctgtaacagtacaattaagtccatatatgattgtatttactctttcttccctactcatagtatgcgttccattttgaggaatcacagatatcgaagagatgccagaacactagaagatgaagaagagatgtggtttaacacagatgaagatgacatggaagatggagaagctgtagtgtctccatctgacaaaactaaaaatgatgatgatattatggatccaataagtaaattcatggaaaggaagaaattaaaagaaagtgaggaaaaggaagtgcttctgaaaacaaacctttctggacggcagagcccaagtttcaagctttccctgtccagtggaacgaagactaacctcaccagccagtcatctacaacaaatctgcctggttctccgggatcacctggatccccaggatctccaggctctcctggatccgtacctaaaaatacatctcagacggcagctattactacaaagggaggcctcgtgggtctggtagattatccnnnnnnnnnnnnnnnnnnnnnnnnnnnnnnagataaggaagatacgttaccattgtcaaagaaagcaaaatttgattcataataatggcaacggcctaggatcagtacctgttgaaaaaaactggttctccacccctcccccatacaaaatccacaaaaaagcgcagtggtctcttgtgaatgactgacacagatcagcctcttacacttgacttctgctcatcaagtgccaattcaatggagcaggaggaggggatatcatatatttaggggaaagacttaagcctttgagctctccagcttggaccacacattgcccttttctcagggaatgaaatggaaacaaaaaccaacagggcaggggttttgtaagtggaactctggattgactgggtcagttgctacaatcagaatatgctttcttggaccatgtttgagactcagaagatgggcctttctgccataattcttcactagtcaagaatgccagcagtttccttgtataagagactgcc

SEQ ID NO: 184138 - DNA, 1684 bp, Homo Sapiens
ttgggctcgctgcagcttcccggagccggagcgcagcgcctgcggccgcccgtgccccgccgtcctccttcccgcggccgtgagggagaccgcggctcggccgtagcggagctgcgagttacagaatgtctgaaggggacagtgtgggagaatccgtccatgggaaaccttcggtggtgtacagatttttcacaagacttggacagatttatcagtcctggctagacaagtccacaccctacacggctgtgcgatgggtcgtgacactgggcctgagctttgtctacatgattcgagtttacctgctgcagggttggtacattgtgacctatgccttggggatctaccatctaaatcttttcatagcttttctttctcccaaagtggatccttccttaatggaagactcagatgacggtccttcgctacccaccaaacagaacgaggaattccgccccttcattcgaaggctcccagagtttaaattttggcatgcggctaccaagggcatccttgtggctatggtctgtactttcttcgacgctttcaacgtcccggtgttctggccgattctggtgatgtacttcatcatgctcttctgtatcacgatgaagaggcaaatcaagcacatgattaagtaccggtacatcccgttcacacatgggaagagaaggtacagaggcaaggaggatgccggcaaggccttcgccagctagaagcgggactgaggctgcctcacgtgttgcaagaacagttttgagccattgttaacaatgccttttttcttcacataaagtagttgattacgagggagtcaaattttctttttaaaaaggagcttcaatgatttgtaactgaaatatcaggttctagaagaaactggcgcttaaaccaaatcgcatggatttctttttcagtgacgttcaagtgtttctcacggatggaattctagtcagctgcaggcgggaagccaggcgggtggagcccatgggagcaagggcgagtggccggtccccgctgtgccaggtgggcaggcaggagcaaggcctgcgagggaggaacgggccgctccccgccagccgccttccccagcagccgcaggtggtgccagccactccacagagcccgagggatgatctagcctgattcctgcgtgtccgaaagaacttaacgttttaaaggtgattgtcaagtaactgtgtggggttctaatgccagtttcctaattccatctcactggagatgtttaaagttggcctctatcctaatgactcaaaacttggttcttaactaccatgattgcttttgagggcccggaattataaatatatattatattttaattgtttgagattattttgacacatttctttgatacgtagagtgttttgtttttaatttaaatctgtcctcatgcaaccctccatgaggggcagcgaagctggcagggagcagactggctttgtaggttcagcactcggccccccactgcgggagaggcggaacccacttgcatgtcagcgtttttgattcgagaaaagaaatactctcaacgttttaccaagtgatttacctccacctttactaaagtctttacctaaaacatggcagtcgctggacacaggaaaagcccaccttttgtttggccttttcgaaagtgacccatattgcacagcagaacatc

SEQ ID NO: 184139 - DNA, 1313 bp, Homo Sapiens
  misc_feature (150)..(161): n is a, c, g, or t
  misc_feature (433)..(470): n is a, c, g, or t
  misc_feature (1065)..(1075): n is a, c, g, or t
gatgacattcaccaatttgtgaatatttcaacccagaagatacctttcactctataaacttgtcataggcaaacatgtggtgttagcattgagagatgcacacaaaaatgttacataaaagttcagacattctaatgataagtgaactgnnnnnnnnnnnnccccacatctcagtttttgtaacaagataaagaaaataatttaaaaacacaaaaaatggcattcagtgggtacaaagcccaaaatcactataataaagaactacacgtgaatctttacaaattacacaatgatgttgtgtaaaaggttgcatctgtacaatgtcttgccaatgctatctctacagtttatacactcttttacatttatataacatattaaacaaatcaattaaatattaagccttattagtctctcaacgattctgcaggcnnnnnnnnnnnnnnnnnnnnnnnnnnnnnnnnnnnnnnttacaaaatttccacaaacacagcagtcttccatttaggtgaagtataataattttcagagggtcaaaaaatagttgtaaagaatacagggaaaaaacagccagtcagggtttttattgttgttgctgtttatttttaaaatcacacattgaatacacacaacaatcagatttcttcaccaaacccccaattttttagcaactggctctattcagcaccaaaaactccagtctgtgggaagtgcacagacacagacttcacttctgtgtcttggtcgagcaatccatcaggtcattggttaggttcaggacttgccctcttttccttccctcttcatggctctccagacccaaggttctcaaggcttcagatttatggcccacagcccctattaccacctaaatccagcagccatttgggaagaattcaaaataatttgagatgaatgaaatgacaggacctgtattacagatgggtattctccattccaagtaaactgtttcttaatgagttctgagactctggtcttggatgccatgatcatactgggtaattatttctagtctgagactttgtgactttgtcagatgcctcnnnnnnnnnnngtgatcagtattctggaaacacttccggacaagttgggaaatcaaatggcaactgagaagctgtggaatgcagactaacgagatctaacacagaaaccaccaaaatgatgagagctcagcagaggcagttttaaaacttgcagagagccaccacagatggtacctgagggtgtggaatttttgatgaaaagagcctgaagtgaggactagtcatctttctatgcataatagcatccaa

SEQ ID NO: 184140 - DNA, 1334 bp, Homo Sapiens
  misc_feature (1138)..(1149): n is a, c, g, or t
ttggatctgacagcagcctgtgaaattcataagaatcacataggatgtaagtctccatgatgtatgccaattacagaaattaggttggtctgtgtctttgttactaacaaaaatagctatagcagtggccttcagagatgtagagtctggaaaaacttgatcttaatgtcaggttctggcactgcttttacagttatagccctgatgagagctatcagtagggaaaataatttatggagaaatttaattttgctaaaagagataaaagtttatgctcataaccctaatgtagtttttatccattatgaggccacaaactctttgagaatctgctgaaatctctattaagaaactgccaaagagcatacacaaaatttgcatgcaatttcagggaaggtcttcaccccagttcccacactaccccctatcctccattattccctcagacttagaatgtcagtcctaatagaaattattatatctacaggttcgagaaatggctgctactaccttaagcggtctgctacagtgtaactttcttaccatggacagtcctatgcagattcattttgagcaactttgcaaaacaaaactacctaagaaaagaaagcgagaccctggttctgtaggagataccattccttctgcagagttggtcaaacgccatgctggggtgctaggacttggtgcatgtgttctttctagtccttacgatgttcccacctggatgccccagctcctcatgaatctcagtgcacatctaaatgatcctcagcctattgagatgactgtaaaaaaaaccttatccaatttccgaaggactcaccatgacaactggcaggaacataaacagcaattcactgatgaccaactgcttgttctcaccgatcttcttgtgtcaccatgctattatgcatagaaagatgactagtcctcacttcaggctcttttcatcaaaaattccacaccctcaggtaccatctgtggtggctctctgcaagttttaaaactgcctctgctgagctctcatcattttggtggtttctgtgttagatctcgttagtctgcattccacagcttctcagttgccatttgatttcccaacttgtccggaagtgtttccagaatactgatcacnnnnnnnnnnnngaggcatctgacaaagtcacaaagtctcagactaggaaataattacccagtatgatcatgggcatccaagaccagagtctcagaactcattaaagaaacagtttacttgggaatggagaatacccatctgtataccggtccttgtcatttcatttcatctcaaattattttgaattcttcccaaa

SEQ ID NO: 184141 - DNA, 5616 bp, Homo Sapiens
  misc_feature (5416)..(5426): n is a, c, g, or t
ttggcagcatgatgcagggatttgcccgccttttgatcaacttgttaaagaaaaaggaacttctttcaagagctgatttggagttaccctggagaccactttatgacatggtagaaagaatattatattccaagacagagcacctaggattaaattggtttcctaattctgtagaaaatattctcaaaacactcgtgaaaagctgccgaccatattttccagcagatgccaccgctgagatgctagaagaatggcgacctttaatgtgcccttttgatgtaaccatgcaaaaggccatcacttattttgaaatatttcttcctacctcccttcctccagaacttcatcataaaggttttaaactttggtttgatgaattaattggcctttgggtttcagtgcaaaatctcccacaatgggaggggcaactagtaaatctctttgctcgattggctacagataatatagggtacatagattgggatccatatgtaccaaagatatttacaagaattctgagaagcttgaacctcccagtgggaagcagtcaagtgttagtcccaagatttttaacaaatgcttatgatataggacatgctgtaatatggatcaccgccatgatgggtggaccaagtaagctagtgcaaaaacacttagctggtttgtttaacagcatcacatctttttaccatccttcaaataatgggcgctggctgaacaagttaatgaaactacttcagcggttgccaaacagtgttgttagaagattgcatcgtgaaagatacaagaagccctcttggttaactcctgtgcctgatagccacaagcttactgatcaagatgttacagactttgtacaatgcattattcagcctgtcctcttggctatgtttagcaaaaccggtagtctagaagcagcccaggctttgcagaatcttgcactcatgagacctgaattggtaataccccctgtacttgaaagaacatatcctgcattagagacattaacagaacctcaccagctcacagctactttaagttgtgtaattggagtagcccgcagtttggtatcaggaggcagatggtttcctgaaggtcctacacatatgctacctctgttgatgagagcattgcctggggtggatccaaatgactttagtaaatgcatgatcacattccagttcatagcaacattttctactctggtgcctttagtagattgttcatctgtactacaagaaagaaatgacctcacagaagtggaacgagaactttgttcagccacagctgaatttgaggatttcgtcttacagtttatggacagatgttttggacttatagaaagtagcacattggagcaaacaagagaagagacagaaactgagaaaatgacacacttggagagtttggtcgaattaggtctgtcttctacgtttagtacaatcctcacccaatgttccaaagaaatatttatggtggcccttcagaaggtttttaatttttctacttcacatatatttgaaacaagagtagcaggtcgcatggtggcagacatgtgccgcgctgctgtaaagtgctgcccagaagaatctttgaagctctttgttccccactgctgcagtgttataactcagcttacaatgaatgatgatgtattaaatgatgaagagctagacaaggaattactatggaatcttcaacttttgtctgagattactcgagtggatggaaggaagttgcttctttatagggagcagcttgtaaagattctccaaagaaccctacatttaacctgtaagcagggttacactctgtcttgtaaccttttgcatcatcttctccgttctaccacacttatctaccctacagaatactgcagtgtgccaggtggctttgacaagcctccttctgaatactttcctatcaaggactggggcaaacccggggacttgtggaatctgggaatccagtggcatgttccttcttcagaagaagtgtcttttgccttttatcttttggactcctttcttcagcctgagctcgtcaaactccagcattgtggggatggaaaacttgaaatgtctagagatgatattctacagagtctgactatagtgcacaactgtttaattggctctggaaacctcctacctccgttgaaaggagagccagttactaacttagtaccaagtatggtgtccttggaagagacaaagttgtatactggacttgaatatgatctgtctcgagagaaccaccgagaagtaattgctacagttataaggaaacttcttaaccacatacttgataattcagaagatgatactaagtcattgtttcttattataaagattattggagaccttttacaattccaaggatctcacaagcatgaatttgactcccgatggaaaagcttcaacttagtaaagaaatcaatggaaaatcggctccatgggaaaaaacaacatatcagagcactgttgattgatagagtaatgttacagcatgagctacggacactaactgttgagggttgtgaatacaaaaagatacatcaagatatgatcagagatcttcttcgtttatctacaagttcatacagtcaggtgagaaataaggctcagcaaacattttttgctgccttgggagcatataacttctgttgcagagatatcattcccttggttttggagttcttaaggcctgatagacaaggtgttacacagcaacaattcaagggtgccttgtactgtctccttggaaatcacagtggtgtgtgcttggcaaaccttcatgattgggactgtattgtacagacgtggccagcgattgtttcttcagggcttagccaagcaatgtccctggaaaagccatcaatagtgagattgtttgatgatcttgcagaaaagattcataggcagtatgaaacaattggcttggacttcacaattccaaagtcatgtgttgaaatagcggaattacttcaacagtcaaaaaacccctctatcaaccagatattgcttagcccagaaaaaattaaggaaggaattaaacgccaacaagaaaagaatgccgatgccctaaggaactatgaaaatttggtagacaccttgctagatggtgtggagcaaagaaacctgccctggaaatttgaacatataggcattgggcttctgtgtctactgctgagagatgaccgagtgttgcctcttcgtgccatacggttttttgttgagaatctcaaccatgatgcaattgtagttcgaaagatggctatctcagctgttgctggtatccttaaacagctaaaaagaacccacaaaaagctgaccattaacccctgtgaaatcagtggatgccctaaacccacccaaattattgctggtgataggcctgataatcattggttgcattatgacagcaaaactataccaagaactaaaaaagaatgggagtcaagttgctttgtggaaaaaactcactggggatactacacctggccaaagaatatggttgtttatgctggtgtggaagagcagcctaagcttggcagaagcagggaggatatgacagaggcagaacagattatatttgatcatttttctgatcctaaatttgttgagcagttaattacttttctatcattagaagacagaaaaggaaaagataagtttaatccacgacgtttttgtctctttaagggtatattcaggaattttgatgatgccttcctgccagttctgaagccccatttagaacatttggttgcagattcacatgaaagcacccagcgatgtgttgcagaaattatagctggtttaatcagaggttctaagcactggacatttgaaaaggtggagaagctttgggagcttctgtgccctctgcttagaacagcactgtccaatattaccgtagaaacttataatgactggggagcttgtatagcaacatcctgtgaaagcagagatccccggaaacttcactggctttttgaactgctgttggaatcaccattgagtggtgaaggaggatcctttgtagatgcatgtcgactttatgtactacaaggtggccttgcccagcaagaatggagagtgcctgaactattgcacagactactgaagtacttggaacccaaactcacccaggtttacaaaaatgtcagagaaagaataggaagtgtgctgacctacatattcatgatagatgtatctttgccaaataccacaccaaccatatcgcctcatgtccctgagtttactgctcgaattctggagaaattgaaacctctcatggatgtggatgaagaaattcagaaccatgttatggaagaaaatggaattggtgaagaagatgagcgaactcagggcattaaactcttgaaaaccatattgaaatggctgatggcaagtgcaggaagatccttttctacagcagttacagaacaacttcagcttctacctttgtttttcaagattgccccagtggaaaatgacaatagctacgatgaactgaaaagagatgcaagttatgtttatcattaatgtctcaggggttgctttaccctcatcaagtgcctttggtacttcaggtgctaaaacaaacagcaagaagcagttcttggcatgcacgatacacagtactgacctacctccagaccatggtattttataacctctttattttcctaaacaatgaagatgcagttaaagatatcaggtggctggttataagtcttttggaggacgaacaactggaggttcgagaaatggctgctactaccttaagcggtctgctacagtgtaactttcttaccatggacagtcctatgcagattcattttgagcaactttgcaaaacaaaactacctaagaaaagaaagcgagaccctggttctgtaggagataccattccttctgcagagttggtcaaacgccatgctggggtgctaggacttggtgcatgtgttctttctagtccttacgatgttcccacctggatgccccagctcctcatgaatctcagtgcacatctaaatgatcctcagcctattgagatgactgtaaaaaaaaccttatccaatttccgaaggactcaccatgacaactggcaggaacataaacagcaattcactgatgaccaactgcttgttctcaccgatcttcttgtgtcaccatgctattatgcatagaaagatgactagtcctcacttcaggctcttttcatcaaaaattccacaccctcaggtaccatctgtggtggctctctgcaagttttaaaactgcctctgctgagctctcatcattttggtggtttctgtgttagatctcgttagtctgcattccacagcttctcagttgccatttgatttcccaacttgtccggaagtgtttccagaatactgatcacnnnnnnnnnnngaggcatctgacaaagtcacaaagtctcagactagaaataattacccagtatgatcatggcatccaagaccagagtctcagaactcattaagaaacagtttacttggaatggagaatacccatctgtaatacagtcctgtcatttcattcatctcaattaatttgaattctcccaatggctgctggattt

SEQ ID NO: 184142 - DNA, 981 bp, Homo Sapiens
ttggctcagcatcttccagatgtaccttacgtcatggtgagggaaagagagagcttccttgcccccagctcaggtgtgcagcctactctggccatgcctaatatagcagtaggacagaatgtgacagtgacagaaagagttctagcacctgcttccactctgcaatccagttaccagattcccactgaaaattctatgacggctaggaacaccacggtgtctggagctggagtccctggccctctgccagattttggtttagaggaatctggtcattctaattctaccataaccacatcttccaccagagttaccaagcatagcactgtacagcattcttactcctaaacagcagtcagccacaaactgacccagagtttaattagcagtgactaatttcatgtttccaatgtacctgatttttcatgagccttacagacacacagagacacatacacattgatcttaaaatttttctcagtcactgatatgcaaaggaccacactgtctctgcttccaggagtattttagaaatgttccacaatttactgaagacatagagatgatgctgctgcttaggtgccttttagcaagctatgcaaacaatcctgataaaacaagatacatagagagtcaatctggcttctgagaatttaccaagtgaacagagtacctagttcatcagccgtccagtaaagcaacccaggaaactgactgggtctctttgcctaccgtattaacattaaacattgatgttctgtattctgtactttactgcacccagcagactttcaacaactcattgatccaaagatacatgcacagtctgagcaccagctatggtgctcataacttctttaagacttgaaccctttcaatctgtgtgattcattaaattggaccattgatgatgagaatacacattgtatgtttctgtgcacatgacagtgtgtgtgtgtgcacgtacatactgtatagtct

SEQ ID NO: 184143 - DNA, 2216 bp, Homo Sapiens
atcatggctttcaggctgcacgcacactggagcgagatgctttccaccgtgctgctgtcagtgaacatttgcaaggaaagtgatgcactgtggctcgcaccaaagtttgctttgtggctcagctgcaccacacttccagcaaggcctttgggaaaggtgggagagctagaggaataattaaagctggtggaactcagttggagtttagaaagcttcccataaaatgcctgcttgatgctgagttgggaggggagagaagaaggctccagaggctcactgagccccttccctggctctcggggtaatttccagaagggcaagtccatgacaaagggcatcccttccaagtgacccaccagttccaggggactatgcccagtagctttcctgttctcggcatttgccttaagaggaccccccacaaaagtcttctcattcttgacgctgccaacaaaggcatgtggctttggagcccagtcttcccttggagtctgtaccccaccagacatggagtttgtgcttggtcccaacttcccactgggaaaaactggagggatctcagcaggaagaggcatcgggtccgcaggcctggggcgctgaagggttgcagccacattcccagagccaaaaagcttcttcccttggcctgtaacattgctctgatcacccagggcccgacctgtctgctctggaccaaaggagatcacatttggagatgagaaacgaggtgttctcgaggtagtaagatctcctgggctctttcctggagcagcatttgaattactgtcctgtgacatagcacggacttccttctgatcttcacaactaaaggaagagaactgctctttggaatccatttcttccagtttcctagaggatgtaatgggatttgtcactggatggagggagtcaaaacttgggactgccttgcaattcttttggggtgctccaggagcctgggtggcctcaatcctggcaagaccagtgcctgtttcacagctatctggcagaagaggctccttcaaagcccttaaagaactggggctgcttccatcaaccatgccactgttttttccaagaccatgtaaagatcccatgcgtagcgagccatggctctggtcttttgtaagtggtacttgtggggattctgacatgctgtcatcgtgggctggtggaagaaccttctctaggggcaagctaccctgcagcaactgcatcacaagtgggttagtggcctccactgaggacccaggcatggacaggcacacggctcttggctggtactcagtactggccagcagtagggaatctgggatcttttggcggaccgcacatactcgagacacccagctctgaggagcaaccatcccatctgtccttgtaaccagacgcatgtcaccattcaccttggacagtggggcagattggttccaattgggtttctcatccttgtccaccgaagatccctttgtcactgcagcttctctagtgtcagcctcactgctgtcctccgtgaggtgaccttcaaagtcagaggctgtatccgtggactcaccgtgaggactcagtgcttcagagtctccgttgattttcagcttttcaatgtccacctgttgacagtaactgccattgctgtcactgcctcctcgagatggcacagtccagagtgaagtaaggctgtcaagaggatctagaccctcctcagctgtcaaatccccaggcaatgcaggaggggtgggagcagctttctcccactcctctccaacctggggctcaacagatggtatgtgttctctggattctggtttgggctgtttcactacctcatcattcgatgggatgggtatccaatgcaaagaactgttagaaacgagagccttggttttcaagttttcttgtctagtatcactttccctcataggagggcatgagccaccaagccctaattcgtcatcaaatgctctgttctgcaggcaatcagtcggtgaggattcaggtgtggaactgggggtcacatttacaggatccttcatagtgggatgactgtcaagagcttggccagttcctttctctaatgtatcatctcccactagagacggaatgggaccattgtctgcaggaacggtgggtccttgctcctcatcatcactttcccaggaagtggtgccagactcacattcagttctaacatccggatgcaactgaggctgctccaa

SEQ ID NO: 184144 - DNA, 1561 bp, Homo Sapiens
tcactgctgcctttagatgaagtaaaggatcttggcacagatgcgctggctgactgctggtgagtgctgttctcgccctgcctttgtctttgatcatacgctgctttcagctccctctgaagttcagcaggaagggcagcaaatacctcagggtccacctgtgaaaatgctggaagggctattaaatttattcctgcgtcactgttcgattcttgaggttctggtatttgcaacaagactgtcccaactggttgtggcaaaattcctgtattacagccatttactggttctttctttttgtcgccatgtgactctgcttgctggacagcacagacttgctctacttgttcccggagatcaggtggaagtgcttctaaaacagactgatccagctgggaaggtgacgggacctctatactcaggttaagtctcgactgcacactgacaggagtatgtagaccattccatttccctgaagactcagccttgttagtatcaggactggtcggcagatgtgcaggaaaaggtggcaagaaagtgcaagttctagaagcagatgatatttccagatccacagcagcccgaaatacttctttgtgctcctcttcggtggatttcttagctttctgaacttggaagacatcacggacagagtatgacccactaggaaagtggcttgactgaactgatgggcgactgggacatgtggaagggttcagattagttggaaccaactgattcacgtgaatcccaacccctctcatatctgatatatttagtttcattgtatgaaacatgtttagcatcgcctttccaattatttttgcattatctgttgcctggtcaagagttacagtcctggcaatgttatcacaaattccatggcctccaaattttgcagtttctacaggagccccaggctttcgtaccatgattttgagagttagacgtttacccttcatgccagtggcttctagtcttctttgaatttcttctgaaagactcagaagaaaagcttctgcctcttttggctgagtaaaccttattccatagttgatctcagctgaaacagattttctttccttttcagttcgaactggtctatcatccaagccacggcagaacctataaagcatctgacctgttttgggaccaaattctttttggagttttgccatggtcatatactgcaagtctccacaagttttaattcccaaagatgccaacttagattccattgaatgtccaactcctggtagattggtcactagctggcctctgataaaatcatctacttcttctggttttaggtggtactgcccatctggttttgcttttctagttgccattctagccaggagaatattagaaccaattccaacagaggcagcacatttcgtctggtctttgatttccatacgaacagcatttgcaaattcatcaggagtaagtttggtctctgcaaggatttcggtaatgtctaccagcgcttcatcacaactgacagcttcaatgttatgagtgtagcttgccaatgtttcatacaatgtttgtgcgccaa

SEQ ID NO: 184145 - DNA, 1656 bp, Homo Sapiens
  misc_feature (178)..(196): n is a, c, g, or t
  misc_feature (1322)..(1351): n is a, c, g, or t
ttggccacatccaagggcagcctggaaccagtggctagttcttgaaggagccccatcaatcctattaatcctcagaattccagtgggagcctccctctgagccttgtagaaatgggagcgagaaaccccagctgagctgcgttccagcctcagctgagtctttttggtctgcacccannnnnnnnnnnnnnnnnnngcccacatgctccccagcttgcaggaggaatcggtgaggtcctgtcctgaggctgctgtccggggccggtggctgccctcaaggtcccttccctagctgctgcggttgccattgcttcttgcctgttctggcatcaggcacctggattgagttgcacagctttgctttatccgggcttgtgtgcagggcccggctgggctccccatctgcacatcctgaggacagaaaaagctgggtcttgctgtgccctcccaggcttagtgttccctccctcaaagactgacagccatcgttctgcacggggctttctgcatgtgacgccagctaagcatagtaagaagtccagcctaggaagggaaggattttggaggtaggtggctttggtgacacactcacttctttctcagcctccaggacactatggcctgttttaagagacatcttatttttctaaaggtgaattctcagatgataggtgaacctgagttgcagatataccaacttctgcttgtatttcttaaatgacaaagattacctagctaagaaacttcctagggaactagggaacctatgtgttccctcagtgtggtttcctgaagccagtgatatgggggttaggataggaagaactttctcggtaatgataaggagaatctcttgtttcctcccacctgtgttgtaaagataaactgacgatatacaggcacattatgtaaacatacacacgcaatgaaaccgaagcttggcggcctgggcgtggtcttgcaaaatgcttccaaagccaccttagcctgttctattcagcggcaaccccaaagcacctgttaagactcctgacccccaagtggcatgcagcccccatgcccaccgggacctggtcagcacagatcttgatgacttccctttctagggcagactgggagggtatccaggaatcggcccctgccccacgggcgttttcatgctgtacagtgacctaaagttggtaagatgtcataatggaccagtccatgtgatttcagtatatacaactccaccagacccctccaacccatataacaccccacccctgttcgcttcctgtatggtgatatcatatgtaacatttactcctgtttctgctgannnnnnnnnnnnnnnnnnnnnnnnnnnnnnacatcagctgtaatcattcctgtgctgtgttttttattacccttggtaggtattagacttgcactttttttaaaaaaaggtttctgcatcgtggaagcatttgacccagagtggaacgcgtggcctatgcaggtggattccttcaggtctttcctttggttctttgagcatctttgctttcattcgtctcccgtctttggttctccagttcaaattattgcaaagtaaaaggatctttgagtaggtttcggtctgaaaggtgtggcctttatattttgatccacacacgttgggtctttttaccc

SEQ ID NO: 184146 - DNA, 870 bp, Homo Sapiens
  misc_feature (615)..(640): n is a, c, g, or t
ttggcatgggtccaaattaatatgattctgctccccccttctccttttagacatggttgtgggtctggagggagacgtgggtccaaggtcctcatcccatcctccctctgccaggcactatgtgtctggggcttcgatccttgggtgcaggcagggctgggacacgcggcttccctcccagtccctgccttggcaccgtcacagatgccaagcaggcagcacttagggatctcccagctgggttagggcagggcctggaaatgtgcattttgcagaaacttttgagggtcgttgcaagactgtgtagcaggcctaccaggtccctttcatcttgagagggacatggcccttgttttctgcagcttccacgcctctgcactccctgcccctggcaagtgctcccatcgccccggtgcccaccatgagctcccagcacctgactccccccacatccaagggcagcctggaaccagtggctagttcttgaaggagccccatcaatcctattaatcctcagaattccagtgggagcctccctctgagccttgtagaaatgggagcgagaaaccccagctgagctgcgttccagcctcagctgagtctttttggtctgcnnnnnnnnnnnnnnnnnnnnnnnnnngcccacatgctccccagcttgcaggaggaatcggtgaggtcctgtcctgaggctgctgtccggggccggtggctgccctcaaggtcccttccctagctgctgcggttgccattgcttcttgcctgttctggcatcaagcacctggattgagttgcacagctttgctttatccgggcttgtgtgcaggccccggctgggctcccattctgcacatcctgaggacagaaaaa

SEQ ID NO: 184147 - DNA, 1283 bp, Homo Sapiens
ttggggcatctgccccaatgtgggtgcttacacctgctgcttttgctgggaagctcttgagtgtgttcaggcaacctctgagctctctgtggaggagcctggtcccgctgttctgctggctgagggcaaccttctggctgctagctaccaagaggagaaagcagcagctggtcctgagagggccagatgagaccaaagaggaggaagaggaccctcctctgcccaccaccccaaccagcgtcaactatcacttcactcgccagtgcaactacaaatgcggcttctgtttccacacagccaaaacatcctttgtgctgccccttgaggaagcaaagagaggattgcttttgcttaaggaagctggtatggagaagatcaacttttcaggtggagagccatttcttcaagaccggggagaatacctgggcaagttggtgaggttctgcaaagtagagttgcggctgcccagcgtgagcatcgtgagcaatggaagcctgatccgggagaggtggttccagaattatggtgagtatttggacattctcgctatctcctgtgacagctttgacgaggaagtcaatgtccttattggccgtggccaaggaaagaagaaccatgtggaaaaccttcaaaagctgaggaggtggtgtagggattatagagtcgctttcaagataaattctgtcattaatcgtttcaacgtggaagaggacatgacggaacagatcaaagcactaaaccctgtccgctggaaagtgttccagtgcctcttaattgagggtgagaattgtggagaagatgctctaagagaagcagaaagatttgttattggtgatgaagaatttgaaagattcttggagcgccacaaagaagtgtcctgcttggtgcctgaatctaaccagaagatgaaagactcctaccttattctggatgaatatatgcgctttctgaactgtagaaagggacggaaggacccttccaagtccatcctggatgttggtgtagaagaagctataaaattcagtggatttgatgaaaagatgtttctgaagcgaggaggaaaatacatatggagtaaggctgatctgaagctggattggtagagcggaaagtggaacgagacttcaacacaccagtgggaaaactcctagagtaactgccattgtctgcaatactatcccgttggtatttcccagtggctgaaaacctgattttctgctgcacgtggcatctgattacctgtggtcactgaacacacgaataacttggatagcaaatcctga

SEQ ID NO: 184148 - DNA, 1447 bp, Homo Sapiens
  misc_feature (452)..(485): n is a, c, g, or t
  misc_feature (1179)..(1206): n is a, c, g, or t
ttggctcagtttcatatattattccgtattacatttttgcagctaattaccataaaatgtcagcaaatgtaaaaatttaatttctgaaaagcaccattagcccatttcccccaaattaaacgtaaatgttttttttcagcacatgttaccatgtctgacctgcaaaaatgctggagaaaaatgaaggaaaaaattatgtttttcagtttaattctgttaactgaagatattccaactcaaaaccagcctcatgctctgattagataatcttttacattgaacctttactctcaaagccatgtgtggagggggcttgtcactattgtaggctcactggattggtcatttagagtttcacagactcttaccagcatatatagtatttaattgtttcaaaaaaaatcaaactgtagttgttttggcgataggtctcacgcaacacatttttgtannnnnnnnnnnnnnnnnnnnnnnnnnnnnnnnnnaaaaattgcattcattgacttcaggtagattaaggtatctttttattcattgccctcaggaaagttaaggtatcaatgagacccttaagccaatcatgtaataactgcatgtgtctggtccaggagaagtattgaataagccatttctactgcttactcatgtccctatttatgatttcaacatggatacatatttcagttctttctttttctcactatctgaaaatacatttccctccctctcttccccccaatatctccctttttttctctcttcctctatcttccaaaccccactttctccctcctccttttcctgtgttctcttaagcagatagcacatacccccacccagtaccaaatttcagaacacaagaaggtccagttcttcccccttcacataaaggaacatggtttgtcagcctttctcctgtttatgggtttcttccagcagaacagagacattgccaaccatattggatctgcttgctgtccaaaccagcaaactttcctgggcaaatcacaatcagtgagtaaatagacagcctttctgctgccttgggtttctgtgcagataaacagaaatgctctgattagaaaggaaatgaatggttccactcaaatgtcctgcaatttaggattgcagatttctgccttgaaatacctgtttctttgggacattccgtcctgatgnnnnnnnnnnnnnnnnnnnnnnnnnnnnggggggaatgacatgtttgggtcttttatacatgaaaatttgtttgacaataatctcacaaaacatattttacatctgaacaaaatgcctttttgtttaccgtagcgtatacatttgttttgggattttgtgtgtttgttgggaattttgtttttagccaggtcagtattgatgaggctgatcatttggctctttttttccttccagaagagttgcatcaacaaagttaattgtatttatg

SEQ ID NO: 184149 - DNA, 2309 bp, Homo Sapiens
  misc_feature (145)..(181): n is a, c, g, or t
  misc_feature (231)..(307): n is a, c, g, or t
  misc_feature (2124)..(2157): n is a, c, g, or t
ttgggttgtttattccaaagagtgtggaattttggttggggtggggggagaggagggatgcaactcgccctgtttggcatctaattcttatttttaatttttccgcaccttatcaattgcaaaatgcgtatttgcatttgggtgnnnnnnnnnnnnnnnnnnnnnnnnnnnnnnnnnnnnnaattgagcttgcttctttcttgctttgaccatggaaagaaatatgattcnnnnnnnnnnnnnnnnnnnnnnnnnnnnnnnnnnnnnnnnnnnnnnnnnnnnnnnnnnnnnnnnnnnnnnnnnnnnngagaaacagctacagctttgggtcatttttaactactgtattcccacaaggaatccccagatatttatgtatcttgatgttcagacatttatgtgttgataattttttaattatttaaatgtacttatattaagaaaaatatcaagtactacattttcttttgttcttgatagtagccaaagttaaatgtatcacattgaagaaggctagaaaaaaagaatgagtaatgtgatcgcttggttatccagaagtattgtttacattaaactccctttcatgttaatcaaacaagtgagtagctcacgcagcaacgtttttaataggatttttagacactgagggtcactccaaggatcagaagtatggaattttctgccaggctcaacaagggtctcatatctaacttcctccttaaaacagagaaggtcaatctagttccagagggttgaggcaggtgccaataattacatctttggagaggatttgatttctgcccagggatttgctcaccccaaggtcatctgataatttcacagatgctgtgtaacagaacacagccaaagtaaactgtgtaggggagccacatttacataggaaccaaatcaatgaatttaggggttacgattatagcaatttaagggcccaccagaagcaggcctcgaggagtcaatttgcctctgtgtgcctcagtggagacaagtgggaaaacatggtcccacctgtgcgagaccccctgtcctgtgctgctcactcaacaacatctttgtgttgctttcaccaggctgagaccctaccctatggggtatatgggcttttacctgtgcaccagtgtgacaggaaagattcatgtcactactgtccgtggctacaattcaaaggtatccaatgtcgctgtaaattttatggcactatttttattggaggatttggtcagaatgcagttgttgtacaactcataaatactaactgctgattttgacacatgtgtgctccaaatgatctggtggttatttaacgtacctcttaaaattcgttgaaacgatttcaggtcaactctgaagagtatttgaaagcaggacttcagaacagtgtttgatttttattttataaatttaagcattcaaattaggcaaatctttggctgcaggcagcaaaaacagctggacttatttaaaacaacttgtttttgagttttcttatatatatattgattatttgttttacacacatgcagtagcactttggtaagagttaaagagtaaagcagcttatgttgtcaggtcgttcttatctagagaagagctatagcagatctcggacaaactcagaatatattcactttcatttttgacaggattccctccacaactcagtttcatatattattccgtattacatttttgcagctaaattaccataaaatgtcagcaaatgtaaaaatttaatttctgaaaagcaccattagcccatttcccccaaattaaacgtaaatgttttttttcagcacatgttaccatgtctgacctgcaaaaatgctggagaaaaatgaaggaaaaaattatgtttttcagtttaattctgttaactgaagatattccaactcaaaaccagcctcatgctctgattagataatcttttacattgaacctttactctcaaagccatgtgtggagggggcttgtcactattgtaggctcactggattggtcatttagagtttcacagactcttaccagcatatatagtatttaattgtttcaaaaaaaatcaaactgtagttgttttggcgataggtctcacgcaacacatttttgtannnnnnnnnnnnnnnnnnnnnnnnnnnnnnnnnnaaaaattgcattcattgacttcgcgtagattaaggtatctttttattcattgctcctcaggaaagttaaggtatcaatgagacctttaagccaatcatgtaataaactgcatgtgtctggtccaggagaagtattggaataagccatttcta

SEQ ID NO: 184150 - DNA, 1465 bp, Homo Sapiens
  misc_feature (599)..(632): n is a, c, g, or t
  misc_feature (1326)..(1353): n is a, c, g, or t
ttggcacacatgcagccagcactttggtaagagttaaagagtaaagcagcttatgttgtcaggtcgttcttatctagagaagagctatagcagatctcggacaaactcagaatatattcactttcatttttgacaggattccctccacaactcagtttcatatattattccgtattacatttttgcagctaaattaccataaaatgtcagcaaatgtaaaaatttaatttctgaaaagcaccattagcccatttcccccaaattaaacgtaaatgttttttttcagcacatgttaccatgtctgacctgcaaaaatgctggagaaaaatgaaggaaaaaattatgtttttcagtttaattctgttaactgaagatattccaactcaaaaccagcctcatgctctgattagataatcttttacattgaacctttactctcaaagccatgtgtggagggggcttgtcactattgtaggctcactggattggtcatttagagtttcacagactcttaccagcatatatagtatttaattgtttcaaaaaaaatcaaactgtagttgttttggcgataggtctcacgcaacacatttttgtannnnnnnnnnnnnnnnnnnnnnnnnnnnnnnnnnaaaaattgcattcattgacttcaggtagattaaggtatctttttattcattgccctcaggaaagttaaggtatcaatgagacccttaagccaatcatgtaataactgcatgtgtctggtccaggagaagtattgaataagccatttctactgcttactcatgtccctatttatgatttcaacatggatacatatttcagttctttctttttctcactatctgaaaatacatttccctccctctcttccccccaatatctccctttttttctctcttcctctatcttccaaaccccactttctccctcctccttttcctgtgttctcttaagcagatagcacatacccccacccagtaccaaatttcagaacacaagaaggtccagttcttcccccttcacataaaggaacatggtttgtcagcctttctcctgtttatgggtttcttccagcagaacagagacattgccaaccatattggatctgcttgctgtccaaaccagcaaactttcctgggcaaatcacaatcagtgagtaaatagacagcctttctgctgccttgggtttctgtgcagataaacagaaatgctctgattagaaaggaaatgaatggttccactcaaatgtcctgcaatttaggattgcagatttctgccttgaaatacctgtttctttgggacattccgtcctgatgnnnnnnnnnnnnnnnnnnnnnnnnnnnnggggggaatgacatgtttgggtcttttatacatgaaaatttgtttgacaataatctcacaaaacatattttacatctgaacaaaatgcctttttgtttaccgtagcgtatac

SEQ ID NO: 184151 - DNA, 712 bp, Homo Sapiens
  misc_feature (235)..(262): n is a, c, g, or t
  misc_feature (375)..(418): n is a, c, g, or t
  misc_feature (556)..(572): n is a, c, g, or t
actttgtacaaaaaagttgggatctgcttgctgtccaaaccagcaaactttcctgggcaaatcacaatcagtgagtaaatagacagcctttctgctgccttgggtgtctgtgcagataaacagaaatgctctgattagaaaggaaatgaatggttccactcaaatgtcctgcaatttaggattgcagatttctgccttgaaatacctgtttctttgggacattccgtcctgatgnnnnnnnnnnnnnnnnnnnnnnnnnnnnggggggaatgacatgtttgggtcttttatacatgaaaatttgtttgacaataatctcacaaaacatattttacatctgaacaaaatgcctttttgtttaccgtaacgtatacnnnnnnnnnnnnnnnnnnnnnnnnnnnnnnnnnnnnnnnnnnnnagccaggtcagtattgatgaggctgatcatttggctctttttttccttccagaagagttgcatcaacaaagttaattgtatttatgtatgtaaatagattttaagcttcattataaaatattgttaatgcctataacnnnnnnnnnnnnnnnnngtgtgtgtttctaaggactttttcttaggtttgctaaatactgtagggaaaaaaatgcttctttctactttgtttattttagactttaaaatgagctacttcttattcacttttgtaaacagctaatagcatggttccaa

SEQ ID NO: 184152 - DNA, 1178 bp, Homo Sapiens
  misc_feature (312)..(345): n is a, c, g, or t
  misc_feature (1039)..(1066): n is a, c, g, or t
ttgggttaccatgtctgacctgcaaaaatgctggagaaaaatgaaggaaaaaattatgtttttcagtttaattctgttaactgaagatattccaactcaaaaccagcctcatgctctgattagataatcttttacattgaacctttactctcaaagccatgtgtggagggggcttgtcactattgtaggctcactggattggtcatttagagtttcacagactcttaccagcatatatagtatttaattgtttcaaaaaaaatcaaactgtagttgttttggcgataggtctcacgcaacacatttttgtannnnnnnnnnnnnnnnnnnnnnnnnnnnnnnnnnaaaaattgcattcattgacttcaggtagattaaggtatctttttattcattgccctcaggaaagttaaggtatcaatgagacccttaagccaatcatgtaataactgcatgtgtctggtccaggagaagtattgaataagccatttctactgcttactcatgtccctatttatgatttcaacatggatacatatttcagttctttctttttctcactatctgaaaatacatttccctccctctcttccccccaatatctccctttttttctctcttcctctatcttccaaaccccactttctccctcctccttttcctgtgttctcttaagcagatagcacatacccccacccagtaccaaatttcagaacacaagaaggtccagttcttcccccttcacataaaggaacatggtttgtcagcctttctcctgtttatgggtttcttccagcagaacagagacattgccaaccatattggatctgcttgctgtccaaaccagcaaactttcctgggcaaatcacaatcagtgagtaaatagacagcctttctgctgccttgggtttctgtgcagataaacagaaatgctctgattagaaaggaaatgaatggttccactcaaatgtcctgcaatttaggattgcagatttctgccttgaaatacctgtttctttgggacattccgtcctgatgnnnnnnnnnnnnnnnnnnnnnnnnnnnnggggggaatgacatgtttgggtcttttatacatgaaaatttgtttgacataatctcacaaaacatattttacatctgaacaaaatgccttttttgtttaccgtaccgtatac

SEQ ID NO: 184153 - DNA, 914 bp, Homo Sapiens
  misc_feature (427)..(454): n is a, c, g, or t
  misc_feature (568)..(610): n is a, c, g, or t
  misc_feature (749)..(765): n is a, c, g, or t
ttggctcttcctctatcttccaaaccccactttctccctcctccttttcctgtgttctcttaagcagatagcacatacccccacccagtaccaaatttcagaacacaagaaggtccagttcttcccccttcacataaaggaacatggtttgtcagcctttctcctgtttatgggtttcttccagcagaacagagacattgccaaccatattggatctgcttgctgtccaaaccagcaaactttcctgggcaaatcacaatcagtgagtaaatagacagcctttctgctgccttgggtttctgtgcagataaacagaaatgctctgattagaaaggaaatgaatggttccactcaaatgtcctgcaatttaggattgcagatttctgccttgaaatacctgtttctttgggacattccgtcctgatgnnnnnnnnnnnnnnnnnnnnnnnnnnnnggggggaatgacatgtttgggtcttttatacatgaaaatttgtttgacaataatctcacaaaacatattttacatctgaacaaaatgcctttttgtttaccgtagcgtatacannnnnnnnnnnnnnnnnnnnnnnnnnnnnnnnnnnnnnnnnnnagccaggtcagtattgatgaggctgatcatttggctctttttttccttccagaagagttgcatcaacaaagttaattgtatttatgtatgtaaatagattttaagcttcattataaaaatattgttaatgcctataacnnnnnnnnnnnnnnnnngtgtgtgtgtctaaggactttttcttaggtttgctaaatactgtaggggaaaaaaatgcttcctttctactttgtttattttagactttaaaatgagctacttccttattcacttttgtaaacagctaatagcatggtttccaattttt

SEQ ID NO: 184154 - DNA, 1534 bp, Homo Sapiens
gccaactttgtacaaaaaagttgggtaacctcttatatggactacattcagctgcaaggaaaggaaaaccttgattgcagtggtttaaacaaacagaagattgtttttccacatagcatggattctggagatgggtggctaatggtattggttcaacaactccacgaaggtaggggtcacgtcttggatccttttgccttaatctcagtgctcgttacttcatggtcccaagatggctgctgtatccccaagaatcatgtctgcgttcaaggaaggaggggtggaggaagaggaagggccaaactagctggacccgtcaccttctatcagaaagtaaaacctcgtcagaagtctgtttcctgctctctccctctgcatatcttcacttagatgcccttggcccgagccagctaccattgcacctctagctgcaaacaaagctaagacagcagggaacagaattgtcatggctgaatagaccaatcgtgttccatctactgagactggcacactgcctcctgcaataaaactgggatcccattaccaagagagaaatgcagaattgtgtaccagttagcttttgctgtgtaacaaaccatccccaaacttggcagctagaaacaaaccctgtattttcccacaatcctatgggttggcaatttgggctgggctcaacagggcagttctgctgctcacacctgggatccctcatggagctaaggtcagctgttacctcagctgggcctggatggtctaggatagcccttactcacttgcctggcaggtgacaggctgttggctggaattgcttggttctcctccatgtggcctctccagcaggctagctcaggcttattcacatgatggcttcaggattccaaagagagtgagagtagaagctgaaagacttcttgagttcttggcctggaactgggactaggacagtgtcacttctgctaagttcttttggtcagagcaaatcacaaggctttacccagattcaagggatgagaaacagactacatgtcttgatgaggggaaccacaaagagcttgtggccatttttcacctatcacaaataattttggatgggtatttatttggataaaggtatttccctcttccccctttctctctgtctcatggggcctcactctgccaagttggaaggcactaagacattgtcctggccctcagggtctaggggaagaggtgttggggcaggaagtgagtctctccatgggctggacccactgtagtaggagtgcctccttgtctgcactgctggtatggggttaggccaggtaggacattccagaggggcttctgaaaaccaagagtccctggggaaagggaacagagtaaggcaggccttgttctcactgccctctaagggaacttggtcactcggcacttttaagcctcagtttctccagttcaataataaggacaagagcttttcccatgcattctctttccccgggaaagttgactgaggtgaccagtaatagaattgaaaagggagagtgtcttc

SEQ ID NO: 184155 - DNA, 1673 bp, Homo Sapiens
  misc_feature (1348)..(1413): n is a, c, g, or t
ttggcgagatcgccaacagcagcggcaaagggtgagctgagtgagggggcagagttgggggggaccaggtgtgtccccagggtaggcccctcacttctcccgcccaccccgcagagccctggcgttagaggagaagcggcgtctggaggcccgcatcgcccagctggaggaggagctggaggaggagcagggcaacacggagctgatcaacgaccggctgaagaaggccaacctgcaggtgggtgccaggacttctcccactctgggctctggctggagccaccacggcagagctggccttggacccagccggcagaagcacaggccaagtgccagctgctccccaggcgcttaggggaaaatgtccaggcacctggacctgaaaggtccccctctggcttctgtgttgggtgttcagaagtttctaatcttcccttttctgggagacccaagactctggaccccaagggtttggtgggatcctgctgccaccttcctctggccctgctcatgccctccagccagggccccagccctccccaaggtcactggcccttcttctgcagatcgaccagatcaacaccgacctgaacctggagcgcagccacgcccagaagaacgagaatgctcggcagcagctggaacgccagaacaaggagcttaaggtcaagctgcaggagatggagggcactgtcaagtccaagtacaaggcctccatcaccgccctcgaggccaagattgcacagctggaggagcagctggacaacgagaccaaggagcgccaggcagcctgcaaacaggtgcgtcggaccgagaagaagctgaaggatgtgctgctgcaggtggatgacgagcggaggaacgccgagcagtacaaggaccaggccgacaaggcatctacccgcctgaagcagctcaagcggcagctggaggaggccgaagaggaggcccagcgggccaacgcctcccgccggaaactgcagcgcgagctggaggacgccactgagacggccgatgccatgaaccgcgaagtcagctccctaaagaacaagctcaggcgcggggacctgccgtttgtcgtgccccgccgaatggcccggaaaggcgccggggatggctccgacgaagaggtagatggcaaagcggatggggctgaggccaaacctgccgaataagcctcttctcctgcagcctgagatggatggacagacagacaccacagcctccccttcccagaccccgcagcacgcctctccccaccttcttgggactgctgtgaacatgcctcctcctgccctccgccccgtccccccatcccgtttccctccaggtgttgttgagggcattnnnnnnnnnnnnnnnnnnnnnnnnnnnnnnnnnnnnnnnnnnnnnnnnnnnnnnnnnnnnnnnnnnggcccgggcccaggcagagagcgaccagcaggctcctcagccctctcttgccaaaaagcacaagatgttgaggcgagcagggcagcccccggggaggggccagagttttctatgaatctatttttcttcagactgaggccttttggtagtcggagcccccgcagtcgtcagcctccctgacgtctgccaccagcgcccccactcctcctcctttctttgctgtttgcaatcacacgtggtgacctcacacacctctgccc

SEQ ID NO: 184156 - DNA, 1296 bp, Homo Sapiens
ttggatgaaaaagaagatggaggacagtgtggggtgcctggaaactgctgaggaggtgaagaggaagctccagaaggacctggagggcctgagccagcggcacgaggagaaggtggccgcctacgacaagctggagaagaccaagacgcggctgcagcaggagctggacgacctgctggtggacctggaccaccagcgccagagcgcgtgcaacctggagaagaagcagaagaagtttgaccagctcctggcggaggagaagaccatctctgccaagtatgcagaggagcgcgaccgggctgaggcggaggcccgagagaaggagaccaaggctctgtcgctggcccgggccctggaggaagccatggagcagaaggcggagctggagcggctcaacaagcagttccgcacggagatggaggaccttatgagctccaaggatgatgtgggcaagagtgtccacgagctggagaagtccaagcgggccctagagcagcaggtggaggagatgaagacgcagctggaagagctggaggacgagctgcaggccaccgaagatgccaagctgcggttggaggtcaacctgcaggccatgaaggcccagttcgagcgggacctgcagggccgggacgagcagagcgaggagaagaagaagcagctggtcagacaggtgcgggagatggaggcagagctggaggacgagaggaagcagcgctcgatggcagtggccgcccggaagaagctggagatggacctgaaggacctggaggcgcacatcgactcggccaacaagaaccgggacgaagccatcaaacagctgcggaagctgcaggcccagatgaaggactgcatgcgcgagctggatgacacccgcgcctctcgtgaggagatcctggcccaggccaaagagaacgagaagaagctgaagagcatggaggccgagatgatccagttgcaggaggaactggcagccgcggagcgtgccaagcgccaggcccagcaggagcgggatgagctggctgacgagatcgccaacagcagcggcaaaggagccctggcgttagaggagaagcggcgtctggaggcccgcatcgcccagctggaggaggagctggaggaggagcagggcaacacggagctgatcaacgaccggctgaagaaggccaacctgcagatcgaccagatcaacaccgacctgaacctggagcgcagccacgcccagaagaacgagaatgctcggcagcagctggaacgccagaacaaggagcttatggtcaagctgcacgagatggaggg

SEQ ID NO: 184157 - DNA, 1678 bp, Homo Sapiens
ttggcttttgttttattcctgaaggaacatcagtacccgatcttgaagaaattcaagattcaaaaagaattttaaatacaccaacatgagacatcagtagtcagttggttttcagtaaagcttgttccaagttgttctcaacttaggaagtaattttggtgtgatctagcaaaagagtaggaatcagcgatacaaccactttggaagtttatagtataattgaaattattagaagaattcagcaggttacagacatacttaaactgggattaaaacctcatagtcatttttcttaattgcccttaatattttgacatatagggatacataaatttaaagaatattttttctcagttttttcagatattgccatactgaacctcattctaaactggtgctgtggatagtctttccctctcccctcctgttttagtttaaggaaaggtttccttcatggaaaagcacttttaattttgagaatttcacatttaaaataagccaaaagcctgatgttcacattgtgcttttaaactccgtaacagctgaatacaacataacatagtctcccttgaaattccctccctttttcagtagaggataaatagggtgactccagctgttggaatgagaatggggatacccccaaaataagattctggtgaagaaaaagtcttgtactaagttcccctttaggtgtagccaagtctataatataattatgatcatgaatagactccagaatccacaaagagaagagggcttggatgtcaaaaattcttccattgtggggtaggtggtcggggatgggagaaagggaaaagtcagggaaaggggagaagaaagaaaaacacatttggccttaaaatagcatgcattctcccagaagcccatagtaaagaaaatgacagatcgtggtcagcagactcttatcaaattggtatgtaaaagatttcttcaagctccattttgcagagaccaccacttagagaatcaaaaaattcctgttttgatacttctaagttaaaatatatgttacagtttatctggtacttcatttttcttaactaaaattactttttactttaagcttgaataaaaatcttcattggtaactgtatgtaattaagtggcaacttctctttacctcagtatagttaaaaaccattcatattttaagtgattcatgtataccctgaagccgttaatacaccccagtctctatggtaacatcactaaatgtgggcatagaaactccacagctgtttacaaatttggttacagtgtgctatggtgcatttgtaacactcagatttgtgcccattcaggggcaatttggcactcagattctactctacttcacctaaccacccctaaatctgagttttcagagtgcttctgaagtacagtttaaaaacactttttaaaaagtggagtaaaagtgaggcacattttacaagaacataactcctattaaaacggagtaacaactatgcaaaggtttctatagcagctaggtgagtttgttttccgggtctgtcttaactggcagcttcctgtacatactggtacttatatagctgtaaacgtctgtttcatacatttgccatgcaatgactgtgctctaaaggtgaaatcaatggtaaagaatcctaggattttatggtatgagaaactgatc

SEQ ID NO: 184158 - DNA, 2773 bp, Homo Sapiens
tacaaaaaagttggattccgaaatcctcgtcatggaaggagactgggataaggcagaaaatgacctgaatgaactaaagcctttagtgcattctcctcatgctattgtgaggatgaagtttttgctgctgcagcagaagtacctagaatacctggaggatggcaaggtcctggaggcacttcaagttctacgctgtgaattgacgccgctgaaatacaatacagagcgcattcatgttcttagtgggtatctgatgtgtagccatgcagaagacctacgtgcaaaagcagaatgggaaggcaaagggacagcttcccgatctaaactattggataaacttcagacctatttaccaccatcagtgatgcttcccccacggcgtttacagactctcctgcggcaggcggtggaactacaaagggatcggtgcctatatcacaataccaaacttgataataatctagattctgtgtctctgcttatagaccatgtttgttttaggaggcagttcccatgttatacgcagcagatacttacggagcattgtaatgaagtgtggttctgtaaattctctaatgatggcactaaactagcaacaggatcaaaagatacaacagttatcatatggcaagttgatccggatacacacctgctaaaactgcttaaaacattagaaggacatgcttatggcgtttcttatattgcatggagtccagatgacaactatcttgttgcttgtggcccagatgactgctctgagctttggctttggaatgtacaaacaggagaactaaggacaaaaatgagccagtctcatgaagacagtttgacaagtgtggcttggaatccagatgggaagcgctttgtgactggaggtcagcgtgggcagttctatcagtgtgacttagatggtaatctccttgactcctgggaaggggtaagagtgcaatgcctttggtgcttgagtgatggaaagactgttctggcatcagatacacaccagcgaattcggggctataacttcgaggaccttacagataggaacatagtacaagaagatcatcctattatgtcttttactatttcaaaaaatggccgattagctttgttaaatgtagcaactcagggagttcatttatgggacttgcaagacagagttttagtaagaaagtatcaaggtgttacacaagggttttatacaattcattcatgttttggaggccataatgaagacttcatcgctagtggcagtgaagatcacaaggtttacatctggcacaaacgtagtgaactgccaattgcggagctgacagggcacacacgtacagtaaactgtgtgagctggaacccacagattccatccatgatggccagcgcctcagatgatggcactgttagaatatggggaccagcaccttttatagaccaccagaatattgaagaggaatgcagtagcatggatagttgatggtgaatttggagcagacgacttctgtttaacttaaaattagtcgtattttaatggcttgggatttggtgcaaacaaacatgattgatagctggacagacatgctcgtcatgaaaaaagaaccatttctgaagcccgattggggccaaacatttacaccttgcttcatagtaaccagttgagatgaagcacgtcgttagaacgttgttggacaccatgttgaattattcccccatcggttgtgaagaactgtgctacattcaggcttacccattgaactcagtatatatatttttttccttcctgtcttttgtctggcaggataccattcttgttgctcttctgtgtaatgaagtttaaatgcttgtttggaaaactttatttaacagtttagaaggcttgatagaaagagtgcattagtctgaagagtatacattggataggaaagaatttccttcttttgtttctccaaatctttccgccttatttagcttgagatctttgcagcttggttcatggattctagccttgcccgttgcgcagtatatactgatccagatgataaaccagtgaactatgtcaaaagcactctcaatattacatttgacaaaaagttttgtacttttcacatagcttgttgccccgtaaaagggttaacagcacaattttttaaaaataaattaagaagtatttataggattaaagtgacttcatttgtatacatttggaatctaaaccagcttaaaaacagtttcctcaatgacttagatacacagtataactgatgctcttctggaataccacatgagacatggtcagaaacagtgcttggaaggacattacacaagaaattcagagtaatgctttgaagatttccccccttttgttttattcctgaaggaacatcagtacccgatcttgaagaaattcaagattcaaaaagaattttaaatacaccaacatgagacatcagtagtcagttggttttcagtaaagcttgttccaagttgttctcaacttaggaagtaattttggtgtgatctagcaaaagagtaggaatcagcgatacaaccactttggaagtttatagtataattgaaattattagaagaattcagcaggttacagactcttatcaaattggtatgtaaaagatttcttcaagctccattttgcagagaccaccacttagagaatcaaaaaattcctgttttgatacttctaagttaaaatatatgttacagtttatctggtacttcatttttcttaactaaaattactttttactttaagcttgaataaaaa

SEQ ID NO: 184159 - DNA, 1666 bp, Homo Sapiens
ccaactttgtacaaaaaagttggggactttattgagaagcatggatgttagtgaaagttactacagtgtggagtgttgagaccagacaccttttgctgtctcatggggcagctacaagcatgaacgggaccagggaatggcagcagcatgcagaatcttagcactctttagcacaatattttgtattagggaacttttaattgacatgagatgctaaagtcagacattggaattggaagaactataaagtgtgattcgatcgtcaagacatcacttggatttcttaatcttaaatgcttatggaagatgtgaagttgaggtgctgcattctagaacttcaatatgtagcttactctttttttccccccttcttaaaccaccagtggttcatttttaaggttttttcatcaagagaagaataactttactaaattttatttctttatttgcaaaagaatctttattaaaacaaacaatcttaactatgcacatgatgtgaccagatcatcttgaaaatattcctctttagtaggaactctttgtttttaactcttggtatggtcagaatataatacttccataattacttataattctttccggttactggggctataaatacaactttttaaatgaaatttatgttattatcctgctcaaagtaccattatggtttccatatggtaattacattggaaagttctgcaataagattctagttctctcttttctttaagcttatggttgaaggttaaccttgtttgtgcagattaccaaattactgctgatgtagtatgataaagtcagcttcttggatacagacacacccagggcagctgccaatcagaaatgcaaattgctaaattccaaacagaaccagtgactttgctgctacatatttactaaattgaccactttgattcttgcttgtttgtctcagttatagggagttttgtacatggtgcctcttgttttccatcttcatggccttttctgttgagaaacatctaaagtgtattaacagtgcatgcttttactttgtaaatgtggtgccaaatccctgtttgccatcgtttttactgtaccgatgttaactgtagtaatccttagccagtatgttcttttgctgaaactgttgcattttgggacttttttccactttgtcatgtgtacatttttaatctgttatagttggcggcagtattaaaatggtgagtaaagagcccaggtttgctcctgtttgtaactagtcttttctggaaatactgtcttctgtttccttttgcctttgcagaatgtgctttagcctttgtctgagaatgggtttaggtagaagggtttcctgaaagtctagtcttttggtgtaatagtattgttgaaccttaggttttatgttatatctgcatatgagtgatatgtgatcatgattcattttgcagatttacattttgcttgtgtggaaagttacgttcacttcaacctacagacccttttgtataatgtacagcaaatgtcattaaatattgaatgctctattgggggaagacaaatgaagagaatgcattttgagcatttcaaatcagtagtttgggcagtgccttttggggtccaatctttttggattggattctatttcatcttttgatgtgacttttcactagtttac

SEQ ID NO: 184160 - DNA, 1658 bp, Homo Sapiens
ttggagggagctgacggagagggccaccgcccagcaatagacggtgcctcagcctgccgagccgcagtttccgtggtgtgagtgagtccgggcccgtgtcccctctcccgccgccgccatgggctgcacgttgagcgccgaagacaaggcggcagtggagcgaagcaagatgatcgaccgcaacttacgggaggacggggaaaaagcggccaaagaagtgaagctgctgctactcggtgctggagaatctggtaaaagcaccattgtgaaacagatgaaaatcattcatgaggatggctaggcagaggatgaatgtaaacaatataaagtagttgtctacagcaatactatacagtccatcattgcaatcataagagccatgggacggctaaagattgactttggggaagctgccagggcagatgatgcccggcaattatttgttttagctggcagtgctgaagaaggagtcatgactccagaactagcaggagtgattaaacggttatggcgagatggtggggtacaagcttgcttcagcagatccagggaatatcagctcaatgattctgcttcatattatctaaatgatctggatagaatatcccagtctaactacattccaactcagcaagatgttcttcggacgagagtgaagaccacaggcattgtagaaacacatttcaccttcaaagacctatacttcaagatgtttgatgtaggtggccaaagatcagaacgaaaaaagtggattcactgttttgagggagtgacagcaattatcttctgtgtggccctcagtgattatgaccttgttctggctgaggacgaggagatgaaccgaatgcatgaaagcatgaaactgtttgacagcatttgtaataacaaatggtttacagaaacttcaatcattctcttccttaacaagaaagacctttttgaggaaaaaataaagaggagtccgttaactatctgttatccagaatacacaggttccaatacatatgaagaggcagctgcctatattcaatgccagtttgaagatctgaacagaagaaaagataccaaggagatctatactcacttcacctgtgccacagacacgaagaatgtgcagtttgtttttgatgctgttacagatgtcatcattaaaaacaacttaaaggaatgtggactttattgagaagcatggatgttagtgaaagttactacagtgtggagtgttgagaccagacaccttttgctgtctcatggggcagctacaagcatgaacgggaccagggaatggcagcagcatgcagaatcttagcactctttagcacaatattttgtattagggaacttttaattgacatgagatgctaaagtcagacattggaattggaagaactataaagtgtgattcgatcgtcaagacatcacttggatttcttaatcttaaatgcttatggaagatgtgaagttgaggtgctgcattctagaacttcaatatgtagcttactctttttttccccccttcttaaaccaccagtggttcatttttaagttttttcatcaagagaagaataactttactaaattttatttctttatttgcaaaagaatctttattaaaacaacaatcttacctatgcacatgatgtgaccagatcatcttg

SEQ ID NO: 184161 - DNA, 2002 bp, Homo Sapiens
  misc_feature (832)..(842): n is a, c, g, or t
  misc_feature (1356)..(1410): n is a, c, g, or t
  misc_feature (1532)..(1587): n is a, c, g, or t
ttggctcgatgtattttttcagcaattgatgctgtttactgtgctcgttttgttgaattggtacatcaacagaaaactccaaatttttccacacttctttgctatgatcgagttttctctgacataatttacacagttgcaagctgtactgaaaatgaagccagtcgatacggaaggtttctttgctgcatgttagagactgtgaccaggtggcatagtgatagagccacatatgaaaaggaatgtggaaactatccaggattccttaccatattacgggcaactggatttgatggtggaaataaggctgatcaattagactatgaaaattttcgacatgttgtacataaatggcattacaaactaaccaaggcatcggtacattgccttgaaacaggcgaatatactcacatcaggaatatcttgattgtgctaacaaaaatacttccttggtacccaaaagttttgaatctgggtcaagctttggaaagaagagtacacaaaatctgccaagaagaaaaagagaagaggccagatctatatgcattggctatggggtaacaaaattatattttaatgtgatttacaagactagatgacagaaggattctgaagactttaaaatgttttacagtgttgaagtttatcttctgccttcaggagattatgggagattatgcgatcatgtttccacaggctggtgagagttaccacttctgattatcaacttccggtctatactggatgatagtttttttaaagtcatgtataatatttcttgattgggaggaaatataattttatcatcatagttaacagatcttcaagagtnnnnnnnnnnngccatcttagtttaaggattagtttatagtgaaattgtaatttttaagaaagctgggcgttctataaaaaccttcaagaacttattaaaaattggtattttttaattctctagaaccacatagtagaatgaataacttgctaattttattcttaaaaacctcatgtttatgttttttgatttgtgtttgtatatttaaacactttgtgcgactttcagctactctgggcagttgaaaagtagaaagtcatacatgatacctgaaaatgagtttcatcacaaagacccccctccgaggaatgcagttgccagtgtgcaaaatgggcctggtggtgggccttcttcatcatcaataggaagtgcatctaaatcggatgaaagcagtactgaggagactgataaatcaagggagagatctcagtgtggtgtgaaagctgttaataaagcttctagtaccacacctaaagggaattcaagcaatggaaatagtggctctaacagcaacaaagctgttnnnnnnnnnnnnnnnnnnnnnnnnnnnnnnnnnnnnnnnnnnnnnnnnnnnnnnnctccagctactactccagaggccagggtacttggtaaagatggtaaagaaaaaccaaaggaagagcggccaaataaagatgaaaaagcaagagagaccaaggaaagaacgccgaagtctgannnnnnnnnnnnnnnnnnnnnnnnnnnnnnnnnnnnnnnnnnnnnnnnnnnnnnnnccactgtccccaacgcagaatcaaaatcaactcaagaaagggaaagagagaaggagccatccagagaaagagatatagcaaaggaaatgaaatcaaaggaaaatgttaaaggaggagaaaaaacaccagtttctgggtccttgaaatcacctgttcccagatcagatattccagagcctgaaagggaacaaaaacgccgcaaaattgatactcacccttctccatcacattccctccacagtaaaggttagtatagcctgaggaaggcagcgtccatgttaggctcacctgtttggaataccagtgtcctgacttccttcaagtcttatgccaagcattcactggagccactggaggttttatattgcattagaaaatgaatttttctatattggtggactgattttttttccta

SEQ ID NO: 184162 - DNA, 2243 bp, Homo Sapiens
  misc_feature (553)..(575): n is a, c, g, or t
ttggtggatttacagtgtttttggataattttgccccagaagtttattaaaattggcaagaatcgtctgtgaagtgaattgatagtagtgaacaattcagcaagctacttaaaaagagacccaggcagcatttcttcagtattttggttcaaacggattatataactggttacagtatttcagctggtggtaatttttgcctccccttcccccaccccgttgttggggttcttcagccgaaactgagagacgttgatttgtgtactgagtagtttcagcagtttcaaatgactgagtattgctgaagtttcatggcagtttatttttacctttattgaaagttttaggaatttttgacttcagctctttcatgtcacaatgggacactttttctgaatgaagagattgaaagaatacagagtttttttccttttatcttttatttacgtggaaatttaagatgttgcagttttccggcagcatggtagtattgagatagctatgtgtgtctctgtatatgctgatgtttaggaatgctcttcagatgtgaaannnnnnnnnnnnnnnnnnnnnnnggctcgtaaattggatatttcatctggagtggacaagtacaacagtggcaagtacatggaataataaagaagactttgatcttaaatctaaagaacttggctaattcgggagatagccatatgaaaactttaaaacagaagtatgggtagctgacttgaagtaactctatgtcaaatagtcgtagttaagtatcttcaaagaacttcgatattatttcagaggatacaaaataaaaatacaaactggaaaataaagattacagagaaaaaaccaacaccttcctgtgcagtcctgttggaattttcgtcattgaattttgagaagcattctgaaaactttgcatggacagagaatcgttatgatgtgaaccgtcgacgacacaactcttcagatggctttgattctgctattggacgtcctaatggaggtaactttggaaggaaagaaaaaaatggatggcgtacacatggaagaaatggtacagaaaacataaatcatcgaggtggataccatggtggaagttcccgttctcgtagcagtattttccatgcaggaaaaagccaaggactacatgaaaacaacatacctgacaatgaaaccgggaggaaagaagacaagagagaacgcaaacagtttgaagctgaggattttccgtctttaaatcctgagtatgagagagaaccaaatcacaataagtctttagctgcaggtgtgtgggaatatcctccgaatcctaaatctagagctccaaggatgctggtcattaagaaaggtaatacaaaagacttacagctatctggattcccagtagtaggaaatcttccgtcacagccagttaagaatggaactggtccaagtgtttataaaggtttagtccctaaacctgctgctccacctacaaaacctacacaatggaaaagccaaacaaaagaaaataaagttggaacttctttccctcatgagtccacatttggcgttggcaactttaatgcttttaaatcaactgccaagaactttagtccatctacaaattcagtgaaagagtgtaatcgctcaaattcctcttctcctgttgacaaacttaatcagcagcctcgtctaaccaaactgacacgaatgcgcactgataagaagagtgaatttttgaaagcattgaaaagagacagagtagaagaggaacatgaagatgaaagccgtgctggctcagagaaggatgacgactcatttaatttacataacagcaatagtactcaccaagaaagggatataaaccgaaacttcgatgaaaatgaaattcctcaagagaatggcaatgcctcagtgatttcccagcagatcattcggtcttcaaccttcccacaaactgatgttctttcaagttcacttgaggcagaacacagattgttaaaggaaatgggctggcaggaagacagtgaaaatgatgaaacatgtgctcccttaactgaggatgaaatgagagaattccaagttattagtgaacagttacagaagaatggtctgagaaaaaatggtattttgaaaaatggcttgatctgtgacttcagtttggaccgtggaagaacagcactttcaaacccacactgagaatgatgaccagagacaagtagcagtgatacatcagatgacgacgatggtgtgaaggattt

SEQ ID NO: 184163 - DNA, 1624 bp, Homo Sapiens
ttggctggaatatgaatgagccaaattgtgctgttccattgacactggttgctacagaattaactttactcggagatccgaggagccatcggcagttcccaggagtaagaacctgagagcgtgtgagaatttgagagggaagatctgatctcctagaattagagttggtacagaaaccatttcagctccaaaaatgttggaggaagatatggaagtcgccataaagatggtggttgtagggaatggagcagttggaaaatcaagtatgattcagcgatattgcaaaggcatttttacaaaagactacaagaaaaccattggagttgattttttggagcgacaaattcaagttaatgatgaagatgtcagactaatgttatgggacactgcaggtcaggaggaatttgatgcaattacaaaggcctactatcgaggagcccaggcttgtgtgctcgtgttctctaccacagatagggaatcttttgaagcagtttccagttggagagagaaagtagtagccgaagtgggagatataccaactgtacttgtgcaaaacaagattgatcttctggatgattcttgtataaagaatgaggaagctgaggcactggcaaaaaggttaaagttaagattctacagaacatcagtgaaagaagatctaaatgtgaatgaagtttttaagtatttggctgaaaaataccttcagaaactcaaacaacaaatagctgaggatccagaactaacgcattcaagtagtaacaagattggtgtctttaatacatctggtggaagtcactccggtcagaattcaggtaccctcaatggtggagatgtcatcaatcttagacccaacaaacaaaggaccaagaaaaacagaaatccttttagcagctgtagcataccctaagatgttttgggaggaaaacaattgaattacattgtgcaatgcattaagaaacccatccagctgtcatggtatgttacaaggttttcagcagactttgctcctaatggctctctgaaagtgacagacttaaatattgctctgcagtgcttttcagaatgtagagtgagacctctggtggaaaaattattgccctgtggactcctttaattttttttacattagacgaagcttctcctgtttgtaaaggaatgctataagaaatttcaaacacaggttttgcggaattttaaatgctggaaaacataaatgaaatgcctaaatatattgttacagattttaatactgtggatcaaggaaagatagcaagcattcttttcctgaaattggtcatgtagcttttctgcgaaatagtattgaatctgaatactttcacaaaataatactgaaaggtaaaccctaaatcttgccagactgcattagtattttggcattgaaacttgtgcaatatctgtgtaatgtagaatgtggggtgtgcatgcagatgtctggtactggagtaagctgaagtatgtgcagtatttaagaaaatgtacattctaattaattcacttataaaaccatttacatattgtgtatatgtttttattttcaaatgataaactctagacatatattttgcaaaatgagcttgggtttaaaaagtgctttgtgccaaaa

SEQ ID NO: 184164 - DNA, 1732 bp, Homo Sapiens
  misc_feature (651)..(683): n is a, c, g, or t
ccattgccaactttgtacaaaaaagttggtgaagatatttggtgggagttatatcagtgaagcagtttggtttatattcttatgttatcaccttccaaacaaaagcacttactttttttggaagttatttaatttattttagactcaaagaatataatcttgcactactcagttattactgtttgttctcttattccctagtctgtgtggcaaattaaacaatataagaaggaaaaatttgaagtattagacttctaaataaggggtgaaatcatcagaaagaaaaatcaaagtagaaactactaattttttaagaggaatttataacaaatatggctagttttcaacttcagtactcaaattcaatgattcttccttttattaaaaccagtctcagatatcatactgatttttaagtcaacactatatattttatgatcttttcagtgtgatggcaaggtgcttgttatgtctagaaagtaagaaaacaatatgaggagacattctgtctttcaaaaggtaatggtacatacgttcactggtctctaagtgtaaaagtagtaaattttgtgatgaataaaataattatctcctaattgtatgttagaataattttattagaataatttcatactgaaattattttctccnnnnnnnnnnnnnnnnnnnnnnnnnnnnnnnnnttattcatgctctcatatatattttaaaaacactacttttgcttttttatttaccttttaagacattttcatgcttccaggtaaaaacagatattgtaccatgtacctaatccaaatatcatataaacattttatttatagttaataatctatgatgaaggtaattaaagtagattatggcctttttaagtattgcagtctaaaacttcaaaaactaaaatcattgtcaaaattaatatgattattaatcagaatatcagaatatgattcactatttaaactatgataaattatgataatatatgaggaggcctcgctatagcaaaaatagttaaaatgctgacataacaccaaacttcattttttaaaaaatctgttgttccaaatgtgtataattttaaagtaatttctaaagcagtttattataatggtttgcctgcttaaaaggtataattaaacttcttttctcttctacattgacacacagaaatgtgtcaatgtaaagccaaaaccatcttctgtgtttatggccaatctattctcaaagttaaaagtaaaattgtttcagagtcacagttccctttatttcacataagcccaaactgatagacagtaacggtgtttagttttatactatatttgtgctatttaattctttctattttcacaattattaaattgtgtacactttcattacttttaaaaatgtagaaattcttcatgaacataactctgctgaatgtaaaagaaaattttttttcaaaaatgctgttaatgtatactactggtggttgattggttttattttatgtagcttgacaattcagtgacttaatatctattccatttgtattgtacataaaattttctagaaatacacttttttcccaagtgtaagtttgtgaatagattttagcatgatgaaactgtcataatggtgaatgttcaatctgtgtaagaaaacaaactaaatgtagttgtcacactaaaatttaattggatattgatgaaatcattggcctggcaaaacaaaacatgttgaattcccc

SEQ ID NO: 184165 - DNA, 1449 bp, Homo Sapiens
  misc_feature (1183)..(1215): n is a, c, g, or t
ttgggaaaaaggtgattactcctgaagtgagttttacacgaactgaaatgagcatgcattttcttgtatgatagtgactagcactagacatgtcatggtcctcatggtgcatataaatatatttaacttaacccagattttatttatatctttattcaccttttcttcaaaatcgatatggtggctgcaaaactagaattgttgcatccctcaattgaatgagggccatatccctgtggtattcctttcctgctttggggctttagaattctaattgtcagtgattttgtatatgaaaacaagttccaaatccacagcttttacgtagtaaaagtcataaatgcatatgacagaatggctatcaaaagaaatagaaaaggaagacggcatttaaagttgtataaaaacacgagttattcataaagagaaaatgatgagtttttatggttccaatgaaatatgttggggtttttttaagattgtaaaaataatcagttactggtatctgtcactgacctttgtttccttattcaggaagataaaaatcagtaacctaccccatgaagatatttggtgggagttatatcagtgaagcagtttggtttatattcttatgttatcaccttccaaacaaaagcacttactttttttggaagttatttaatttattttagactcaaagaatataatcttgcactactcagttattactgtttgttctcttattccctagtctgtgtggcaaattaaacaatataagaaggaaaaatttgaagtattagacttctaaataaggggtgaaatcatcagaaagaaaaatcaaagtagaaactactaattttttaagaggaatttataacaaatatggctagttttcaacttcagtactcaaattcaatgattcttccttttattaaaaccagtctcagatatcatactgatttttaagtcaacactatatattttatgatcttttcagtgtgatggcaaggtgcttgttatgtctagaaagtaagaaaacaatatgaggagacattctgtctttcaaaaggtaatggtacatacgttcactggtctctaagtgtaaaagtagtaaattttgtgatgaataaaataattatctcctaattgtatgttagaataattttattagaataatttcatactgaaattattttctccnnnnnnnnnnnnnnnnnnnnnnnnnnnnnnnnnttattcatgctctcatatatattttaaaaacactacttttgcttttttatttaccttttaagacattttcatgcttccaggtaaaaacagatattgtaccatgtacctaatccaaatatcatataaacattttatttatagttaataatctatgatgaagtaattaaagtagattatgggcctttttaagtattgcagtctaaaacttcaaaaactaaaatcattgtcaaaatt

SEQ ID NO: 184166 - DNA, 1689 bp, Homo Sapiens
ttggggctgtgggttagttgtgccgttctgctggaacaccgtgggaaggcagtagacgcgggcagtcagctagcagagacctgtcggccatggagcctaatgatagtaccagtaccgctgtggaggagcctgacagcttggaggtgttggtgaagaccttggactctcaaactcgtacctttattgtgggggcccagatgaatgtaaaagagtttaaggagcacattgctgcctctgtcagcatcccatctgaaaaacaacggctcatttaccagggacgagttctgcaagatgataagaagcttcaggaatacaatgttgggggaaaggttatccacctggtggaacgggctcctcctcagactcacctcccttctggggcatcttctgggacggggtctgcctcagccactcatggtgggggatccccccctggtactcgggggcctggggcctctgttcatgaccggaatgccaacagctatgtcatggttggaaccttcaatcttcctagtgacggctctgctgtggatgttcacatcaacatggaacaggccccgattcagagtgagccccgggtacggctggtgatggctcagcacatgatcagggatatacagaccttactatcccggatggagtgtcgaggagggccccaaccgcagcacagtcagccgcccccgcagccaccggctgtgaccccggagccagtagccttgagctctcaaacatcagaaccagttgaaagtgaagcacctccccgggagcccatggaggcagaagaagtggaggagcgtgccccagcccagaacccggagctcactcctggcccagccccagcgggcccaacacctgccccggaaacaaatgcacccaaccatccttcccctgcggagtatgtcgaggtgctccaggagctacagcggctggagagtcgcctccagcccttcttgcagcgctactacgaggttctgggtgctgctgccaccacggactacaataacaatcacgagggccgggaggaggatcagcggttgatcaacttggtaggggagagcctgcgactgctgggcaacacctttgttgcactgtctgacctgcgctgcaatctggcctgcacgcccccacgacacctgcatgtggtccggcctatgtctcactacaccacccccatggtgctccagcaggcagccattcccatacagatcaatgtgggaaccactgtgaccatgacaggaaatgggactcggccccccccaactcccaatgcagaggcacctccccctggtcctgggcaggcctcatccgtggctccgtcttctaccaatgtcgagtcctcagctgagggggctcccccgccaggtccagctcccccgccagccaccagccacccgagggtcatccggatttcccaccagagtgtggaacccgtggtcatgatgcacatgaacattcaagattctggcacacagcctggtggtgttccgagtgctcccactggccccctgggaccccctggtcatggccaaaccctgggctccaccctcatccagctgccctccctgccccctgagttcatgcacgccgtcgcccaccagatcactcatcaaccatggtggcagctgttgcctccgcggccgcagacagcagtgccagcttcccaacagctcaacccgggtggtgattgcc

SEQ ID NO: 184167 - DNA, 1575 bp, Homo Sapiens
  misc_feature (805)..(873): n is a, c, g, or t
ttggctctgggtagagaaagggaagggctgagtgggtgggttgaaggggtccaggttcaaggttacatcagacccgccccccaggctccaccctcatccagctgccctccctgccccctgagttcatgcacgccgtcgcccaccagatcactcatcaggccatggtggcagctgttgcctccgcggccgcaggtaatgacctggaaggggaggcttgggaggtagggcacagtccatggtggcagctggctggcaagggcctggccctcagccctcttcggtctgtctcttctgccacccacaggacagcaggtgccaggcttcccaacagctccaacccgggtggtgattgcccggcccactcctccacaggctcggccttcccatcctggagggcccccagtctctgggacactgcagggcgccggtctgggtaccaatgcctcgttggcccagatggtgagcggccttgtggggcagcttcttatgcagccagtccttgtggctcaggggaccccaggtatggctccaccgccagcccctgccactgcttctgccagtgctggcaccaccaacacagctaccacagctggccccgctcctggggggcctgcccagcctccacccacccctcaaccctccatggctgatcttcagttctctcagcttctggggaacctgctagggcctgcagggccaggggctggagggcctggtgtggcttctcccaccatcactgtggcgatgcctggtgtccctgcctttctccaaggcatgactgacttcttgcaggcaacacagacannnnnnnnnnnnnnnnnnnnnnnnnnnnnnnnnnnnnnnnnnnnnnnnnnnnnnnnnnnnnnnnnnnnnggctccccttctggtggcgcagggagtcctggaggcctgggtcttgagagcctgtcaccggagttttttacctcagtggtgcagggtgtgctcagctccctgctgggctccctgggggctcgggctggcagcagtgaaagtattgctgccttcatacaacgcctcagtggatccagcaacatctttgagcctggagctgatggggcccttggattctttggggccttgctttctcttctgtgccagaacttctctatggtggacgtagtgatgcttctccatgggcatttccagccactacaacggctccagccccagctgcgatccttcttccaccagcactacctgggtggtcaggagcccacacccagtaacatccggatggcaacccacacattgatcacggggctagaagagtatgtgcgggagagtttttccttggtgcaggttcagccaggtgtggacatcatccggacaaacctggaatttctccaagagcagtttaatagcattgctgcgcatgtgctgcattgcacagatagtggatttggggcccggttgctggagttgtgtaaccaaggcctgtttgaatgcctggccctaaacctgcactgcttgggggggacagcagatggagcttgctgctgttatcaatggccgaatcgtcgtatgtctcgtgggggtgaatccctcctttggtga

SEQ ID NO: 184168 - DNA, 1043 bp, Homo Sapiens
  misc_feature (233)..(266): n is a, c, g, or t
ttggctttaaagtattactattaactgacttcagaagtacctgccatccaatacggtcattagattgggtcatcttgattagattagattagattagattgtcaacagattgggccatccttactttatgataggcatcattttagtgtgttacaatagtaacagtatgcaaaagcagcattcaggagccgaaagatagtctgaagtcattcagaagtggtttgaggtttctnnnnnnnnnnnnnnnnnnnnnnnnnnnnnnnnnncaccttaagggaggatttaatttgctcccaactgattgccacttaaatgaaaatttaaaaatgaataaaaagacatacttctcagctgcaaatattatggagaattggggcacccacaggaatgaagagagaaagcagctccctaacttcaaaaccattttggtacctgacaacaagagcattttagagtaattaatttaataaagtaaattagtattgctgcaaatagttaaattatatttatttgaattgatggtcaagagattttccattttttttacagactgttcagtgtttgtcaagctttctggcataaatatgtactcaaaaggcatttccgcttacaatttgtagaaacacaaaatgcgttttccatacagcagtgcctatatagtgactgatttttaactttcaatgtccatctttcaaaggaagtaacaccaaggtacaatgttaaaggaatattcactttacctagcagggaaaaatacacaaaaactgcagatacttcatatagcccattttaacttgtataaactgtgtgacttgtggcgtcttataaataatgcactgtaaagattactgaatagttgtgtcatgttaatgtgcctaatttcatgtatcttgtaatcatgattgagcctcagaatcatttggagaaactatattttaaagaacaagacatacttcaatgtattatacagataaaagtattacatgtgtttgattttaaaagggcggacattttattaaaatcaatattgtttttgctttttc

SEQ ID NO: 184169 - DNA, 1084 bp, Homo Sapiens
ttggcttctttaataagcaggagcgaaaaagacaaattccaaagaggattgttcagttcaagggaatgaagaattcagaataattttggtaaatggattccaatatggggaataagaataagctgaacagttgacctgctttgaagaaacatactgtccatttgtctaaaataatctataacaaccaaaccaatcaaaatgaattcaacattattttcccaggttgaaaatcattcagtccactctaatttctcagagaagaatgcccagcttctggcttttgaaaatgatgattgtcatctgcccttggccatgatatttaccttagctcttgcttatggagctgtgatcattcttggtgtctctggaaacctggccttgatcataatcatcttgaaacaaaaggagatgagaaatgttaccaacatcctgattgtgaacctttccttctcagacttgcttgttgccatcatgtgtctcccctttacatttgtctacacattaatggaccactgggtctttggtgaggcgatgtgtaagttgaatccttttgtgcaatgtgtttcaatcactgtgtccattttctctctggttctcattgctgtggaacgacatcagctgataatcaaccctcgagggtggagaccaaataatagacatgcttatgtaggtattgctgtgatttgggtccttgctgtggcttcttctttgcctttcctgatctaccaagtaatgactgatgagccgttccaaaatgtaacacttgatgcgtacaaagacaaatacgtgtgctttgatcaatttccatcggactctcataggttgtcttataccactctcctcttggtgctgcagtattttggtccactttgttttatatttatttgctacttcaagatatatatacgcctaaaaaggagaaacaacatgatggacaagatgagagacaataagtacaggtccagtgaaaccaaagaatcaatatcatgctgctctccattgtggtagcatttgcagtctgctggctccctcttaccatctttaacactgtgtttgattggaatcatcagatcattgctacctg

SEQ ID NO: 184170 - DNA, 2253 bp, Homo Sapiens
  misc_feature (2038)..(2071): n is a, c, g, or t
ttggctgagcaggagaaataccagcggatcttccccactctgctcccttccattcccacccttccttctttaataagcaggagcgaaaaagacaaattccaaagaggattgttcagttcaagggaatgaagaattcagaataattttggtaaatggattccaatatggggaataagaataagctgaacagttgacctgctttgaagaaacatactgtccatttgtctaaaataatctataacaaccaaaccaatcaaaatgaattcaacattattttcccaggttgaaaatcattcagtccactctaatttctcagagaagaatgcccagcttctggcttttgaaaatgatgattgtcatctgcccttggccatgatatttaccttagctcttgcttatggagctgtgatcattcttggtgtctctggaaacctggccttgatcataatcatcttgaaacaaaaggagatgagaaatgttaccaacatcctgattgtgaacctttccttctcagacttgcttgttgccatcatgtgtctcccctttacatttgtctacacattaatggaccactgggtctttggtgaggcgatgtgtaagttgaatccttttgtgcaatgtgtttcaatcactgtgtccattttctctctggttctcattgctgtggaacgacatcagctgataatcaaccctcgagggtggagaccaaataatagacatgcttatgtaggtattgctgtgatttgggtccttgctgtggcttcttctttgcctttcctgatctaccaagtaatgactgatgagccgttccaaaatgtaacacttgatgcgtacaaagacaaatacgtgtgctttgatcaatttccatcggactctcataggttgtcttataccactctcctcttggtgctgcagtattttggtccactttgttttatatttatttgctacttcaaggtaagaaaactttttttctatcatttccatttttaccttctttacacagaattcctcatcaaatgagtgtttctatttaaacttttttcttccatagatatatatacgcctaaaaaggagaaacaacatgatggacaagatgagagacaataagtacaggtccagtgaaaccaaaagaatcaatatcatgctgctctccattgtggtagcatttgcagtctgctggctccctcttaccatctttaacactgtgtttgattggaatcatcagatcattgctacctgcaaccacaatctgttattcctgctctgccacctcacagcaatgatatccacttgtgtcaaccccatattttatgggttcctgaacaaaaacttccagagagacttgcagttcttcttcaacttttgtgatttccggtctcgggatgatgattatgaaacaatagccatgtccacgatgcacacagatgtttccaaaacttctttgaagcaagcaagcccagtcgcatttaaaaaaatcaacaacaatgatgataatgaaaaaatctgaaactacttatagcctatggtcccggatgacatctgtttaaaaacaagcacaacctgcaacatactttgattacctgttctcccaaggaatggggttgaaatcatttgaaaatgactaagattttcttgtcttgctttttactgcttttgttgtagttgtcataattacatttggaacaaaaggtgtgggctttggggtcttctggaaatagttttgaccagacatctttgaagtgctttttgtgaatttatgcatataatataaagacttttatactgtacttattggaatgaaatttctttaaagtattactattaactgacttcagaagtacctgccatccaatacggtcattagattgggtcatcttgattagattagattagattagattgtcaacagattgggccatccttactttatgataggcatcattttagtgtgttacaatagtaacagtatgcaaaagcagcattcaggagccgaaagatagtctgaagtcattcagaagtggtttgaggtttctgnnnnnnnnnnnnnnnnnnnnnnnnnnnnnnnnnncaccttaagggaggatttaatttgctcccaactgattgccacttaaatgaaaatttaaaaatgaataaaaagacatacttctcagctgcaaatattatggagaattggggcacccacaggaatgaagagagaagcagctccctaacttcaaaccattttggtacctgacacagagcatttta

SEQ ID NO: 184171 - DNA, 1255 bp, Homo Sapiens
ggaatattttaacccaataaggaatagttccagtagcttaagcaaaatacatccttattgggttaagctactggaactattccttaaagttgctcctctgaacaaggagtaaaatttatatatatgaaatttgtgactaaagattttgatttgttattggaccttatattattgtaaaacaaaaaattgaaccttttaaaaaataatattatttcttaaacttttgaaattgtgttaattttagtccttgaaactgaattattttttttggtattaccttgttgtttaaaatcttgtttgattattggcacaatcattctgaatcacatcaacaaatcactatttttaaagaataatttctatattgtttcttcagaccttatttaatcctaataagactgtggtgaagatgtttgttgtgatatatgatttacgagatatgccagccaatcatcagacattcctacgacaaagaactttttctgtacctgttaaacaagaagtgaagagaagtgttaataaagagaacatccgacacacagaagaacggttattacgctacctcatacatctgaggttccagagttctaaatctggaaagatctacctccatagagacgtacggctcctgttctctagaaagtcaatggaggttgatagcggtgctgcatatgaactcaaatcttacactgaatcaccaacaaaccctcagttttcaccaagatgttgataaggagtgatgatttaaagtatttactcagtacccaagtttgcaagtaaaaattagcatagaatggagtgtaccaaattaacaatcaggagagtggattctctcctgttatcctggaccagtttttatgaaaggattcctgaaatgaaatccatatattccatgtagactggaaaaactcatgtcctaatcctttttgtactgttgaaaccacttcattggacatgttgcaatagcaaaacccccagttagattagtgtttacacattttctcagttatttaatatttaatgttttccttaatactcaagtgatgtttgtctctagtgttctaatgtagcacaaatcctatgtaaaatcatactatgtatttttgacattaatgttgaaatcaaatatatgcacaagtctttaattttgtgtaatgtgttaagtgctgttcatttaagttattgaaatgagaataaaatgttgagcttctttaaaagtaacacactatgcaagcatgtgtactttttatatctc

SEQ ID NO: 184172 - DNA, 1034 bp, Homo Sapiens
gagcaatgcttttcccataatagccaactttgtacaaataagtataaggaaaaaataataaatgagaactataatccaaaattctttggcaatcttcagtctgatgattccaaaaaaaatgactcaataaaagttactgtgttggaaatgtctgaatatttgaacaaatatgaaagcatgtcctcaaataaagactcaaaaaggcctaagacatgtgagcaaaatactcaacttaatagcatagagaattatctcaataaagataatgaaggtttcaaatgtaaaaagtcagaccaattaaaaaatgaacaagataagcaagaagatccaactaatgaaaaatcccaaaactattctcagagaagaagtataaaagactgtttgtctacatgtgagcaaccaaaaaatacagaggtattgaggactacactgaaacattcaaatgtgtggcgaaaacataattttcattccttggatggaacttcaaccagagcctttcatcctcaaactggattgcctcttctttcaagccctgttcctcaaagaaaaacacaatcaggttgctttgatctggattcttcattactacatctgaaaagcttctcatctagaagtcctcgaccatgtttaaacattgaagatgatccagatattcatgaaaaaccatttttgagttctagtgctccacctataacaagtcttagtctcctaggaaattttgaggaatctgtcttgaactatcgtttcgatcctctcggcattgttgatggttttactgccgaggtaggggcaagtggtgctttctgccccacacatttgactcttccagttgaagtgtcattctacagtgtttcagatgacaatgctccctctccttatatgggtgtgattactttagagtcccttggtaaaaggggttatcgagtacctccttcacgaacaatacaagtggtatgtgttttatagcctacaattgcaataatcatctctcacatacatatagaacttagccctttctcctgctactgctgctg

SEQ ID NO: 184173 - DNA, 1289 bp, Homo Sapiens
ttggtccagatatgtaacttaactcccagactgaagaattgactttatttttggccagggcttactttcctacacttgtgactttttacatgcccgaagaccaataaattacttgcttcttcatttcccctctccctcaagatacatgggaagggtcctattaccttcctttatttcctttttagttaggaacttctttcttttattcctatatcttaatagtaattttgagtgctgtggccattgatgttatatattctttatagcgacatcaccaggaggaacagtaaaatgtttccttaggggtagaaacatagaatgtatctctattaattcaatatgaatgtttttccatagaaatagaattctgaaattttaataaattacatgagttattcttattttagtcttttatgtacatatgcatcagtttgtactcaatttgtcttcttttatttcaagggtggattactttagagtcccttggtaaaaggggttatcgagtacctccttcaggaacaatacaagtggtatgtgttttatagcctacaattgcaataatcattctctcacatacatatagaacttagccctttctcctgctactgctgctgcaacaactttgaccttatttaatcctaataagactgtggtgaagatgtttgttgtgatatatgatttacgagatatgccagccaatcatcagacattcctacgacaaagaactttttctgtacctgttaaacaagaagtgaagagaagtgttaataaagagaacatccgacacacagaagaacggttattacgctacctcatacatctgaggttccagagttctaaatctggaaagatctacctccatagagacgtacggctcctgttctctagaaagtcaatggaggttgatagcggtgctgcatatgaactcaaatcttacactgaatcaccaacaaaccctcagttttcaccaagatgttgataaggagtgatgatttaaagtatttactcagtacccaagtttgcaagtaaaaaattagcatagaatggagtgtaccaaattaacaatcaggagagtggattctctcctgttatcctggaccagtttttatgaaaggattcctgaaatgaaaatccatatattccatgtagactggaaaactcatgtcctaaatccttttttgtactgttgaaaccacttcattggacatgttggcaatagcaaaaccccccagtttagattaattgtttacacattatctcaatatttaatatttaaagttttcctttaa

SEQ ID NO: 184174 - DNA, 958 bp, Homo Sapiens
ctttgtacaaaaaagttggatttgagggtggcagtgtaactctcagcctacttggtgaagtgagattcagactgagtggggtcacagcacagggcactgtcttgcctggctttatctgagccagtcacacctctcctggccactatctgtggtctagccccctttgtgcagaaagagaaagaagagccttgaggaccagcctagtcaggctgaagaaatgtcaacaattgggagttttgaaggattccaggctgtgtctctgaagcaagagggagatgaccaaccctctgagactgaccacctatcgatggaggaagaggacccgatgccaagacagatttcaaggcagtcaagtgtgaccgaatcaactctttaccccaatccttatcatcagccttatatctcacggaagtactttgctacacggccgggggccattgagactgccatggaagacttgaaaggtcacgtagctgagacttctggagagaccattcaaggcttctggctcttgacaaagatagaccactggaacaatgagaaggagagaattctactggtcacagacaagactctcttgatctgcaaatacgacttcatcatgctgagttgtgtgcagctgcagcggattcctctgagcgctgtctatcgcatctgcctgggcaagttcaccttccctgggatgtccctggacaagagacaaggagaaggccttagatctactgggggagtccggaggagcagtctcttctgtcccgctggaacccatggtccactgaagttccttatgctactttcactgagcatcctatgaaatacaccagtgagaaattccttgaaatttgcaagttgtctgggttcatgtctaagcttgttccagctatccagaatgcccacaagaattcaactggatctggaagaggaaagaaactgatggtgttaactgaacccattttga

SEQ ID NO: 184175 - DNA, 1972 bp, Homo Sapiens
  misc_feature (1318)..(1326): n is a, c, g, or t
ttggatccaacttttgcagaagatgaggagttacaaaatatggacaaagaagatgcattaatttgctttgaagaacacattcgggctttagaaaaggaggaagaagaagaaaaacagaagagtttgctgagagaaaggagacgacagcgaaaaaatagggaatctttccagatatttttagatgaattacatgaacatggacaactgcattctatgtcatcttggatggaattgtatccaactattagttctgatattagattcactaatatgcttggtcagcctgttttttcattaggatcaactgcacttgatcttttcaagttttatgttgaggatcttaaagcacgttatcatgacgagaagaagataataaaagacattctaaaggataaaggatttgtagttgaagtaaacactacttttgaagattttgtggcgataatcagttcaactaaaagatcaactacattagatgctggaaatatcaaattggctttcaatagtttactagaaaaggcagaagcccgtgaacgtgaaagagaaaaagaagaggctcggaagatgaaacgaaaagaatctgcatttaagagtatgttaaaacaagctgctcctccgatagaattggatgctgtctgggaagatatccgtgagagatttgtaaaagagccagcatttgaggacataactctagaatctgaaagaaaacgaatatttaaagattttatgcatgtgcttgagcatgaatgtcagcatcatcattcaaagaacaagaaacattctaagaaatctaaaaaacatcataggaaacgttcccgctctcgatcggggtcagattcagatgatgatgatagccattcaaagaaaaaaagacagcgatcagagtctcgttctgcttcagaacattcttctagtgcagagtctgagagaagttataaaaagtcaaaaaagcataagaagaaaagtaagaagaggagacataaatctgactctccagaatccgatgctgagcgagagaaggataaaaaagaaaaagatcgggaaagtgaaaaagacagaactagacaaagatcagaatcaaaacacaaatcgcctaagaaaaagactggaaaggattctggtaattgggatacttctggcagcgaactgagtgaaggggaattggaaaagcgcagaagaacccttttggagcaactggatgatgatcaataaattataccaaatatatgtttacagtatgatttaaagtctgattcagaccagggactctattttaagttcaactgaaataacactgggttttaattatatcacaggnnnnnnnnngtgcatttaagtattgttatcgtggactttataaaagcaaaggaaattgaaagtaacttttgattctgtatcaagaatcatattttcatacagtcataactgtctttctgtgaccctttcacagggcactgtaggatggattaaaggtggcaatttactgataactgcagatgtctctactttgttctaaaatctaagtcatgaggtgatttgatttactttatagaagctggattttgaagatctaatgaaaaattttttgataatatagtagtacaaaaaaagcaccagcaactgataaaaattgcttttttgtgcgctacccaactggttaaagccaatgtgatcttttatggtgaaactcctaagaaacaggtggttttgctggaaacttggtagacccttaattatagtggtgctaatgagcactactgtaatataaagccaccattattttttatcaaacatctgaatacattttacaaaggctattgtgagggcattattttgagcatctattttgaggtgatgtttaaaaaaactttaacatcaaatcaaattgtaaattaatttaaatatattgccttaaggacctactaaagaatgtgccaccagactttaagtgatagttgcaatatccttgtct

SEQ ID NO: 184176 - DNA, 1528 bp, Homo Sapiens
  misc_feature (63)..(102): n is a, c, g, or t
  misc_feature (1073)..(1095): n is a, c, g, or t
  misc_feature (1127)..(1136): n is a, c, g, or t
  misc_feature (1181)..(1232): n is a, c, g, or t
ttggagtttgagttgtatttgtgcatcttaaagtaggttgaggcttgaggctgggctttcggnnnnnnnnnnnnnnnnnnnnnnnnnnnnnnnnnnnnnnnncttgtacttaaacctgcttgcttcctaccacagattctttattttcccaaacactacaaaaaaacttttaaaactttgccatttcatctgtttacactctttgccactgattagcagtatttaaatcttgcaagaatattttgtgctttctttagaaacacaagagtatagatttttctcactgaaaagtgagagttacgcattgcagccatgaagggatgctaggatcaattatggcagtaccttttttcccctcctgttcttgagccagttgtctcttttgttttgggtcccacttaggattaatggatgtaaggtattttcctgtgcctttattttgtgtcattctattggaaggaggtgtaacggcagaatagcatcgtgttgggggttttccttcaaacactgcaagtgatattgccaccatgtgaacctcaaatatgcaatccagttgtgttggtttctcggtgacttggagtgttcatctcttcatgaattgtgagcactgaccatgttcttcagttcttaattatggtgagttgacaaataccaactactgcttttctttaggtggctataaatttcttactgtcaggaggaaatgacattatattctgttccactgaacgtcagagatcagcaggcactgtactgggtagagaagtgcctatacttctctacctaagagggcaggagggaaaccctacagctccttgtgagcctatatattagtatatcggcctggagaggacaagggaataagaccactcatagtgaggctggccaagctgcactggtcggaccaggcagtggctgacctaaggaagacaacttgctttgcttaaaagtagattttttaagcaatgcttaacacaggcagcattcacctttgttcaggccatcgacatgtattgttaaaattactgcatatccccctcagatatcaagtatacactgttcatgttggggtnnnnnnnnnnnnnnnnnnnnnnnacgcacgcatgtgtcccaaatcttgttttaannnnnnnnnnctgaatgtgatcatgttttggatgatacctgagcagggttgcctnnnnnnnnnnnnnnnnnnnnnnnnnnnnnnnnnnnnnnnnnnnnnnnnnnnntgctttcttataactttggaggaaagtcaaatcttggtattattaaaattgttttaaaaaggagtaaattttccagttgataaaatgaaaatcactggcctatgtttaataaagtttttcattaattactgtggaataacgtgccagctatcatcaacacaatgattttgtacatagggtagggaagcagtgatgctctcaatggggaagatgtgcaacacaaattaggagaaactccatgttatttacctacttcagcgataggaacttgcaacttgggggctttggtgaataaa

SEQ ID NO: 184177 - DNA, 966 bp, Homo Sapiens
  misc_feature (128)..(173): n is a, c, g, or t
  misc_feature (217)..(226): n is a, c, g, or t
  misc_feature (258)..(280): n is a, c, g, or t
ttaaagaaaaacttattaaacataggcccagtgattttcatttatcaactggaaaatttactcctttttaaaacaattttaataataccaagatttgactttcctccaaagttataagaaagcaaaannnnnnnnnnnnnnnnnnnnnnnnnnnnnnnnnnnnnnnnnnnnnnggcaaccctgctcaggtatcatccaaaacatgatcacattcagnnnnnnnnnnttaaaacaagatttgggacacatgcgtgcgtnnnnnnnnnnnnnnnnnnnnnnnaccccaacatgaacagtgtatacttgatatctgagggggatatgcagtaattttaacaatacatgtcgatggcctgaacaaaggtgaatgctgcctgtgttaagcattgcttaaaaaatctacttttaagcaaagcaagttgccttccttaggtcagccactgcctggtccgaccagtgcagcttggccagcctcactatgagtggtcttattcccttgtcctctccaggccgatatactaatatataggctcacaaggagctgtagggtttccctcctgccctcttaggtagagaagtataggcacttctctacccagtacagtgcctgctgatctctgacgttcagtggaacagaatataatgtcatttcctcctgacagtaagaaatttatagccacctaaagaaaagcagtagttggtatttgtcaactcaccataattaagaactgaagaacatggtcagtgctcacaattcatgaagagatgaacactccaagtcaccgagaaaccaacacaactggattgcatatttgaggttcacatggtggcaatatcacttgcagtgtttgaaggaaaacccccaacacgatgctattctgccgttacacctccttccaatagaatgacacaaaataaaggcacaggaaaatacggttacatccgttccaacttttttgtacaaag

SEQ ID NO: 184178 - DNA, 1348 bp, Homo Sapiens
  misc_feature (968)..(980): n is a, c, g, or t
ttggcataagcacagatttttctttttcattgaaactttaaaggttattattggaaacattactttgagtgcagtgtttttaaaagccaattcttttttatcccttttagaagtagaatttgcacagttactacaattgaggagtgtcatctctataactttttctccgcctttgtcccattctgcccctgtacatgtttcctaccaagcatgtttcacattttcctattagtggaggagggagaaccatatttatttataatgaagacatctaagatccctatgatgaatgcaggaactctcttggtagtttgtaaatacacaaagggatgtgtcgagggatgggagcgatgcttatctctcacagtgtgagtggtctgtgtgaggctgttccttcagtttcttctccagactgttctttggttgtcactaagtcagaggtctggtccctcatgtttaggtgaaagccagagaatgacagctgtagtcatatctgagcataagaccttgatgtgtgattcctgatgaccggtttcatttattcatgttataaagcaaagccctggtcctttttaaactactagttttaaaaacctgtgttaaatgaacagtaattgcctggtaggtttggtgtgtgtgtagcattgtgtgtccatctgttatatgtaaaggacaaggcaccagaatcaggctttatttcgatattgaagatgttatttaacatctttcttttttccttactcccttagccatcccctccccttttgtcctatcattccctagaacaagccacctgtcaattgtgaagggttgtgttctttatggcaggttctatgcagattgtgccagagcatgtgcgtgttctgttggcaagccacagtgctcccttgactgaagacatttccaggtagatttctcagccagctctaaaacagattgctttttcagtggccttactctttgtgggnnnnnnnnnnnnnctctgaacttgatataaagattttatttgtcccttgaaaaagtaacaaatgtgcatagatcaatttgtactactttggtcattggatatttctgatccttattgcattgtacctaaaggagagtaactaatggtaacctttttaatagagtatgtgaaaggtagtggctgatgaatccttaacgttcatagggtctttttgctgttacggttgtatatagaggtctgaaggatttttaaaatgatttgcactttttcactgcatgcttacaattcccaaaggcaaaatctgtactgaggtagatcatttgaaagggctagattataaaattaagccttagagtatggaaagttcttataacaataata

SEQ ID NO: 184179 - DNA, 738 bp, Homo Sapiens
  misc_feature (81)..(103): n is a, c, g, or t
  misc_feature (135)..(144): n is a, c, g, or t
  misc_feature (187)..(237): n is a, c, g, or t
  misc_feature (587)..(595): n is a, c, g, or t
tttgtacaaaaaagttgggtattgttaaaattactgcatatccccctcagatatcaagtatacactgttcatgttggggtnnnnnnnnnnnnnnnnnnnnnnnacgcacgcatgtgtcccaaatcttgttttaannnnnnnnnnctgaatgtgatcatgttttggatgatacctgagcagggttgcnnnnnnnnnnnnnnnnnnnnnnnnnnnnnnnnnnnnnnnnnnnnnnnnnnnttttgctttcttataactttggaggaaagtcaaatcttggtattattaaaattgttttaaaaaggagtaaattttccagttgataaatgaaaatcactggcctatgtttaataagtttttctttaattactgtggaataacgtgccagctatcatcaacacaatgattttgtacatagggtagggaagcagtgatgctctcaatgggaagatgtgcaacacaaattaaggggaactccatgtattttacctacttcagcaatggaactgcaacttggggctttgtgaataaaattcagctgccttgtatagtcgtttgaaagaatatgtgatctgtgagagaattatagnnnnnnnnnagaagaaaaatctgcaaaagatctttccaaagacaatgtgccacagatcttttgttctctgtaatgaggattaattgctgtttaaacaaaaatgtaattgttcatctttaaattctttccttttcataagaggatcaagctgt

SEQ ID NO: 184180 - DNA, 1385 bp, Homo Sapiens
ttgggctgaagaaagctcttgaggaggaaactaagaaccatgaagctcaaatccaggacatgagacaaagacacgcaacagccctggaggagctctcagagcagctggaacaggccaagcggttcaaagcaaatctagagaagaacaagcagggcctggagacagataacaaggagctggcgtgtgaggtgaaggtcctgcagcaggtcaaggctgagtctgagcacaagaggaagaagctcgacgcgcaggtccaggagctccatgccaaggtctctgaaggcgacaggctcagggtggagctggcggagaaagcaagtaagctgcagaatgagctagataatgtctccacccttctggaagaagcagagaagaagggtattaaatttgctaaggatgcagctagtcttgagtctcaactacaggatacacaggagcttcttcaggaggagacacgccagaaactaaacctgagcagtcggatccggcagctggaagaggagaagaacagtcttcaggagcagcaggaggaggaggaggaggccaggaagaacctggagaagcaagtgctggccctgcagtcccagttggctgataccaagaagaaagtagatgacgacctgggaacaattgaaagtctggaagaagccaagaagaagcttctgaaggacgcggaggccctgagccagcgcctggaggagaaggcactggcgtatgacaaactggagaagaccaagaaccgcctgcagcaggagctggacgacctcacggtggacctggaccaccagcgccaggtcgcctccaacttggagaagaagcagaagaagtttgaccagctgttagcagaagagaagagcatctctgctcgctatgccgaagagcgggaccgggccgaagccgaggccagagagaaagaaaccaaagccctgtcactggcccgggccctcgaggaagccctggaggccaaggaggagtttgagaggcagaacaagcagctccgagcagacatggaagacctcatgagctccaaagatgatgtgggaaaaaacgttcacgaacttgaaaaatccaaacgggccctagagcagcaggtggaggaaatgaggacccagctggaggagctggaagacgaactccaggccacggaagatgccaagcttcgtctggaggtcaacatgcaggccatgaaagcgcagttcgagagagacctgcaaaccagggatgagcagaatgaagagaagaagcggctgctgatcaaacagtgcgggagctcgaggcggagctggaggatgagaggaaacagcgggcgcttgctgtagcttcaaagaaaagatggagatagacctgaaggacctcgaagcccaaatcgaggctgcgaacaaagc

SEQ ID NO: 184181 - DNA, 1552 bp, Homo Sapiens
ttggcatttttagtatattttcagtaaatacatttaaacaatgttaaggccacagcacacatatctcagccattcattgttctgtgcattgatgtttatctcatagatgcattgagtagtgcctttttagctttttcacattactttgtcaccatatcctttgtgttctctaaatacattgcccacttccaaaaatgttcagcatgaaaaaaagggcttcagtgtcgattgagattgcttttgttcatctcagggatttcaatagtcaagaatgaattcagttaaaggtatttagggttaagaagacaaactgtacaagcccatttcattccttgttgtatacctttccatctgccctcccattttaactatctactgtggcctttttatggaaacagagcaagatcaatgaaggctaatggcaagaataagaaaaagagttgagatttaaccaatagcggagcataaaggatcatgacaaaatcaaattataaaagcatacttgaaataggtggagctttttcttttgaaaatatatattcacaattttaatattttaatttattttttactatttaaccctgtacttggcaatgctcaggcagctgattgtgaaatattcttgtcctttacagaacatggttgttattgtgctgttgacatgaatagaccatggaaacattttcatcattattattcagcctgtgctgtagttaatgttaagttgctgaaataaaaagtgagcaagtaatagattttcttggcaaatctaatgattcagcccacaggactgttgaaactactgcggaagtttttctatctgaaagaaggtgctgggcattcaaatgtgttcatgtattgtatatcatatgaattgtatatcaattactaatgggaatttctacatatatgcttacaaaagcaatttatttaagtaatgctaggggtagtgtacataccaattagttattcagctactatacagaaaaaggatgaacaaattaatttatttctaattgagccagttagacataatgcatataacgtgatatttggttcatgaaagagttgttttcatgtggttattgtagggagtatatataattgtggaaggggtatgggaagagttgtgtatagttagttgttatctctacaagtttgaaagttttcccatcaaacattatcaatataccaatgttttaaaaattgagtgagggttattatttgtatttgatgaaagaaaatccaaataaagcccacctagaaatagatattttattatatatgtgctatagatatacctatatagtacaaatagacatgtgtgatgcatatatacaatgttatatatgtgtatatgtctgtatacacactgagtctgtaatatgtatacactaaatttgtgttatgctaacatcttcagggtctgcactgtgaactcccctggagataagtaagtccactttagaataaagaagttcttttgagacttcagttactaacgtgctttaagaggtatctactttataactgaattctatgtcgttcatac

SEQ ID NO: 184182 - DNA, 975 bp, Homo Sapiens
  misc_feature (704)..(762): n is a, c, g, or t
catagctcccctccctcaaagagggacaaggggtcaggggcagagcaaaaatccagtttgcttcaaccacggagactgccgttgggatggaaaatatctggagctccctccattgtattcctgtggggcaggaacatgccagggctgctggtaaatggcaggggtcacctttaccagggcgcaggcatagtgtggcccctgcctgccctggggccaccctggaacagtaagaccctctgggaagggaagaaaccagacccagccataagctttctccccttctccctcaaatcgccccttcctcctccccaaaatcaggctatggcaaaggggctggcagcaggggaatggaggttttggaggggaaggccagccatgcgaaggcaaggagaaaaggaggatggagagagccccagccatccccattttccttcctctgcctccgaggggctgcttctggagggcactgttgtgtggggaccctgtgaggtttgcaggaggcgggcaaaggggcaccagacagggaacatgcacacaggcagcctggccatggagagctcctggctgtccgcccaggtggcgtcttgggcagagctggcgctccacaagtgattattgatggtgacaggattccctcatcctgctccaacctctcaaaagtggacacattcaccggcagtcactcatctcacatgcccaccagnnnnnnnnnnnnnnnnnnnnnnnnnnnnnnnnnnnnnnnnnnnnnnnnnnnnnnnnnnntttgaagccacacctcttccccgacaacacccgtctccacactgcgcacctaggcctgagctcacacacacccaggcccatgctcacggccctgtcacctatgcactcagcctggcccacactcccgacacacggtggcaggctctcaaccagacagcagcacaggatccttgccctgggcttgctggagccctgggcctgaaagggagccaa

SEQ ID NO: 184183 - DNA, 902 bp, Homo Sapiens
ttggatgattttctcttttcaacttcttgaacttggacatgaaggatgtgggcccagaatcatgtggccagcccaccccctgttggccctcaccagccttggagtctgttctagggaaggcctcccagcatctgggactcgagagtgggcagcccctctacctcctggagctgaactggggtggaactgagtgtgctcttagctctaccgggaggacagctgcctgtttcctccccatcagcctcctccccacatccccagctgcctggctgggtcctgaagccctctgtctacctgggagaccagggaccacaggccttagggatacagggggtccccttctgttaccaccccccaccctcctccaggacaccactaggtggtgctggatgcttgttctttggccagccaaggttcacggcgattctccccatgggatcttgagggaccaagctgctgggattgggaaggagtttcaccctgaccattgccctagccaggttcccaggaggcctcaccatactccctttcagggccagggctccagcaagcccagggcaaggatcctgtgctgctgtctggttgagagcctgccaccgtgtgtcgggagtgtgggccaggctgagtgcataggtgacagggccgtgagcatgggcctgggtgtgtgtgagctcaggcctaggtgcgcagtgtggagacgggtgttgtcggggaagaggtgtggcttcaaagtgtgtgtgtgcagggggtgggtgtgttagcgtgggttaggggaacgtgtgtgcgcgtgctggtgggcatgtgagatgagtgactgccggtgaatgtgtccacagttgagaggttggagcacgatgagggaatcctgtcaccatcaataatcacttgtggagcgccagctc

SEQ ID NO: 184184 - DNA, 2483 bp, Homo Sapiens
  misc_feature (125)..(183): n is a, c, g, or t
  misc_feature (432)..(441): n is a, c, g, or t
  misc_feature (1001)..(1031): n is a, c, g, or t
  misc_feature (1052)..(1146): n is a, c, g, or t
  misc_feature (2227)..(2239): n is a, c, g, or t
ttgggtttaagctattttgtaaattatgtatcttttttaaaaatgtagaattacaaataagcctttgataatgtttaattttaattaaactaatgacaatttcttgtttataatactttataaannnnnnnnnnnnnnnnnnnnnnnnnnnnnnnnnnnnnnnnnnnnnnnnnnnnnnnnnnnaacatagatttaacaaagacctcaatgttttaattaaaagaatcctttgaggctaagatgactgcctgttccatttgctgaccttgggttacctttccatgcgtggctctttgaaccattgtggcccttggctgaccaaaaacaggaagccatgtgacgaccgcaacctttccccattagacctgggtggtgaggatcccaagggttagacacagatgagattaaactgaaataggtgcctgaaaatcnnnnnnnnnnccatataaaatattcacaaaatgtttaatcactgtgagtaacaccagtaactgatttagtaatttggttacttatttctaaattgttaaattgttaatagttttaaatttatgcatgttaatcttaaatgcaaatattaatgaatatgtatacttacaactttttaaattaaatgtttatatttagctgattgcttctttaaaaatctattttagaattaagggtgggaatagagttaaaacgtgctattgtttggggtgggggtaaataatatatttaagggggggggtgtgctgtgtcattttttttccttttcttccactgaaataatcttatttatttgaaccttccaaaggtggatatggttatagaagaagtggccgagataaatatggccctcctactcgcacagagtacagacttattgtggagaatttgtcaagtcggtgcagctggcaagacctaaaggtttgggccccattaaccttttggggtaaggttgggcaggagttaaagttgggattacaggtgtgagccactgcacctggccaaaaataaannnnnnnnnnnnnnnnnnnnnnnnnnnnnnngagatggagtcccgctctgtnnnnnnnnnnnnnnnnnnnnnnnnnnnnnnnnnnnnnnnnnnnnnnnnnnnnnnnnnnnnnnnnnnnnnnnnnnnnnnnnnnnnnnnnnnnnnnnggtacatgtatatatttgtcctgcattatgttttttacttgatataaatgtatttttactgtgatagtccaagtgccctggggggcaggtgtgctctatgtggttcttcttccattggagagctggcgtagagatctgcagtgttcacaaggatgttggtttggagatgtctgctgctaggacctggggtgtgtgactcagtccatatgagagggacatctgggtggaggagtaaattcctgtgctctgaaatgccacttggtagctctggacaatgaaggacaattgactcaagggtgcctggcttctgctgctgctgggaaaaaattcagtttatagcattcctgcacctcccaaagtagataacctggaggtcattcagttaacaactgtccctgaggactcagttttgggggaggggttatctgggagaagctttagcctgttctgagccattaggagacattagtgaattggagcactggagaatcctacaaatggcctatgtctcagaagagctgggacctccttccagctgctgcagatgctgacaggccctgggaggctgctgtgctctggagaagctggagcagctcatttcttggcctagcctggctgcctcagaaagagcagtcaggacttgagggaagcatcaaattctatacccataaactgcagttggaagtcagctttttgaaatgtccagcctttgcccaattgtttcagatcatctcattcctcaggctttggcaggtatcctgccctccatcttattccagtgtgttcacctcatcaaggcagcagagtggatgaaggagtaagtctgccctttgccatactgaacagctgtggaccccgattggtgagggctctgcatatgcctgtatgaaggagatacaggtgtgtgtgcacatgccggtatgaagaagacacaggcatgtgcttctcagttttgctaacagtgggagctcaacggggcagagggaggaaggtccatgatgctcagccacatactgtagagagaggcaatttaatgttaaatgacgcaccatcctccctcccacccttctcccagtcaacnnnnnnnnnnnnnctagaactactaattatctctcaaggctgaaaaattaattgccttaggtggagaacttaattcctagtatccaccaaacttaactccgtatctccatatggtgtctccatatctactgtgtgagctacttaactgacgccctcttcctccaactgaaggatcgcccaacgtttttggattatagaattattatttcctgctttctttctttgggacttttgaatttctttgggtttcgttttta

SEQ ID NO: 184185 - DNA, 1181 bp, Homo Sapiens
  misc_feature (374)..(437): n is a, c, g, or t
ttggagacgacgccggtcctactccagaagccggagtcattcaaggtctcgctctcgaagcagacattcccgtaagagcagaagccgaagtggcagcagcaaaagcagtcattctaagagtagatctcggtccaggtcgggctcccgctcccggagcaagagccggagccggagccagagtcggagccggagcaagaaagagaaaagcaggagccccagcaaggacaagagccagccgcagccatagcgctggcaagagccgcagcaagagcaaagaccaagttgaagagaagatccaaaacaatgacaatgtcgggaaacccaagagccggagtcctagcaggcataaaagtaagagcaaaagtcggagcagnnnnnnnnnnnnnnnnnnnnnnnnnnnnnnnnnnnnnnnnnnnnnnnnnnnnnnnnnnnnnnnnaagagcctccgccagagtcggagccggagcaggagcaaagcgggcagcaggagccggagcaggagccgcagcaagagcaaggacaagaggaagagcaggaagagaagcagagaggagagccgcagtcgcagtcgcagccgcagcaagagtgagaggagcagaaagcgaggcagcaagcgagacagcaaggcgggcagcagcaagaagaagaagaaggaagacactgaccgctcccagtccagatctccatcccgctccgtgtcaaaggagcgggaacatgccaagtctgaatccagccagagggaaggtcgaggagagagtgagaatgctggcaccaatcaggagacccggtccaggtcgagatccaattccaaatcgaaaccaaaccttccatcagaatcacgctccagatcaaagtcagcttcaaaaacccgatctcggtccaagtctagatccaggtctgcttccagatcgccctcccgatctagatctaggtcccactcaaggtcctaactggctatggccacagctggaactatccgagaagtcttttgtacatgtttggtagccgtagcacaagtgattggagtagaacatgtcactgctgtacatttttaactcccctaatggtgtgtctataattgttaaatctaagtgcttcctctcagtaaagcctcctgacaccaggccttcctgctcgactgaaaaaaattttctctttgaaaattctcttttactcatggc

SEQ ID NO: 184186 - DNA, 1650 bp, Homo Sapiens
  misc_feature (101)..(139): n is a, c, g, or t
  misc_feature (407)..(416): n is a, c, g, or t
  misc_feature (1434)..(1493): n is a, c, g, or t
ttggatcttttttaaaaatgtagaattacaaataagcctttgataatgtttaattttaattaaactaatgacaatttcttgtttataatactttataaatnnnnnnnnnnnnnnnnnnnnnnnnnnnnnnnnnnnnnnnctctgtaatgcaattgtttaacatagatttaacaaagacctcaatgttttaattaaaagaatcctttgaggctaagatgactgcctgttccatttgctgaccttgggttacctttccatgcgtggctctttgaaccattgtggcccttggctgaccaaaaacaggaagccatgtgacgaccgcaacctttccccattagacctgggtggtgaggatcccaagggttagacacagatgagattaaactgaaataggtgcctgaaaatcnnnnnnnnnnccatataaaatattcacaaaatgtttaatcactgtgagtaacaccagtaactgatttagtaatttggttacttatttctaaattgttaaattgttaatagttttaaatttatgcatgttaatcttaaatgcaaatattaatgaatatgtatacttacaactttttaaattaaatgtttatatttagctgattgcttctttaaaaatctattttagaattaagggtgggaatagagttaaaacgtgctattgtttggggtgggggtaaataatatatttaagggggggtgtgtgctgtgtcattttttttccttttcttccactgaaataatcttatttatttgaaccttccaaaggtggatatggttatagaagaagtggccgagataaatatggccctcctactcgcacagagtacagacttattgtggagaatttgtcaagtcggtgcagctggcaagacctaaaggattatatgcgtcaggcaggagaagtgacttatgcagatgctcacaagggacgcaaaaatgaaggggtgattgaatttgtatcttattctgatatgaaaagagctttggaaaagttggatggaactgaagtcaatgggagaaaaatcagattagttgaagacaagccaggttccagacgacgccggtcctactccagaagccggagtcattcaaggtctcgctctcgaagcagacattcccgtaagagcagaagccgaagtggcagcagcaaaagcagtcattctaagagtagatctcggtccaggtcgggctcccgctcccggagcaagagccggagccggagccagagtcggagccggagcaagaaagagaaaagcaggagccccagcaaggacaagagccgcagccgcagccatagcgctggcaagagccgcagcaagagcaaagaccaagctgaagagaagatccaaaacaatgacaatgtcgggaaacccaagagccggagtcctagcaggcataaaagtaagagcaaaagtcggagcaggagtnnnnnnnnnnnnnnnnnnnnnnnnnnnnnnnnnnnnnnnnnnnnnnnnnnnnnnnnnnnnaagagcctccgccagagtcggagccggagcaggagcaaagcgggcagcaggagccggagcaggagccgcagcaagagcaaggacaagaggaagagcatgaagagaagcagagaggagagccgcagtcgcagtcgcagccgcagcaagagtgagagga

SEQ ID NO: 184187 - DNA, 951 bp, Homo Sapiens
ttggcttcttctcactggtgagtggcagctgtgtctcctttctgccagtccagcagtcccagctgtcagtggcacctgcataatgacacgtctgcatttccccccaatcagcgtgcagcggttttgggaggaggaatgcgactgcatggcgcgctcgctgcaacctcagtctgcagcctgctagggacgcacggccacactcctgtctttcagcctcagtctgcagcctgctagggacgcacggccacactcctgtctttcagcctcagtctgcagcctgctagggacgcacggccacactcctgtctttcagcctcagtctgtagcctgctagggatgcacggccacgctcctgtctttgaggtgctgtcagaacagctttctcctcggtatcccgccgggtttgactggctagtgggcttgctttggtttggactcacccagatctagtgcagggacacacacgggggccggcattgctcctttccgccatgtggagttggccggggccagaggcacatgctctggtttggacagcccggccctgggggctggaataggaaatgcctgcgtccctttaccctgcccaggggccaacacccccagcctagctacggcttcccccaggtgaacgaggtggtcttcagccccggggagtcccactgcgccacatgcagtgaggatgggagtgtgcgggtgtgggccttggccagcatggagcttgtgatccagttccaggtgctgaaccagagctgcctctgcctggcatggagccccccgtgctgtggccgccctgagcagcagcggctagcggctggctacggtgacggctccctgcgcatcttcagcgtctcccgcacggccatggagctcaagatgcacccccacccggtggcgctgaccactgttgccttctccaccgatggtcagactgtcctctctggagacaag

SEQ ID NO: 184188 - DNA, 1146 bp, Homo Sapiens
tttgtacaaaaaagttggcttggctcttcccgcacatcagaggctgttggctccagctcaccaagaaatggtctccaagacaagcatttaatggaacaaagttctccaggatttaggcaaactcacctacaagatttatcagaagccactcaagatgtgaaggaagagaatcattatcttactcctcgaagtgttcttttagagttggataatatcattgcttccagtgattctggtgaatccattgaaactgatggtccagaccaggtctctggaagaattgagtgtcattatgagccaatggaatcctattttttcaaagagacatcccatgagtctgtggatagcagcaaagaggaaccccagacccttccagagacccaggatggggacctccacctgcaagaacaaggctcaggaattgattggtgtctttcccctgccgatgtggaagcacagaccacaaatgaccaaaaggggtcggcctcactaactgttgtgcaattgtctatattaatcaataatatccccgatgaaagccaagtggagaaactgaacgttttcctttctcctcctgatgtcatcaactatcttgccctcacagaagccacaggacggatatgtgtgtctcagtgggaaggccccccacgtttgggatgcatattttgccacggagatcatcttctggcagtgaatgacctgaaaccccagagcctggaggaggtctccctgtttcttacccggtccatccagaaggagaaattaaagcttaccatcggcaggatcccaaattcagagacattccatgccgcatcctgtatgtgtccctcaaaatgccaaagtgctgcaccttctcagctggataagcctagactgaacagagctcccaagaggagtccggccattaaaaagagccagcagaaaggagccagggagtaacgcaccccagacccatggcagcagaaccaggatggagctgggactgtccagctctgccccctgctgctgccatgtgataggagacagtcagcacccccctctgaatttctgtatctgcatcttaacaatggggatgactatcccctctctggttattgtatcagagatgttaagagggtcatgtggcatgattgggagaacctgggg

SEQ ID NO: 184189 - DNA, 1250 bp, Homo Sapiens
ttggcaaggctcagagtcagcaggagtgagttcaggaatcctcgggacaaggcactttcctgagcactggaccagcgacctcttggcttccagggaggacacacagccatcatggaacccaaacctcagaagagtccaggcaaacaatttacattttcttatgaaaatgaagtctgcaaacaagattactttattaaatcaccaccttctcagctgttctcctctgtgacctcttggaaaaagcggtttttcatcctgtcaaaggctggggaaaagagctttagtctttcctattataaagaccatcatcaccgaggttccattgaaattgatcaaaattccagtgtagaagttggcataagtagccaggaaaagatgcaatctgtgcagaagatgtttaaatgccaccctgatgaggtcatgtccatcagaaccactaacagggaatacttcctcattggccacgacagggagaagattaaagactgggtctccttcatgtcatcatttcgccaggatataaaagcaacacagcagaacacagaggaggaactctcattgggtaataaaagaaccctcatctactccagccctctccttggcccttccagcacatcagaggctgttggctccagctcaccaagaaatggtctccaagacaagcatttaatggaacaaagttctccaggatttaggcaaactcacctacaagatttatcagaagccactcaagatgtgaaggaagagaatcattatcttactcctcgaagtgttcttttagagttggataatatcattgcttccagtgattctggtgaatccattgaaactgatggtccagaccaggtctctggaagaattgagtgtcattatgagccaatggaatcctattttttcaaagagacatcccatgagtctgtggatagcagcaaagaggaaccccagacccttccagagacccaggatggggacctccacctgcaagaacaaaagctcacgaattgattggtgtctttcccctgccgatgtggaagcacagaccacaaaatgacccaaaaggggtcgggcctcactaactgttgtgcaattgtctatattaatcaataatatccccgatgaaagcccaaagtggaagaaactgaaacgttttcctttcttctcctgatgtcatcaactattcttgccctcacagaagcccacaaggacgggatatgtgtgtctccgtggggaagggccccccacgtttggga

SEQ ID NO: 184190 - DNA, 1946 bp, Homo Sapiens
ttgggcttaacatgcccactaattctacattatgctcctacctcccggcagcctctccaggcccagaactttctccagtcagcctctacagaccaagctcatgactcacaatggcctatttaggcccataccctacgtcacggcagcctccgcagatgaggctactgcctcacaacagcctccacaggcacagctccatcgttacaatggcctctttagacccagctcctgcctcccagccttctctccaggccctgaactttctcaagtcgacctcaccaggcccagctcctgcatcttggtggcccctccaggcccagcctctgcctcccgtcagcctctacagtcccaacgtctgcctcacagcagattcttcacgcccagcatctacctcactgtggaccccccaagccaagctcccaacctttcagcagcttctacacacccagctcctgccacccagtggcctctttaggccaagctcatgcttcacaagggcctttccaggcccaactttcgtctcatggcaaccttccctggccagattcctgcgtgtctcccagcagcctagacaggcccaggtcttgcctcacactggcctctctacatccagctcatgcctcacggtgacctctccaggcacagctcctgtcccagaacgtcatctccgggcccaaaacttactcaagtcagcctctctagtcccaactgctgcctcctggtggcctatgaaggcccaaaatctcctcaagttgacctctcccggcccagctcctgcctcctgtcagcatctacaggcccaacctctgcctcatgggggcttctccgggcccagctcttcctattggctgagtctacaggcacaactgctgcctcacaacagccttttttggcccagttcctgtccagttcatggcggccaatgtaggcccaaaacttcctcaggtcatactctccaggcccaccttctgcttcctggtggcatgaacaggcccagctttgacttgagaacagcctctgcaggccctgctcttgcctcccaggggcttttccaagcccagctcttgcctcatggcagctgccccaggccaaatttcttcctgcctgccagcagcctcaacaggcacagctcctccctcacagtggcccatttaggccccactcatgactgtcgggccatttccaggcctagtgcctgcctcctggctgactctttcttgaagcccaaaacttcctcaaatcagccttttgcctaacttctgtctactgtcggactctacaggccagcctctgcctcacagtggaccctccagactcagatggtgtctcactgtggcatcctcaggcgaagctcctgcctttcggcagcctctccaggcccagctcctcctgccttccagtggcctctttcggcccagcccagctcatgcctcctggcggccttcccaagccccgcttttgactttcggtggcctctgcaggcctcgacaaggcccagcctcctgcctcccgaaggcctgcacaggcccagcctctgcctcacagcggactctccatgcccagctagctgttgcctcattgcggcctcccgagtccaaagctcctgcctctcggccgcttcggcaggcccagctcccgcctgccagtggcctcttcaggcccatggggctcattcctgacaacggcctttccaggcccagtttttcccttccggcggcctctccgggcccagaacctcctcaagtcggcctctccagacccacttgcaccctccgggcatcctctccgggcccagctcttcttcctggttgcgtctccaggccccgattcctgcttctcaacaacctctttggactcagtgcctacccatctcctgggcggccttggtcggcccacagcttccctcaagccaaagctccccaggcccaggtcaggcctcacggtgg

SEQ ID NO: 184191 - DNA, 1114 bp, Homo Sapiens
  misc_feature (122)..(178): n is a, c, g, or t
gctgaagcgatcctcccacctcaacctcccacgtggctgagactacaggtgcttgccactatgcccaactaatatttggaattttcgtatacgtggattccagaggggtgacagcaaaacgnnnnnnnnnnnnnnnnnnnnnnnnnnnnnnnnnnnnnnnnnnnnnnnnnnnnnnnnnctcctacctcccggcagcctctccaggcccagaactttctccagtcagcctctacagaccaagctcatgactcacaatggcctatttaggcccataccctatgtcacggcagcctccgcagatgaggctactgcctcacaacagcctccacaggcacagctccatcgttacaatggcctctttagacccagctcctgcctcccagccttctctccaggccctgaactttctcaagtcgacctcaccaggcccagctcatgcttctttgcagcctctccaggcccagctcctgcatcttggtggcccctccaggcccagcctctgcctcccgtcagcctctacagtcccaacgtctgcctcacagcagattcttcacgcccagcatctacctcactgtggaccccccaagccaagctcccaacctttcagcagcttctacacacctagctcctgccacccagtggcctctttaggccaagctcatgcttcacaagggcctttccaggcccaacttttgtctcatggcaaccttccctggccagattcctgcctgtctcccagcagcctagacaggcccaggtcttgcctcacactggcctctctacatccagcttatgcctcacggtggcctctccacgcccaactcctgtcccaggacgtcatctccgggcccaaaacttactcaagtcagactctctagtcccaactgctgcctcctggtggcctatgaaggcccaaaatctcctcaagttgacctgtccaggcccagctcctgcctcctgtcagcgtctacaggcccaacctctgcctcatgggggcttctccaggcccacctcttcctcttggctgggtctacaggcacaactgctgcctcacaacagccttttttggcccagttcctgtccagctcatgtcggccaatgtagcccaaaactt

SEQ ID NO: 184192 - DNA, 3374 bp, Homo Sapiens
  misc_feature (491)..(513): n is a, c, g, or t
  misc_feature (790)..(853): n is a, c, g, or t
aagaaaatcaaactgagccaccccaaggacatgaacaatttcaagttagagagagagcgtagctatgaattagttcgttctgctgaaactcattccctgccctcagacacatcctattccgaacaggaagactctgaggatgaagatgccatctgcccagctgtgagctgcctgcagccagaaggagatgaggtggactgggtccagtgtgatggcagctgcaatcagtggtttcatcaggtctgtgttggtgtctccccagagatggcagagaaagaagactacatctgtgtgcgctgtactgtgaaggacgcaccaagccgaaagtaaaaacacaaaaacagatacccccctacttaatgtaattcaggactccaaccaagaggatttcttcaaatctcagcaaagctacaggactggtactcaagccagcctgtaaacggtgctatttctattccttatgggatcatttttccaggactctttgaagnnnnnnnnnnnnnnnnnnnnnnntttttgacactttttgtattttttccttaagagctatttgtggttgttgaggtttgaaaagctgactgttttttttgcaggggttcccaccaatttggaaggcattgaagcttgcaccttttcatgtacagcattaaaattttacctctctctgggatttaccagcttaagagtccaactcacttccagtgcccaaaagggcacccaccagaaattccagtaaatcctcatttgaggaagctctcccttgtttactctgttaccacattggggaaannnnnnnnnnnnnnnnnnnnnnnnnnnnnnnnnnnnnnnnnnnnnnnnnnnnnnnnnnnnnnnnttcctggtagactaggtttatttatctgagcaataacttctatgttggtttcagtggctggaattaaaacaaaacaaaacaaacttccaaacagtgtgttggtgctttagcgattgattgatgtacagaacacaaatgtctagtttctagtgtcactgatgaactagtgatgtagaaaagagacttctctgtaagtaattgccacagctgtattttggctttctccctgtcccttcctttctcccctattttttggtagcttgtatcaaatgttacagtttatattgtggaataaatccttcgtcctaacataacactaaatgctgattatttagagccattagagcacagcttcttctgcccctctactgttgcacagccagaaggggctgcttgcttttgcctctgcccaaccaggttgcagtagcagtggatgttagcctgcaaacaacattaggggattcttcttttgtgtcctgctctgtttggtgggccatatgcctacagccctcactaacaaagaacccctctgtcttcaaggactagaacctatctttaaagccgtgctcttttaaaataagctttctcagaatgttggcaaatcacttcaatcctcaaatcagtcttccttgtggaatgctgcctttattatatttgaattgacaggggaacttggtttagggttaagacgttggaaggaaatctaaggaaaattaatcctcacagaggtccgggtttagtatatgtcttgagaggagacttgtgaattcccagactctgcctcctggtttcctttctcatttctttctaactgtagctatcattactggctgtggatagcccatagctattttccttgcttttcttttttaaaggggtctgttctgcagtggagaagacattctggtgaccagacttttgcttaccttttcctattctgttgccaatttttgttttccccacattctatagccataaacctgaagatgagtaaaactggtgggtctttaataaaacaacaacaaaaacagcagtttgtgatatagcagaggtttaaatgtaccctccccttttatgcacttcaaataattaaatctctttaagaatgacttctagttgtctgcagttttctgcagttgttgtgatgtttctcttcgtctgatggtggttctggggccaatagagaagaatagtctccagagtacaatttggaatcatcgtggtttggccttgttagtattcaaattcttagaatcccctccatcacccccgactttgagataggatgccaactgtcccagtcctcaccttccattgagaaattaagcttaaaaggagaccctgctgctaatataaagccactgcctttagagagcttttgccatcttagtaaacacaacccctacccccatccccactagtttttcttcttcacctgtgggtggtggtacacagtccctgacaatagcatctttgaggaagtcagatctttgtatctctgagtgagttagaaaaggtaggcatgtgtgtatttgaaccactctctccctggatgagaaccactgatcattttatgtgtgatgatgctgaatttaaagagaatgtcagttgcccaaagctacactgtactactagtaaataacaaagcctgggttttatcttccagttttcctacagtattcctcctaccttgtacaccatcacactactaatgaacacagataacgtttactttccagtttatgcctttgttgtatccctaaaatgactacagactgatgtgatctaaaaaccatgtttcattgtgtgttagctgtgaagctggcctgtaccagagaaacctctgaacttgtaggggaaaatgataaaatgcacatggaaactgacacttcagtttccatctcagtagtcctgcagctttgtgaggtgggagaggggaagggactgtgttaagttagagcctgaaccagaaggagggtcagtgggtaaagaaagaaagggtagatgaggtgtgccttccacctcacctaaatgaatactgtttgttttttgtttttccttccagattagactttgggggatttcttatatagaataaagggcttgattatatgtagcctctatcctggagaaaggttatgtaatttggactatgtaaaggaagttgacttctttacagcttcgtttcagtatcctaggaggtgggattcatttttctatcttaagttaacctaaaggagagatgccacttgtggtgatggaggttgttaaaaacctgaatttccctgcttcattctccagtgaagagcttaagaaaatgaggctttggatattttggcagaagtgtctgaaatgcacctgatttgccattatacccaccatcaaaagcaacatggccccttgggtattagtgcaagattagcctaagaatagagtagatctctacctggaagaggtgaaacatggctctctactgatttgggttgtactctgaaagccctttgtatggggtttctgcctc

SEQ ID NO: 184193 - DNA, 4501 bp, Homo Sapiens
  misc_feature (4339)..(4361): n is a, c, g, or t
ttggaaattgctaccaagatggggtttgctcctggcaaagcagtgggctcacatatcagagggcattatgaacgaattctcaacccctacaacttattcctgtccggagacagcctaaggtgtttgcagaagccaaacctgaccacagacactaaggacaaggagtacaaaccccatgatattccccagaggcagtctgtgcagccttcggaaacgtgccccccagcccgacgagcaaaacgcatgagagcagaggccatgaatattaaaatagaacccgaggagacaacagaagccagaactcataatctgagacgtcgaatgggttgtccaactccaaaatgtgaaaatgagaaagaaatgaagagtagcatcaagcaagaacctattgagaggaaagattatattgtagaaaatgagaaggaaaagcccaagagtcgatctaaaaaagccaccaatgctgtggacctgtatgtctgtcttttatgtggcagtggcaatgatgaagaccggctactgttgtgtgatggctgtgatgacagttaccataccttttgcttgatcccacctctccatgatgttcccaagggagactggaggtgtcctaagtgtttggctcaggaatgtagtaagccacaagaagcatttggctttgaacaagcagccagggactataccctccgtacttttggggaaatggcagatgcgttcaaatctgattacttcaacatgccagtccatatggtccccacagagcttgttgagaaagaattttggagactagtaagcactattgaggaggatgtcacagtggaatatggagctgacattgcctcaaaggaatttggcagtggctttcctgtccgagatgggaaaatcaaactctcacctgaggaagaggagtatcttgatagtggctggaatttgaacaacatgccagtgatggagcagtctgtccttgcacatattactgctgatatatgtggcatgaaacttccttggttgtatgtgggaatgtgcttttcttcattctgttggcacattgaagaccactggagctattcaattaactacttgcactggggtgagccaaaaacctggtatggagtcccagggtatgctgctgagcagctagaaaatgtaatgaagaaactagctccagaactctttgtgtcccagccggatctcctccatcagcttgtgaccatcatgaaccccaataccctgatgactcatgaagtgcctgtttaccgaactaatcagtgtgctggggagtttgtgattacatttccaagagcctaccacagtggttttaaccagggttttaattttgctgaggctgttaacttctgcactgttgattggctgccattaggccgacagtgtgtggagcattatcgcttgcttcatcgatattgtgtgttttcccatgatgagatgatctgcaagatggcttccaaggctgatgtattagatgttgtagtggcttcaactgttcagaaagacatggccattatgattgaggatgagaaagctttaagagaaactgtccgtaaattgggagtgattgattcggaaagaatggattttgagctgttgccagatgatgaacgtcagtgtgtaaaatgcaaaactacatgcttcatgtctgccatctcctgttcttgtaaacctggccttcttgtttgcctgcatcatgtaaaagaattgtgttcctgtcctccttataaatataaattgcggtataggtacacgctggatgatctctaccctatgatgaatgcattgaagcttcgagcagaatcttacaacgaatgggccttgaatgtgaatgaagctttggaggcaaagatcaacaagaagaaaagccttgtcagcttcaaggctttaattgaagaatctgaaatgaagaaattcccagacaatgatcttttgcgacaccttcgcctagtcacacaggatgcagagaagtgtgcctctgttgcgcagcagttgcttaatggcaaaaggcaaactagatatcgatctggtggagggaaatcccaaaatcagttgacagtgaatgagctccggcagtttgtaacacagctgtatgctcttccatgtgtcctcagtcagacaccattactaaaggatctcttgaatcgtgtagaagattttcaacagcatagtcagaaactactctctgaggaaacgcctagtgctgcggagctgcaggacttgctagatgtcagctttgaatttgatgttgaacttccacagcttgctgagatgcgtatccgtttggaacaagcccgttggctagaagaggtgcagcaagcttgcctagaccccagctcccttactttagatgatatgagacgtctcatagacctaggggtagggctggccccgtattcagcagtggagaaagctatggcccggctgcaggaactgctcacagtgtcagagcactgggacgacaaagccaagagtctcctcaaggccaggccacgacattcattgaatagccttgctacggcagtaaaggaaatcgaagagatccctgcatatctgcccaatggtgcggctctgaaagactcagtgcagagagccagagactggcttcaggatgtagagggcctgcaggctggaggacgtgtgccagtgttagacacactcatagaacttgttacacgaggccgatctatcccggtacatctgaattctttgccaagactggaaaccctagtagctgaggttcaggcttggaaagaatgtgctgttaatacattcttgactgagaattctccatattctctcttagaggtgctgtgtcctcgatgtgatattggccttttgggattgaaaaggaagcagagaaagttaaaggagcccttgccaaatggaaagaaaaaaagcaccaaattagagagtctgagtgacctggagagagctttaactgaaagcaaggagactgcttcagctatggcaactcttggggaagctcgcctaagggaaatggaagccttgcagtctctcagactcgccaatgaagggaaattgctgtcgcctctccaagatgtggatataaaaatctgcctatgtcagaaggccccagctgcccctatgattcaatgtgaactctgcagggatgctttccacaccagttgtgtggcggtacccagtatttcacagggcctgcgaatctggctttgtccccattgtcggaggtcagagaaacctccattagagaaaattctgcccctgctcgcctcccttcagcgtatccgagttcgccttcctgagggagatgcacttcgatatatgattgaaagaaccgtgaactggcagcacagagcccagcaactgctttcgtcagggaatcttaaatttgtgcaagatcgagtgggctcaggactgttatatagcagatggcaagcctcagcaggacaggtgtcagacacaaacaaggtatctcaacctcctggcacaacatcattttctttgcctgatgactgggacaacagaacctcatatttgcactcccccttctcaactggacgaagttgtatccccctccatggtgttagtccagaagtgaatgaactattgatggaagcccagctgctccaggtatcccttcctgaaattcaggaactttaccagactttacttgcaaagccaagccctgctcagcagactgaccgaagctcaccagtgagacccagcagtgagaagaatgactgttgccgagggaagcgagatggaattaacagtcttgagagaaaactgaagagacgcctggaaagagagggcctctccagtgagcggtgggaacgagttaagaaaatgcggacccccaaaaagaagaaaatcaaactgagccaccccaaggacatgaacaatttcaagttagagagagagcgtagctatgaattagttcgttctgctgaaactcattccctgccctcagacacatcctattccgaacaggaagactctgaggatgaagatgccatctgcccagctgtgagctgcctgcagccagaaggagatgaggtggactgggtccagtgtgatggcagctgcaatcagtggtttcatcaggtctgtgttggtgtctccccagagatggcagagaaagaagactacatctgtgtgcgctgtactgtgaaggacgcaccaagccgaaagtaaaaacacaaaaacagatacccccctacttaatgtaattcaggactccaaccaagaggatttcttcaatctcagcaaagctacaggactggtactcaagccagcctgtaaacggtgctatttctattccttatgggatcatttttccaggactctttgaagnnnnnnnnnnnnnnnnnnnnnnntttttgacactttttgtattttttccttaagagctatttgtggttgttgaggtttgaaaagctgactgttttttttgcagggttcccaccaatttggaaggcattgaagcttgcacttttcatgtacagcattaaaattt

SEQ ID NO: 184194 - DNA, 1602 bp, Homo Sapiens
  misc_feature (727)..(749): n is a, c, g, or t
  misc_feature (1026)..(1075): n is a, c, g, or t
actttgtacaaaaaagttggcaggaactttaccagactttacttgcaaagccaagccctgctcagcagactgaccgaagctcaccagtgagacccagcagtgagaagaatgactgttgccgagggaagcgagatggaattaacagtcttgagagaaaactgaagagacgcctggaaagagagggcctctccagtgagcggtgggaacgagttaagaaaatgcggacccccaaaaagaagaaaatcaaactgagccaccccaaggacatgaacaatttcaagttagagagagagcgtagctatgaattagttcgttctgctgaaactcattccctgccctcagacacatcctattccgaacaggaagactctgaggatgaagatgccatctgcccagctgtgagctgcctgcagccagaaggagatgaggtggactgggtccagtgtgatggcagctgcaatcagtggtttcatcaggtctgtgttggtgtctccccagagatggcagagaaagaagactacatctgtgtgcgctgtactgtgaaggacgcaccaagccgaaagtaaaaacacaaaaacagatacccccctacttaatgtaattcaggactccaaccaagaggatttcttcaaatctcagcaaagctacaggactggtactcaagccagcctgtaaacggtgctatttctattccttatgggatcatttttccaggactctttgaagnnnnnnnnnnnnnnnnnnnnnnntttttgacactttttgtattttttccttaagagctatttgtggttgttgaggtttgaaaagctgactgttttttttgcaggggttcccaccaatttggaaggcattgaagcttgcaccttttcatgtacagcattaaaattttacctctctctgggatttaccagcttaagagtccaactcacttccagtgcccaaaagggcacccaccagaaattccagtaaatcctcatttgaggaagctctcccttgtttactctgttaccacattggggaaannnnnnnnnnnnnnnnnnnnnnnnnnnnnnnnnnnnnnnnnnnnnnnnnnatccacttttcttcttcctggtagactaggtttatttatctgagcaataacttctatgttggtttcagtggctggaattaaaacaaaacaaaacaaacttccaaacagtgtgttggtgctttagcgattgattgatgtacagaacacaaatgtctagtttctagtgtcactgatgaactagtgatgtagaaaagagacttctctgtaagtaattgccacagctgtattttggctttctccctgtcccttcctttctcccctattttttggtagcttgtatcaaatgttacagtttatattgtggaataaatccttcgtcctaacataacactaaatgctgattatttagagccattagagcacagcttcttctgcccctctactgttgcacagccagaagggctgcttgcttttgcctctgcccaacagttgcagtagcagtggatgttagcctgcaaacacattagggattcttcttttgtgtcctgctctgtttggtggccatatgctacagccctcataacaaa

SEQ ID NO: 184195 - DNA, 1371 bp, Homo Sapiens
  misc_feature (250)..(259): n is a, c, g, or t
ctttgtacaaaaaagttggcttatattctgctttttatacatttcagtgctctgcatacattttaaattatgaatgtcgtgcactggcaatgctattttagagtctgcagagaagagaaagcatgttgcttaaacatccttccccagcaccagctattggtgtacctataatttaagaaatagtctatgtaaagtcacaaattaatgaaaaaaattcgcatgaaaatgacagataacactgtagttcctnnnnnnnnnnttaaatgcataagcataaggtagaaattaaaataacaaaattgtctacagcttcttactaagtttttaaaattattcataaaatgcagacatttttggtgaatgtttagccatttttaatattaataaattgatgttaagtgtttgattcagagatgtctgctcttttaaattatatataaggaaaaaaaatagcctgccttgggacaggtgtgtaatgttagtgtgcatgactaatgtaagaaattgttattctactaatatttacttgtgattgtgtgacaagtgtgtttacagattattggttacacttcaatttacagggcataaacaatgattatctattactctgaactttatgattacatgttcttcagattacatgggattgtagttgggagttaccatgtaactcaaacataattaacatgtaattagtttacagattgtaggcatcacttcaattcaccaagcatgtagttctagcgcactagcatggcgccagccatgtacttacaatgtagttacagagtaattacatggtgatttttgcaatgtaaaataaagtgtttctgattattttctatgtaaaggaaccctctcctttccccttctggtccctgcgctttggtataatatatatacttctccatacacagacctctgcagaatgcaaaataaaacttgcagtgaatgaatttagcattttatgagagtgctgttggaaagacttgataattcaccccttttgttttgaagagttgaatcttctgttaaaaggtgatttaaaacttgaatgtgatgaattgtggcaagttaacttcaagttatgtgcaatacttatttcaaacttttgaaagatctttgcagtgtaattctttgtttttaattgcagacatttaaaaatgtcattttctactgttaagagtaatcctctttcttgctggtgtttctaaagaaaagaatcagaaatcaatctttctactaatgtaaatttgagattatttttaaaaatggaataaaagaggttttggtcatttgctttattttattattttaaagctactgtgattgatagcattgtaagaatcgggacaatattgtattcaactg

SEQ ID NO: 184196 - DNA, 1501 bp, Homo Sapiens
  misc_feature (677)..(689): n is a, c, g, or t
  misc_feature (1096)..(1157): n is a, c, g, or t
gtgaagtagttgcaaagtgttttgcactgttgaactaagtaactgtgtaaatctgtgcaaaggtacgtatgtttatcttactcttcctataaactaaaataacattacagtttccgaatttagcatgggacatagtcagtgtttgaagtgccaacttcatcaagtaatgcatgctttattataaataaaattctagctttgaaaggcgttatgtgttgaacagtatgcttcaggggtaaatttaaaatagtctcttgaagccctagtcatggaagtaacttttattttaattgacattctcttattaaatgccctatccatcattaaaaggtttattatcagtgggcaaaacatgaaataatatgatcgaatggcaatcttgctagttgcgctacctaacagtaccatcttggatccttcaaaaccaaagacttgccccagcactgctgtggaaccacctggcttatgacccctatggatgatctttaggaaaagcagccctttacttttaatacaggctttaatgaactatacctgttaagttccaaaggtcaaaatggaggcatttgctgtctaatattcaaacatagaaagggagctgcttttaaagaattccctgcaaatactgaaagcagtcatgcgaatggagggtgctcttgtgtagctggtcagggacnnnnnnnnnnnnnctcctgaactacatgattctaattggaatgttcatttgcctctttttactcttttaaatgcttgtaggtggcttggggtgtgctatcgtgctgttcctactcagtaaacaggtgtgatgagttaacaagaaataacactgtttgagaactagctttgaataataatttttccctttgtacatgacctgctgaatttcggtacagtgtttttgtagctaacttattttgtcatgcacataatgtatatttgttatgcactacttttgtatatcttgtttttccaacagtgaacatttttaggcacacttttcactgacgggatatctctttatgcaatacctcaatttttcatattgcaaagagtagctttttgtacttttattactgagagatcttcatatacttcnnnnnnnnnnnnnnnnnnnnnnnnnnnnnnnnnnnnnnnnnnnnnnnnnnnnnnnnnnnnnncagtgctctgcatacattttaaattatgaatgtcgtgcactggcaatgctattttagagtctgcagagaagagaaagcatgttgcttaaacatccttccccagcaccagctattggtgtacctataatttaagatatagtctatgtaaagtcacaaattaatgataaagattcgcatgaaaatgacagataacactgtagttcctaaacaaaaaattaaatgcataagcataaggtagaaattaaaataacaaaattgtctacagcttcttactaagattttaaaattattcataaaatgcagacatttatggtgaatgtgtagccatttctaatattaataaa

SEQ ID NO: 184197 - DNA, 1376 bp, Homo Sapiens
ttggcgggagcctcaaccgcggcgcgtggaggcagtaccagagcgcgcggcgcgcagtcggccggcagccgcgggacagccttggcagaacagccgcggcgggagccccgcagccccgggctgggcccgcgtcccggagcgccaccggagagcgaggacgacgtggaggcggagtggcgcccggcgaggtagcgccaggcgagctggagaccatggccaaaatggaggtgaaaacctcacttctggacaatatgattggagttggggatatggttcttttagaacctctcaatgaggagaccttcatcaacaacctcaagaagcgctttgaccacagtgaaatatacacttacattggaagtgtggttatatctgttaacccatatcggtctttacccatttattcaccagagaaagtggaagaatacaggaacagaaatttttatgaactgagccctcacatctttgccctttcggatgaagcatacagatccctacgagatcaagataaggaccaatgtattctcattactggggaaagtggagcaggaaaaacagaggccagtaagcttgtcatgtcctatgtggcagctgtttgtggaaaaggagcagaagttaatcaagttaaagaacagcttttacagtccaacccggtcctggaagcttttggaaatgccaaaactgtaaggaatgacaactcctctagatttggcaaatatatggatattgaatttgactttaaaggcgatccactaggaggagtaataagtaactatcttttagagaaatctcgggttgttaaacagccaagaggtgaaagaaacttccatgtgttctatcagctgctctctggtgcctctgaagagctcctcaataaacttaagcttgagagggatttcagcaggtataactacctgagtctggattcggccaaagtgaatggagtggatgatgcagcaaattttagaaccgtgcggaatgccatgcagattgtgggctttatggatcatgaagctgagtctgtcttggcggtggtggcagcagtgttgaaactggggaacattgagttcaagcccgaatctcgagtgaatggtctagatgaaagcaaaatcaaagataaaaatgagttaaaagaaatttgtgaattgaccggcattgatcaatcagttctagaacgagcattcagtttccgaacagttgaggccaaacaggagaaagtttcaactacactgaatgtggctcaacttattatgcccgtgatgctctggctaaaaacctctacagcagttgttttcatggttggtaaatcgaatcaatgaaagcattaagcacaaacaaagtgagaagaaggtcatgggtgttctggacatttatgg

SEQ ID NO: 184198 - DNA, 1876 bp, Homo Sapiens
gccaactttgtacaaaaaagttggcagctccaggacccttgacgcccaggacagaagctttggaacgagacccctgagctctgggttcagccccgaggaagcccagcaacaggatgaggaatttgagaagaagattccaagtgtggaagacagccttggagagggcagcagggatgctggccggccaggagagagaggatccgggggcttgttcagtcctagcactgcccacgtgccggatggggcactcgggcagagagaccagagcagctggcaaaacagtgatgctagccaggaggtgggagggcatcaggagagacagcaggcaggggctcagggccctggcagtgctgacctggaagatggggagatgggaaagcgaggctgggtcggtgagtttagcctcagtgttggcccccagcgagaggcagcatttagcccagggcagcaggactggagccgggacttctgtatcgaggccagtgagaggagctatcagtttggcatcattggcaacgacagagtgagtggtgctggctttagcccttctagcaagatggaaggtggtcactttgtgcctcctgggaagaccacagctggctcggtggactggactgaccagctgggtctcaggaacttggaagtgtccagctgtgtgggttctgggggctcgagcgaggccagggagagtgccgtgggacagatgggctggtcaggtggcctgagcttgagagacatgaacctgaccggctgtttggaaagtggagggtctgaagagccggggggaatcggagttggggagaaggactggacttctgatgttaatgtgaagagcaaagatttggctgaggtcggggagggaggaggccacagccaggccagagagagtggcgtggggcagactgactggtcaggtgtggaggccggagagttccttaaatcaagggagcgtggagttggacaggcagactggacacctgaccttgggctgagaaacatggccccaggggcagtctgcagtcctggagagtccaaagagcttggggtgggccagatggactggggtaacaatctgggcctgagggatttggaggtgacctgtgacccagactctggaggttctcaggggctacggggatgtggagtggggcagatggactggacccaggacttggcgccccagaatgtggagctctttggggctccaagtgaagccagggagcatggggtgggcggggtgagccagtgcccagagcccggcctgaggcacaatggcagcttgtctcctggcctggaggccagagaccccttggaggccagggagctgggggttggtgagacaagtgggccagagacccagggtgaagattactcctcgtcttccttggagccacaccctgcagaccctggaatggagacaggagaagccctcagcttcggagcaagccctggcaggtgcccggcccgccccccaccctccggctcccagggcctgctggaggagatgctggcagccagcagctccaaggcggtggctcggagggagtcagcggcctcgggccttgggggcctgttggaggaggaaggagccggggcaggtgctgccccagaggaggtgctggagcctggcaaggactctccaccctcctggaggccgcagcctgatggtgaggccagctagacagaagacgtggatggcacctggggctcttcagcagccaggtggagcgatcaggggccagcacagacttctcggcgactctctcaaggccctcctgccagatctcccagtcaggacttctccttcattgaggacaccgagatcctcgacagtgccatgtatcggagccgtgccaacttggggcgcaagcgtggg

SEQ ID NO: 184199 - DNA, 1036 bp, Homo Sapiens
ttggctacagtagtcgagatgtaagccttggggactgggaatttgggaagagagattctctgggtgcttatgccagccaagatgccaacgagcagggccaggatttggggaagagggaccaccatggtaggtacagcagccaggatgccgatgagcaggactgggagtttcagaagagagatgtgtcactcggcacctatggcagccgggctgcggagccacaggaacaggagtttgggaagagcgcttggataagggactacagcagtggtggcagctccaggacccttgacgcccaggacagaagctttggaacgagacccctgagctctgggttcagccccgaggaagcccagcaacaggatgaggaatttgagaagaagattccaagtgtggaagacagccttggagagggcagcagggatgctggccggccaggagagagaggatccgggggcttgttcagtcctagcactgcccacgtgccggatggggcactcgggcagagagaccagagcagctggcaaaacagtgatgctagccaggaggtgggagggcatcaggagagacagcaggcaggggctcagggccctggcagtgctgacctggaagatggggagatgggaaagcgaggctgggtcggtgagtttagcctcagtgttggcccccagcgagaggcagcatttagcccagggcagcaggactggagccgggacttctgcatcgaggccagtgagaggagctatcagtttggcatcattggcaacgacagagtgagtggtgctggctttagcccttctagcaagatggaaggtggtcactttgtgcctcctgggaagaccacagctggctcggtggactggactgaccagctgggtctcaggaacttggaagtgtccagctgtgtgggttctgggggctcgagcgaggccagggagagtgccgtgggacagatgggctggtcaggtggcctgagcttgagagacatgaacctgaccggctgtttggaaagtggagggtctgaagagccgggggg

SEQ ID NO: 184200 - DNA, 841 bp, Homo Sapiens
caaattgatgagcaatgctttctttttaatgccaactttgtacaaaaaagttggctacggtcccgacccgcgggcgaggccgggtacctgggctgggatccggagcaagcgggcgagggcagcgccctaagcaggcccggagcgatggcagccttgatgaccccgggaaccggggccccacccgcgcctggtgacttctccggggaagggagccagggacttcccgacccttcgccagagcccaagcagctcccggagctgatccgcatgaagcgagacggaggccgcctgagcgaagcggacatcaggggcttcgtggccgctgtggtgaatgggagcgcgcagggcgcacagatcggggccatgctgatggccatccgacttcggggcatggatctggaggagacctcggtgctgacccaggccctggctcagtcgggacagcagctggagtggccagaggcctggcgccagcagcttgtggacaagcattccacagggggtgtgggtgacaaggtcagcctggtcctcgcacctgccctggcggcatgtggctgcaaggtgccaatgatcagcggacgtggtctggggcacacaggaggcaccttggataagctggagtctattcctggattcaatgtcatccagagcccagagcagatgcaagtgctgctggaccaggcgggctgctgtatcgtgggtcagagtgagcagctggttcctgcggacggaatcctatatgcagccagagatgtgacagccaccgtggacagcctgccactcatcacagcctccattctcagtaagaaactcgtggaaggggctgtccgctctggtggtg

SEQ ID NO: 184201 - DNA, 2073 bp, Homo Sapiens
ttggctgaaccctaccgtcccgacccgcgggcgaggccgggtacctgggctgggatccggagcaagcgggcgagggcagcgccctaagcaggtacgggcggggctcaagtcgcgaggcggggaagcgggaggcagacacggacgagggcgacacagacacgggaccgaggggcggacaccggagagacacgggaaaggggtcgggacaggagcacgtggctcagacaccgacgccgggaggccgcagaccccggacgtgtcaggcatccccgcaggcccggagcgatggcagccttgatgaccccgggaaccggggccccacccgcgcctggtgacttctccggggaagggagccagggacttcccgacccttcgccagagcccaagcagctcccggagctgatccgcatgaagcgagacggaggccgcctgagcgaagcggacatcaggggcttcgtggccgctgtggtgaatgggagcgcgcagggcgcacagatcggtgcgtggggagggttgggcgttcctgaccccgactgggaggtcagcccgagagactttgggtccctgggggtgcgacggtgccccactaccagcaccggccccagggtgccccaccgctgtgggctgccaccctcacgcgtacccccacataccaggggccatgctgatggccatccgacttcggggcatggatctggaggagacctcggtgctgacccaggccctggctcagtcgggacagcagctggagtggccagaggcctggcgccagcagcttgtggacaagcattccacagggggtgtgggtgacaaggtcagcctggtcctcgcacctgccctggcggcatgtggctgcaaggtgccaatgatcagcggacgtggtctggggcacacaggaggcaccttggataagctggagtctattcctggattcaatgtcatccagagcccagagcagatgcaagtgctgctggaccaggcgggctgctgtatcgtgggtcagagtgagcagctggttcctgcggacggaatcctatatgcagccagagatgtgacagccaccgtggacagcctgccactcatcacagcctccattctcagtaagaaactcgtggaggggctgtccgctctggtggtggacgttaagttcggaggggccgccgtcttccccaaccaggagcaggcccgggagctggcaaagacgctggttggcgtgggagccagcctagggcttcgggtcgcggcagcgctgaccgccatggacaagcccctgggtcgctgcgtgggccacgccctggaggtggaggaggcgctgctctgcatggacggcgcaggcccgccagacttaagggacctggtcaccacgctcgggggcgccctgctctggctcagcggacacgcggggactcaggcccagggcgctgcccgggtggccgcggcgctggacgacggctcggcccttggccgcttcgagcggatgctggcggcgcagggcgtggatcccggtctggcccgagccctgtgctcgggaagtcccgcagaacgccggcagctgctgcctcgcgcccgggagcaggaggagctgctggcgcccgcagatggagcatcagatccatgctgctgctgactcggagccccacagcttggcacaggctctctcagctcaagcctccggtcctccctgggaccctgggaggccaggccctgcatctgaggtcctggcttttgtcaaggcagggccctgcagagacaggtgggcagggccagccccagggccctgggcttcgaacccggctgctgatcacaggcctgttcggggctggactcggtggggcctggctggccctgagggctgagaaggagaggctgcagcagcaaaaagcgaacagaagccctgcgccgggcagctgtgggccaggggcgacttccacctgctggatcacagatgcccgggctcgctgccaggctgacttcccggggccagtgggtgctgatgtactttggcttccctccactgcccctacatctgcccaaaacaaactggaaaaagcttggtgcaaggtggtgcgggca

SEQ ID NO: 184202 - DNA, 1040 bp, Homo Sapiens
ttgggacagtttacagaagaatcaagacctggaatttgaaagaaatagagagcgatttgaatttttaaagtggggttcccaggcttttcacaacatgcggattattccccctggctcaggaatcatccaccaggtgaatttggaatatttggcaagagtggtatttgatcaggatggatattattacccagacagcctcgtgggcacagactcgcacactaccatgattgatggcttgggcattcttggttggggtgtcggtggtattgaagcagaagctgtcatgctgggtcagccaatcagtatggtgcttcctcaggtgattggctacaggctgatggggaagccccaccctctggtaacatccactgacatcgtgctcaccattaccaagcacctccgccaggttggggtagtgggcaaatttgtcgagttcttcgggcctggagtagcccagttgtccattgctgaccgagctacgattgctaacatgtgtccagagtacggagcaactgctgcctttttcccagttgatgaagttagtatcacgtacctggtgcaaacaggtcgtgatgaagaaaaattaaagtatattaaaaaatatcttcaggctgtaggaatgtttcgagatttcaatgacccttctcaagacccagacttcacccaggttgtggaattagatttgaaaacagtagtgccttgctgtagtggacccaaaaggcctcaggacaaagttgctgtgtccgacatgaaaaaggactttgagagctgccttggagccaagcaaggatttaaaggattccaagttgctcctgaacatcataatgaccataagacctttatctatgataacactgagttcacccttgctcatggttctgtggtcattgctgccattactagctgcacaaacaccagtaatccgtctgtgatgttaggggcaggattgttagcaaagaaagctgtggatgctggcctgaacgtgatgccttacatcaaaactagcctgtctcctggggagtggcgtggtcacctactac

SEQ ID NO: 184203 - DNA, 2228 bp, Homo Sapiens
ttggctggccaagaggggcccttggggctgccaggaatcccaggccgtgaaggtctgcctggtgatagaggggaccctggggacacaggcgctcctggccctgtgggcatgaaaggtctctctggtgacagaggagatgctggcttcacaggggagcaaggccatccaggaagccctggatttaaaggaattgatggaatgcctgggacccccgggctaaaaggagacagaggctcacctgggatggatggtttccaaggcatgcctggactcaaagggagacccgggtttccagggagcaaaggcgaggctggatttttcggaatacccggtctgaagggtctggctggtgagccaggttttaaaggcagccgaggggaccctgggcccccaggaccacctcctgtcatcctgccaggaatgaaagacattaaaggagagaaaggagatgaagggcctatggggctgaaaggatacctgggcgcaaaaggtatccaaggaatgccaggcatcccagggctgtcaggaatccctgggctgcctgggaggcccggccacatcaaaggagtcaagggagacatcggagtccccggcatccccggtttgccaggattccctggggtggctggcccccctggaattacgggattcccaggattcataggaagccggggtgacaaaggtgccccagggagagcaggcctgtatggcgagattggcgcgactggtgatttcggtgacatcggggacactataaatttaccaggaagaccaggcctgaagggggagcggggcaccactggaataccaggtctgaagggattctttggagagaagggaacagaaggtgacatcggcttccctgggataacaggcgtgactggagtccaaggccctcctggacttaaaggacaaacaggctttccagggctgactgggcctccagggtcgcagggagagctggggcggattggactgcctggtggcaaaggagatgatggctggccgggagctccgggcttaccaggttttccgggactccgtgggatccgcggcttacacggcttgccaggcaccaagggctttccaggatccccaggttctgacatccacggagacccaggcttcccaggccctcctggggaaagaggtgacccaggagaggccaacacccttccaggccctgtgggagtcccaggacagaaaggagaccaaggagctccaggggaacgaggcccacctgggagcccaggacttcaggggttcccaggcatcacacccccttccaacatctctggggcacctggtgacaaaggggcgccagggatatttggcctgaaaggttatcggggcccaccagggccaccaggttctgctgctcttcctggaagcaaaggtgacacagggaacccaggagctccaggaaccccagggaccaaaggatgggccggggactccgggccccagggcaggcctggtgtgtttggtctcccaggagaaaaagggcccaggggtgaacaaggcttcatggggaacactggacccaccggggcggtgggcgacagaggccccaagggacccaagggagacccaggattccctggtgcccccgggactgtgggagcccccgggattgcaggaatcccccagaagattgccgtccaaccagggacagtgggtccccaggggaggcgaggcccccctggggcaccgggggagatggggccccagggcccccccggagaaccaggttttcgtggggctccagggaaagctgggccccaaggaagaggtggtgtgtctgctgttcccggcttccggggagatgaaggacccataggccaccaggggccgattggccaagaaggtgcaccaggccgtccagggagcccgggcctgccgggtatgccaggccgcagcgtcagcatcggctacctcctggtgaagcacagccagacggaccaggagcccatgtgcccggtgggcatgaacaaactctggagtggatacagcctgctgtacttcgagggccaggagaaggcgcacaaccaggacctggggctggcgggctcctgcctggcgcggttcagcaccatgccctttcctgtactgccacccctggtgatgtctgctactatgcccagcccggaacgacaagtccctactggctctctaccactgcgccgctgcccatgatgcccgtggccgaggacgagatcagcccctac

SEQ ID NO: 184204 - DNA, 1380 bp, Homo Sapiens
  misc_feature (1222)..(1232): n is a, c, g, or t
  misc_feature (1288)..(1297): n is a, c, g, or t
ttggcaacagcgcaggctcccagccgagtccgttatggccgctgccgtcccgaagaggatgagggggccagcacaagcgaaactgctgcccgggtcggccatccaagcccttgtggggttggcgcggccgctggtcttggcgctcctgcttgtgtccgccgctctatccagtgttgtatcacggactgattcaccgagcccaaccgtactcaactcacatatttctaccccaaatgtgaatgctttaacacatgaaaaccaaaccaaaccttctatttcccaaatcagcaccaccctccctcccacgacgagtaccaagaaaagtggaggagcatctgtggtccctcatccctcgcctactcctctgtctcaagaggaagctgataacaatgaagatcctagtatagaggaggaggatcttctcatgctgaacagttctccatccacagccaaagacactctagacaatggcgattatggagaaccagactatgactggaccacgggccccagggacgacgacgagtctgatgacaccttggaagaaaacaggggttacatggaaattgaacagtcagtgaaatcttttaagatgccatcctcaaatatagaagaggaagacagccatttcttttttcatcttattatttttgctttttgcattgctgttgtttacattacatatcacaacaaaaggaagatttttcttctggttcaaagcaggaaatggcgtgatggcctttgttccaaaacagtggaataccatcgcctagatcagaatgttaatgaggcaatgccttctttgaagattaccaatgattatattttttaaagcactgtgatttgaatttgcttatgtaattttatttgcttgactttttatatgatattgtgcaaatgtttgccataggcaattggtacttaaatgagaggtgagtctctcttttgccttggtgctttggaaattaaatgtcacaaacgagtatataattttttatctgtacttttagagctgagtttaatcaggtgtccaaaatgtgagttaaacattaccttatatttacactgttagtttttattgttttagatttattatgcttcttctggaagtattagtgatgctacttttaaaaatcccaaacttgtaactaaattctgacatatctgttactgctgactcacattcattctccgccattcaaatactattttttatccacannnnnnnnnnngttcccaaactgtaatgtacaagatatgtgtgaaatgctttggatttgagtaatannnnnnnnnncttccaagaaactgctttggatatttttagataatttaaacataatttaggataatgatattgctcaatctgaccacaatttt

SEQ ID NO: 184205 - DNA, 1102 bp, Homo Sapiens
  misc_feature (127)..(148): n is a, c, g, or t
  misc_feature (206)..(214): n is a, c, g, or t
  misc_feature (685)..(725): n is a, c, g, or t
ttggatttattatgcttcttctggaagtattagtgatgctacttttaaaagatcccaaacttgtaactaaattctgacatatctgttactgctgactcacattcattctccgccattcaaatactannnnnnnnnnnnnnnnnnnnnngttcccaaactgtaatgtacaaggatatgtgtgataatgctttggatttgagtaatannnnnnnnncttccaagaaaactgctttggatatttttagataatttaaacataatttaggataatgatattgctcaatctgaccacaattttaggtaaaacattaaatgtgtcaagaaatcttggcaacagagactctgcagcttgcagtggacatagataaaatgttacagagatactatttttttggttggaattactatattaaatttagaagcagaaactggtaaaatgttaaatacatgtacaattgcttttagttagcaattgattgtagcatgggttcctccaaggtttcaagcaatgggcagagtttaaaattatatcagattcgtttacttcgtttattattttacagtaaatttgaataaatcttaggggtcattatcacttaaataatactgtacctaggtctttcaaattaaaattatacctgaatgaagttgtttgtgtacataaaggatatttgtgtacaattannnnnnnnnnnnnnnnnnnnnnnnnnnnnnnnnnnnnnnnnatggcaactggaaagtatttactatgggattcatttatgtctgtctttctatcataaagaattgatcaatatgtaaatatgtgatttgaaccatggttgacttacaagtgtcactacagctttttagaaaacatagccctaatatatgttaagcaggacccgggtgagccagtgggcttgcgctttatgtagagctggaagaaggccgtccatcctgtctcttgggcggacagtgtactttcctaatagggaagggaagcacaatggaaatacccctgaaccgttttattgcagtaatttttttcatatctgaaactattatttaatattttgaataagattttaaaaaataaatggcaaagatataaatctaaaaa

SEQ ID NO: 184206 - DNA, 896 bp, Homo Sapiens
ataaaagccaactttgtacaaaaaagttggctgcctcaaggtctcaagcaccagtcttcaccgcggaaagcatgttgtggctgttccaatcgctcctgtttgtcttctgctttggcccagggaatgtagtttcacaaagcagcttaaccccattgatggtgaacgggattctgggggagtcagtaactcttcccctggagtttcctgcaggagagaaggtcaacttcatcacttggcttttcaatgaaacatctcttgccttcatagtaccccatgaaaccaaaagtccagaaatccacgtgactaatccgaaacagggaaagcgactgaacttcacccagtcctactccctgcaactcagcaacctgaagatggaagacacaggctcttacagagcccagatatccacaaagacctctgcaaagctgtccagttacactctgaggatattaagacaactgaggaacatacaagttaccaatcacagtcagctatttcagaatatgacctgtgagctccatctgacttgctctgtggaggatgcagatgacaatgtctcattcagatgggaggccttgggaaacacactttcaagtcagccaaacctcactgtctcctgggaccccaggatttccagtgaacaggactacacctgcatagcagagaatgctgtcagtaatttatccttctctgtctctgcccaaaagctttgcgaagatgttaaaattcaatatacagataccaaaatgattctgtttatggttttctgggatatgcatagtcttcggtttcatcatactgctgttacttgttttgaggaaaagaagagattccctatctttgtctactcagcgaacacagggccccgagtccgcaaggaacctagagtatgtttc

SEQ ID NO: 184207 - DNA, 2599 bp, Homo Sapiens
ttggcgcgcgggccgcgtgaagcgaggcgaggcaaggcttttcggacccacggagcgacagagcgagcggcccctacggccgtcggcggcccggcggcccgagatgttatctgggaagaaggcggcagccgcggcggcggcggctgcagcggcagcaaccgggacggaggctggccctgggacagcaggcggctccgagaacgggtctgaggtggccgcgcagcccgcgggcctgtcgggcccagccgaggtcgggccgggggcggtgggggagcgcacaccccgcaagaaagagcctccgcgggcctcgccccccgggggcctggcggaaccgccggggtccgcagggcctcaggccggccctactgtcgtgcctgggtctgcgacccccatggaaactggaatagcagagactccggaggggcgtcggaccagccggcgcaagcgggcgaaggtagagtacagagagatggatgaaagcttggccaacctctcagaagatgagtattattcagaagaagagagaaatgccaaagcagagaaggaaaagaagcttcccccaccaccccctcaagccccacctgaggaagaaaatgaaagtgagcctgaagaaccatcgggtgtggagggcgcagctttccagagccgacttcctcatgaccggatgacttctcaagaagcagcctgttttccagatattatcagtggaccacaacagacccagaaggtttttcttttcattagaaaccgcacactgcagttgtggttggataatccaaagattcagctgacatttgaggctactctccaacaattagaagcaccttataacagtgatactgtgcttgtccaccgagttcacagttatttagagcgtcatggtcttatcaacttcggcatctataagaggataaaacccctaccaactaaaaagacaggaaaggtaattattataggctctggggtctcaggcttggcagcagctcgacagttacaaagttttggaatggatgtcacacttttggaagccagggatcgtgtgggtggacgagttgccacatttcgcaaaggaaactatgtagctgatcttggagccatggtggtaacaggtcttggagggaatcctatggctgtggtcagcaaacaagtaaatatggaactggccaagatcaagcaaaaatgcccactttatgaagccaacggacaagctgttcctaaagagaaagatgaaatggtagagcaagagtttaaccggttgctagaagctacatcttaccttagtcatcaactagacttcaatgtcctcaataataagcctgtgtcccttggccaggcattggaagttgtcattcagttacaagagaagcatgtcaaagatgagcagattgaacattggaagaagatagtgaaaactcaggaagaattgaaagaacttcttaataagatggtaaatttgaaagagaaaattaaagaactccatcagcaatacaaagaagcatctgaagtaaagccacccagagatattactgccgagttcttagtgaaaagcaaacacagggatctgaccgccctatgcaaggaatatgatgaattagctgaaacacaaggaaagctagaagaaaaacttcaggagttggaagcgaatcccccaagtgatgtatatctctcatcaagagacagacaaatacttgattggcattttgcaaatcttgaatttgctaatgccacacctctctcaactctctcccttaagcactgggatcaggatgatgactttgagttcactggcagccacctgacagtaaggaatggctactcgtgtgtgcctgtggctttagcagaaggcctagacattaaactgaatacagcagtgcgacaggttcgctacacggcttcaggatgtgaagtgatagctgtgaatacccgctccacgagtcaaacctttatttataaatgcgacgcagttctctgtacccttcccctgggtgtgctgaagcagcagccaccagccgttcagtttgtgccacctctccctgagtggaaaacatctgcagtccaaaggatgggatttggcaaccttaacaaggtggtgttgtgttttgatcgggtgttctgggatccaagtgtcaatttgttcgggcatgttggcagtacgactgccagcaggggtgagctcttcctcttctggaacctctataaagctccaatactgttggcactagtggcaggagaagctgctggtatcatggaaaacataagtgacgatgtgattgttggccgatgcctggccattctcaaagggatttttggtagcagtgcagtacctcagcccaaagaaactgtggtgtctcgttggcgtgctgatccctgggctcgggctcttattcctatgttgctgcaggatcatctggaaatgactatgatttaatggctcacccaatcactcctggcccctcgattccaggtgccccacagccggattccacgactcttctttgcgggagaacatacgatccgtaactacccagccacagtgcatggtgctctgctgaattgggctgcgagaagcgggaaaaattgccgaacaagtttttggggg

SEQ ID NO: 184208 - DNA, 2270 bp, Homo Sapiens
  misc_feature (177)..(202): n is a, c, g, or t
ttggttaagtccttactgagcaacgatttaaaacttaatttaaaaatgagagaagagtatgacaaaattcagattgctgacttgatggaagaaaagttccgaggtgatgctggtttgggcaaactaataaaaattttcgaagatataccaacgcttgaagacctggctgaaactctnnnnnnnnnnnnnnnnnnnnnnnnnngaccagccctatcaagaaagaggaagaaggaagtggatgctacttcacctgcaccctccacaagcagcactgtcaaaactgaaggagcagaggcaactcctggagctcagaaaagaaaaaaatcaaccaaagaaaaggctggacccaaagggagtaaggtgtccgaggaacagactcagcctccctctcctgcaggagccggcatgtccacagccatgggccgttccccatctcccaagacctcattgtcagctccacccaacacttcttcaactgagaacccgaaaacagtggccaaatgtcaggtaactcccagaagaaatgttctccaaaaacgcccagtgatagtgaaggtactgagtacaacaaagccatttgaatatgagaccccagaaatggagaaaaaaataatgtttcatgctacagtggctacacagacacagttcttccatgtgaaggttttaaacaccagcttgaaggagaaattcaatggaaagaaaatcatcatcatatcagattatttggaatatgatagtctcctagaggtcaatgaagaatctactgtatctgaagctggtcctaaccaaacgtttgaggttccaaataaaatcatcaacagagcaaaggaaactctgaagattgatattcttcacaaacaagcttcaggaaatattgtatatggggtatttatgctacataagaaaacagtaaatcagaagaccacaatctacgaaattcaggatgatagaggaaaaatggatgtagtggggacaggacaatgtcacaatatcccctgtgaagaaggagataagctccaacttttctgctttcgacttagaaaaaagaaccagatgtcaaaactgatttcagaaatgcatagttttatccagataaagaaaaaaacaaacccgagaaacaatgaccccaagagcatgaagctaccccaggaacagagtcagcttccaaatccttcagaggccagcacaaccttccctgagagccatcttcggactcctcagatgccaccaacaactccatccagcagtttcttcaccaagaaaagtgaagacacaatctccaaaatgaatgacttcatgaggatgcagatactgaaggaagggagtcattttccaggaccgttcatgaccagcataggcccagctgagagccatccccacactcctcagatgcctccatcaacaccaagcagcagtttcttaaccacgttgaaaccaagactgaagactgaacctgaagaagtttccatagaagacagtgcccagagtgacctcaaagaagtgatggtgctgaacgcaacagaatcatttgtatatgagcccaaagagcagaagaaaatgtttcatgccacagtggcaactgagaatgaagtcttccgagtgaaggtttttaatattgacctaaaggagaagttcaccccaaagaagatcattgccatagcaaattatgtttgccgcaatgggttcctggaggtatatcctttcacacttgtggctgatgtgaatgctgaccgaaacatggagatcccaaaaggattgattagaagtgccagcgtaactcctaaaatcaatcagctttgctcacaaactaaaggaagttttgtgaatggggtgtttgaggtacataagaaaaatgtaaggggtgaattcacttattatgaaatacaagataatacagggaagatggaagtggtggtgcatggacgactgaccacaatcaactgtgaggaaggagataaactgaaactcacctgctttgaattggcaccgaaaagtgggaataccggggagttgagatctgtaattcatagtcacatcaaggtcatcaagaccaggaaaaacaagaaagacatactcaatcctgattcaagtatggaaacttcaccagactttttcttctaaaatctggatgtcattgacgataatgtttatggagataaggtctaagtgcctaaaaaaatgtacatatacctggttgaaatacaacactatacatacacaccaccatatatactagctgttaatcctatggaaaggggtattgggagtgc

SEQ ID NO: 184209 - DNA, 957 bp, Homo Sapiens
  misc_feature (323)..(348): n is a, c, g, or t
actttgtacaaaaaagttggcaagatctggactactgttgaaaaaatttccagtgaggctcacttatgtctgtaaagatgggaaaaaaatacaagaacattgttctactaaaaggattagaggtcatcaatgattatcattttagaatggttaagtccttactgagcaacgatttaaaacttaatttaaaaatgagagaagagtatgacaaaattcagattgctgacttgatggaagaaaagttccgaggtgatgctggtttgggcaaactaataaaaattttcgaagatataccaacgcttgaagacctggctgaaactctnnnnnnnnnnnnnnnnnnnnnnnnnngaccagccctatcaagaaagaggaagaaggaagtggatgctacttcacctgcaccctccacaagcagcactgtcaaaactgaaggagcagaggcaactcctggagctcagaaaagaaaaaaatcaaccaaagaaaaggctggacccaaagggagtaaggtgtccgaggaacagactcagcctccctctcctgcaggagccggcatgtccacagccatgggccgttccccatctcccaagacctcattgtcagctccacccaacacttcttcaactgagaacccgaaaacagtggccaaatgtcaggtaactcccagaagaaatgttctccaaaaacgcccagtgatagtgaaggtactgagtacaacaaagccatttgaatatgagaccccagaaatggagaaaaaaataatgtttcatgctacagtggctacacagacacagttcttccatgtgaaggttttaaacaccagcttgaaagagaaattcaatggaaagaaaatcatcatcatatcagattatttgggaatatgatagtctcctagaggtcaatgaagaatctactgtatctgaagctggtcctaaccaaacgtttgagttccaaataaaa

SEQ ID NO: 184210 - DNA, 1277 bp, Homo Sapiens
gagcaatgcttttcctataaagccaactttgtacaaaaaagttggcatgaatgtccttcacttgtaacgtggttcacaggttactaatcatagatcctgaccagcatttgtaacactgctctaactaggacacagcatgcagcagccacactcacaccctgggatgtctgtgtacctctgtccctaggtgtaggaaatggaagaaaaagattcagccaagtggggaggtgacagatgcacaattatgaaacctggttgtacatgttatgaaagtatactaagtaagttagtttttattattaatgtgaaagcaaaaacttgtatgttaacttattttcaatatcttgaccttatttatgatctgctaaagtggtgatttatccattcaaaatatatatttttttccatttaaaactaatttataaactatgtactcctgggaagatttgaaatcttttagaagtttgttgaaatattttcaccatttcagacagacttctgacttagatactgattttaatgccagtatctgctctaaatatttatgataaaaatgcattatttttttaaagagcttgatgagatttgtgataagtgatagtactcaaaaacctgaatcccacccctcgaccaatcctccacaaacttcagttgttggttaacgtattaactgaacacagacaatacagtctgatttagaagtcatcttttcagccgtgtgataattaacatggtaagccttagcagcaaacattcttcctaaaaggaagacttcattttctcaagaaatgggattagttgggggtattataataccaaattgtaaatcatgagcgttttctccactgtgcacctgaggcagatcatgcgtctttgagtgcagtttggtctgacccctcaagagaaaagcatggtgctgtagggctgctatggtttgaatggatgccatcactcttttctccacatacagtgcagagagctgtctggagtcacaatctgaacagattctcgggcgctccttctctccttccatcactacagtaagtaaaaggaccatagaggggaaccaggaatctgagaatcagctgtgctcaatagccaacctccctgtccagatgcagctattttggtatctcctatcacatgcactctgaatcagggtttttctataagaaatctttcagaatcagcaaagtggggatgacccagcatcttgatttgcaaaatcacaaaactaagttgtcagttatcactgtagatgagcaactcatcttttt

SEQ ID NO: 184211 - DNA, 1205 bp, Homo Sapiens
ttggatcaattctgtgtctctacatgcctttgattccttagaggtcggtaatttaacataaaacagggatgtcactttgaggggcagatgaaagtctagagaactgttccttaatagcattgtaaaagttccattccaactgccagtgtagattttaaaagtgttaaatagtgactcccttgattaaactgtttgtaattatttgagtagattaataatgaaaatactttggaaataatatacattttgacattctaccaagaggacaactttggttctggaactggtttctatttgtcaaatcagtttccttttaacataattaatccctttaacaaaaagccgtctatgggattaaaagacacgtgaaatgatacttttattattcccttgctcatataactttaaaaataatacttttagctctaatagctcaagaacacaatattcgttaatgttcagtaaagtagcctgagacattttcaatgtttccttaaggtttttgaatgactgtatatttggcagttaagcagtgccacactacagggtagatatggtaaattttatatttgtatatttacagttacaaaacaaatgtacttttaccttttatttctgaccctgtgtgttagagcagttgcatgctctcctgctgttaaaaacacattgttaagctgtggatttgtactcaataatgacttaggataaacatttattttcattcattgctttacatactagacatttttcttctctttgtaagtagattcaaattagatagtcaataaaacatcttgaaaatcccacaagccaattatgtctctctagtctgaatggcttcattgtttctttctcagtattagaaattatagttacaatgaattgcatatgaagaaggcagacatttatttttaatagccaagtagttctgcaaatagttcttttaacaatttgacctctctccaaaacagagacacatataagtagtgctcatccatgcactactaataatacatggcttattccaaagtttttagtcaacttttgggacttggggtgcattttctcacagaaagaatagtagttagggttccctaacactaccgctgatagctcacctgggaactgaatccacctaaccatgaatgtccttcacttgtaacgtggttcacaggttactaatcatagatcctgaccagcatttg

SEQ ID NO: 184212 - DNA, 2643 bp, Homo Sapiens
ttgggcttattaaagagaagtctgtgttcaaaaaatttaattggagatacttagtaatagatgaagctcacaggatcaaaaatgaaaaatctaagttgtcagaaatagtgagggaattcaagactacaaatagactattattaactggaacacctcttcaaacaacttgcatgagctgtggtcacttcttaactttctgttgccagatgtgtttaattcagcagatgactttgattcctggtttgatacaaacaactgccttggggatcaaaaactagttgagaggcttcatatggttttgcgtccattcctccttcgtcgaattaaggctgatgttgaaaagagtttgcctccaaagaaggaagtaaaaatctatgtgggcctcagcaaaatgcaaagggaatggtatactcggatattaatgaaggatatagatatactcaactcagcaggcaagatggacaaaatgaggttattgaacatcctaatgcagttgagaaaatgttgtaatcatccatatctctttgatggagcagaacctggtccaccttatacaacagatatgcatctagtaaccaacagtggcaaaatggtggttttagacaagctgctccctaagttaaaagaacaaggttcacgagtactaatcttcagtcaaatgacaagggtattggacattttggaagattattgcatgtggagaaattatgagtactgcaggttggatggtcagacaccccatgatgagagacaagactccatcaatgcatacaatgaaccaaacagcacaaagtttgttttcatgttaagcacgcgtgctggtggtcttggcatcaatcttgcgactgctgatgtagtaattttgtatgattctgattggaatccccaagtagatcttcaggctatggaccgagcacatagaattgggcagactaagacagtcagagtgttccgctttataactgataacactgtagaagaaagaatagtagaacgtgctgagatgaaactcagactggattcaatagtcattcaacaagggaggcttgtggatcagaatctgaacaaaattgggaaagatgaaatgcttcaaatgattagacatggagcaacacatgtgtttgcttcaaaggaaagtgagatcactgatgaagatatcgatggtattttggaaagaggtgcaaagaagactgcagagatgaatgaaaagctctccaagatgggcgaaagttcacttagaaactttacaatggatacagagtcaagtgtttataacttcgaaggagaagactatagagaaaaacaaaagattgcattcacagagtggattgaaccacctaaacgagaaagaaaagccaactatgccgttgatgcatatttcagggaagctcttcgtgttagtgaacctaaagcacccaaggctcctcgacctccaaaacaacccaatgttcaggatttccagttctttcctccacgtttatttgaattactggaaaaagaaattctgttttacagaaaaactattgggtacaaggtacctcgaaatcctgagctgcctaacgcagcacaggcacaaaaagaagaacagcttaaaattgatgaagctgaatcccttaatgatgaagagttagaggaaaaagagaagcttctaacacagggatttaccaattggaataagagagattttaaccagtttatcaaagctaatgagaagtggggtcgtgatgatattgaaaatatagcaagagaagtagaaggcaaaactccagaagaagtcattgaatattcagctgtgttttgggaaaggtgcaacgagctccaggacatagagaagattatggctcagattgaaaggggagaggcgagaattcaaagaagaataagcatcaagaaagcacttgacacaaagattggacggtacaaagcaccttttcatcagctgagaatatcatatggtactaacaaaggaaaaaactatactgaagaagaagatcgttttctgatttgtatgcttcacaaacttggatttgacaaagaaaatgtttatgatgaattgcgacagtgtattcgcaactctcctcagttcagatttgactggtttcttaagtccagaactgcaatggagctccagaggagatgtaataccttaattactttgattgaaagagaaaacatggaactagaagaaaaggagaaggcagagaaaaagaaacgaggaccaaagccttcaacacagaaacgtaaaatggatggcgcacctgatggtcgaggaagaaaaaagaagctgaaactatgaatatgtttttgtttcataatcactaactttaaaccagtagttctttaatttacgggtcttcataagatgtactgtacaatgctcaattgttatgtcatttaaagacatcaggttcatctgtttactgagctagaaacatagtatgtagtttcacttttttaaatgcaacagctgtgctgaaatttttttatcattaacacttgaagtaataaaataggcttcatttattactaagtgtttcatttgatttatttttctattgtagttccatttgtgaagattgtgactttttgtttattagctataatttctacacttgtaagcttaaaaacaagttaaaaagaaaa

SEQ ID NO: 184213 - DNA, 925 bp, Homo Sapiens
ttggcttggattctgtcggatggacttggggctagctgcggcggggctggaggaggccagataaccatgtcagccacagttgtagatgcagttaatgctgcacccctatcggggtccaaagaaatgagtttggaagaaccaaagaagatgaccagagaggactggagaaagaagaaggagctagaagaacagcgaaaattgggcaatgctcctgcagaagttgatgaagaaggaaaagacatcaacccccatattcctcagtatatttcttcagtgccatggtatattgatccttcaaaaagacctactttaaaacaccagagaccacaaccagaaaaacaaaagcagttcagctcatctggagaatggtacaagaggggtgtaaaagagaattccataattactaagtaccgcaaaggagcatgtgaaaattgtggggccatgacacacaaaaagaaagactgctttgagagacctaggcgagttggagccaaatttacaggtactaatatagctccagatgaacatgtccagcctcaactgatgtttgactatgatgggaagagggatcggtggaatggctacaatccagaagaacacatgaaaattgttgaagagtatgccaaagttgatttggcaaaacgaacattgaaagcccagaaactccaagaggaattagcctcaggaaaattagtggaacaggctaattctccaaaacaccagtggggagaagaggaaccaaattctcagacggaaaaagatcataatagtgaagatgaggatgaagataaatatgcagatgatattgacatgcctggacagaattttgactccaagagacgaattactgtccggaatctcagattcgagaagatattgcaaaatatttgaggaatttagatccaaattctgcctactatgatcc

SEQ ID NO: 184214 - DNA, 1629 bp, Homo Sapiens
  misc_feature (1372)..(1406): n is a, c, g, or t
ttggatttcctttaagcttcactcgttctcattctcttccagaaacgcctgccccacctctccaaaccgagagaaaaaacgaaatgcggataaaaacgcaccctagcagcagtcctttatacgacacccccgggaggcctgcggggtcggatgattcaagctcacggggacgagcaggagcgctctcgacttttctagagcctcagcgtcctaggactcacctttccctgatcctgcaccgtccctctcctggccccagactctccctcccactgttcacgaagcccaggtgggccgtcggccggggagcggagggggcgcgtggggtgcaggcggcgccaagggcgctgcacctgtgggcgcggggcgcgagggcccctcccggcgcgagcgggcgcagttccccggcggcgccgctaggggtctctctcgggtgccgagcggggtgggccggatcagctgactcgcctggctctgagccccgccgccgcgctcgggctccgtcagtttcctcggcagcggtaggcgagagcacgcggagcagcgtgcgcgggggccccgggagacggcggcggtggcggcgcgggcagagcaaggacgcggcggatcccactcgcacagcagcgcactcggtgccccgcgcagggtcgcgatgctgcccggtttggcactgctcctgctggcagactgaacatgcacatgaatgtccagaatgggaagtgggattcagatccatcagggaccaaaacctgcattgataccaaggaaggcatcctgcagtattgccaagaagtctaccctgaactgcagatcaccaatgtggtagaagccaaccaaccagtgaccatccagaactggtgcaagcggggccgcaagcagtgcaagacccatccccactttgtgattccctaccgctgcttagttggtgagtttgtaagtgatgcccttctcgttcctgacaagtgcaaattcttacaccaggagaggatggatgtttgcgaaactcatcttcactggcacaccgtcgccaaagagacatgcagtgagaagagtaccaacttgcatgactacggcatgttgctgccctgcggaattgacaagttccgaggggtagagtttgtgtgttgcccactggctgaagaaagtgacaatgtggattctgctgatgcggaggaggatgactcggatgtctggtggggcggagcagacacagactatgcagatgggagtgaagacaaagtagtagaagtagcagaggaggaagaagtggctgaggtggaagaagaagaagccgatgatgacgaggacgatgaggatggtgatgaggtagaggaagaggctgaggaaccctacgaagaagccacagagagannnnnnnnnnnnnnnnnnnnnnnnnnnnnnnnnnnagagtctgtggaagaggtggttcgagaggtgtgctctgaacaagccgagacggggccgtgccgagcaatgatctcccgctggtactttgatgtgactgaagggaagtgtgccccattcttttacggcggatgtggcggcaaccggaacaactttgacacagaagagtactgcatgggccgtgtgtggcagcgccattcctacaacagcagccagtacctctga

SEQ ID NO: 184215 - DNA, 1199 bp, Homo Sapiens
  misc_feature (947)..(981): n is a, c, g, or t
ttggggcagcggtaggcgagagcacgcggaggagcgtgcgcgggggccccgggagacggcggcggtggcggcgcgggcagagcaaggacgcggcggatcccactcgcacagcagcgcactcggtgccccgcgcagggtcgcgatgctgcccggtttggcactgctcctgctggccgcctggacggctcgggcgctggaggtacccactgatggtaatgctggcctgctggctgaaccccagattgccatgttctgtggcagactgaacatgcacatgaatgtccagaatgggaagtgggattcagatccatcagggaccaaaacctgcattgataccaaggaaggcatcctgcagtattgccaagaagtctaccctgaactgcagatcaccaatgtggtagaagccaaccaaccagtgaccatccagaactggtgcaagcggggccgcaagcagtgcaagacccatccccactttgtgattccctaccgctgcttagttggtgagtttgtaagtgatgcccttctcgttcctgacaagtgcaaattcttacaccaggagaggatggatgtttgcgaaactcatcttcactggcacaccgtcgccaaagagacatgcagtgagaagagtaccaacttgcatgactacggcatgttgctgccctgcggaattgacaagttccgaggggtagagtttgtgtgttgcccactggctgaagaaagtgacaatgtggattctgctgatgcggaggaggatgactcggatgtctggtggggcggagcagacacagactatgcagatgggagtgaagacaaagtagtagaagtagcagaggaggaagaagtggctgaggtggaagaagaagaagccgatgatgacgaggacgatgaggatggtgatgaggtagaggaagaggctgaggaaccctacgaagaagccacagagagannnnnnnnnnnnnnnnnnnnnnnnnnnnnnnnnnnagagtctgtggaagaatggttcgagaggtgtgctctgaacaagccgagacggggccgtgccgagcaatgatctcccgctggtactttgatgtgactgaagggaagtgtgccccattcttttacggcggatgtggcggcaaccggaacaactttgacacagaagagtactgcatggccgtgtgtagcagcgccattcctacaacagcagccagtacccc

SEQ ID NO: 184216 - DNA, 2412 bp, Homo Sapiens
  misc_feature (195)..(229): n is a, c, g, or t
ttggctcggatgtctggtggggcggagcagacacagactatgcagatgggagtgaagacaaagtagtagaagtagcagaggaggaagaagtggctgaggtggaagaagaagaagccgatgatgacgaggacgatgaggatggtgatgaggtagaggaagaggctgaggaaccctacgaagaagccacagagagannnnnnnnnnnnnnnnnnnnnnnnnnnnnnnnnnnagagtctgtggaagaggtggttcgagaggtgtgctctgaacaagccgagacggggccgtgccgagcaatgatctcccgctggtactttgatgtgactgaagggaagtgtgccccattcttttacggcggatgtggcggcaaccggaacaactttgacacagaagagtactgcatggccgtgtgtggcagcgccatgtcccaaagtttactcaagactacccaggaacctcttgcccgagatcctgttaaacttcctacaacagcagccagtacccctgatgccgttgacaagtatctcgagacacctggggatgagaatgaacatgcccatttccagaaagccaaagagaggcttgaggccaagcaccgagagagaatgtcccaggtcatgagagaatgggaagaggcagaacgtcaagcaaagaacttgcctaaagctgataagaaggcagttatccagcatttccaggagaaagtggaatctttggaacaggaagcagccaacgagagacagcagctggtggagacacacatggccagagtggaagccatgctcaatgaccgccgccgcctggccctggagaactacatcaccgctctgcaggctgttcctcctcggcctcgtcacgtgttcaatatgctaaagaagtatgtccgcgcagaacagaaggacagacagcacaccctaaagcatttcgagcatgtgcgcatggtggatcccaagaaagccgctcagatccggtcccaggttatgacacacctccgtgtgatttatgagcgcatgaatcagtctctctccctgctctacaacgtgcctgcagtggccgaggagattcaggatgaagttgatgagctgcttcagaaagagcaaaactattcagatgacgtcttggccaacatgattagtgaaccaaggatcagttacggaaacgatgctctcatgccatctttgaccgaaacgaaaaccaccgtggagctccttcccgtgaatggagagttcagcctggacgatctccagccgtggcattcttttggggctgactctgtgccagccaacacagaaaacgaagttgagcctgttgatgcccgccctgctgccgaccgaggactgaccactcgaccaggttctgggttgacaaatatcaagacggaggagatctctgaagtgaagatggatgcagaattccgacatgactcaggatatgaagttcatcatcaaaaattggtgttctttgcagaagatgtgggttcaaacaaaggtgcaatcattggactcatggtgggcggtgttgtcatagcgacagtgatcgtcatcaccttggtgatgctgaagaagaaacagtacacatccattcatcatggtgtggtggaggttgacgccgctgtcaccccagaggagcgccacctgtccaagatgcagcagaacggctacgaaaatccaacctacaagttctttgagcagatgcagaactagacccccgccacagcagcctctgaagttggacagcaaaaccattgcttcactacccatcggtgtccatttatagaataatgtgggaagaaacaaacccgttttatgatttactcattatcgccttttgacagctgtgctgtaacacaagtagatgcctgaacttgaattaatccacacatcagtaatgtattctatctctctttacattttggtctctatactacattattaatgggttttgtgtactgtaaagaatttagctgtatcaaactagtgcatgaatagattctctcctgattatttatcacatagccccttagccagttgtatattattcttgtggtttgtgacccaattaagtcctactttacatatgctttaagaatcgatgggggatgcttcatgtgaacgtgggagttcagctgcttctcttgcctaagtattcctttcctgatcactatgcattttaaagttaaacatttttaagtatttcagatgctttagagagattttttttccatgactgcattttactgtacagattgctgcttctgctatatttgtgatataagaattaagaaggatacacacgtttgtttcttcgtgcctgttttatgtgcacacattaggcattgagaacttcaagcttttcttttttgtccacttatctttgggtctttgataaagaaaagatccctgtttcattgta

SEQ ID NO: 184217 - DNA, 1883 bp, Homo Sapiens
  misc_feature (1749)..(1779): n is a, c, g, or t
ttggggtcgctcgggtcggcttcggtcgctaccgctcccgctctgccacccccgccaaccgccgctcgggcctccgtcgctgccgcgtcgctttctcgctccttggatcgcacatcctcccagatgcagcgccgggacgaccccgccgcgcgcatgagccggtcttcgggccgtagcggctccatggacccctccggtgcccacccctcggtgcgtcagacgccgtctcggcagccgccgctgcctcaccggtcccggggaggcggagggggatcccgcgggggcgcccgggcctcgcccgccacgcagccgccaccgctgctgccgccctcggccacgggtcccgacgcgacagtgggcgggccagcgccgaccccgctgctgcccccctcggccacagcctcggtcaagatggagccagagaacaagtacctgcccgaactcatggccgagaaggactcgctcgacccgtccttcactcacgccatgcagctgctgacggcagaaattgagaagattcagaaaggagactcaaaaaaggatgatgaggagaattacttggatttattttctcataagaacatgaaactgaaagagcgagtgctgatacctgtcaagcagtatcccaagttcaattttgtggggaagattcttggaccacaagggaatacaatcaaaagactgcaggaagagactggtgcaaagatctctgtattgggaaagggctcaatgagagacaaagccaaggaggaagagctgcgcaaaggtggagaccccaaatatgcccacttgaatatggatctgcatgtcttcattgaagtctttggacccccatgtgaggcttatgctcttatggcccatgccatggaggaagtcaagaaatttctagtaccggatatgatggatgatatctgtcaggagcaatttctagagctgtcctacttgaatggagtacctgaaccctctcgtggacgtggggtgccagtgagaggccggggagctgcacctcctccaccacctgttcccaggggccgtggtgttggaccacctcggggggctttggtacgtggtacaccagtaaggggagccatcaccagaggtgccactgtgactcgaggcgtgccacccccacctactgtgaggggtgctccagcaccaagagcacggacagcgggcatccagaggatacctttgcctccacctcctgcaccagaaacatatgaagaatatggatatgatgatacatacgcagaacaaagttacgaaggctacgaaggctattacagccagagtcaaggggactcagaatattatgactatggacatggggaggttcaagattcttatgaagcttatggccaggacgactggaatgggaccaggccgtcgctgaaggcccctcctgctaggccagtgaagggagcatacagagagcacccatatggacgttattaaaaacaaacatgaggggaaaatatcagttatgagcaaagttgttactgatttcttgtatctcccaggattcctgttgctttacccacaacagacaagtaattgtctaagtgtttttcttcgtggtccccttcttctccccaccttattccattcttaactctgcattctggcttctgtatgtagtattttaaaatgagttaaaatagatttaggaatattgaattaattttttaagtgtgtagatgcttttttctttgttgtttaaatataaacagaagtgtaccttttataatnnnnnnnnnnnnnnnnnnnnnnnnnnnnnnncacacaaacctgttagtttcaaaaatgacattgcttgcttaaaggttctgaagtaaaggcttgttaagtttctcttagttttgatttgaggcatcccgtaaagt

SEQ ID NO: 184218 - DNA, 1464 bp, Homo Sapiens
  misc_feature (258)..(268): n is a, c, g, or t
  misc_feature (604)..(633): n is a, c, g, or t
gcagaatctcaaatggacaaaatactttgtctttttaaatactgaaaatttaatttattagtactatgactgaaagattcttcatggctaaaaagctctgcatcaaactcaattcaggagggccttccctccccaccaccatcaacctcttcaaaacatactccctccctctaagtatctctcaacacagtatgtctggggctagatttcaaaacccacgtaatgaaaaagtcagttttacaagcctaattttgttgnnnnnnnnnnnatatcaattaacgttaaaaattgcatcaactatttaattcatgaggatctttcatattaaaatttaaccttaagattcaaccgccatgtgcttttataaaggaaacattttttagagacgtctgagctcacttttacatggtggtgcctactgccgttaatgtttgtgattttaaatcttaaacagccctgaattttgaaatgtagcctagtttgggattctgcaactacaactttacgggatgcctcaaatcaaaactaagagaaacttaacaagcctttacttcagaacctttaagcaagcaatgtcatttttgaaactaacaggtttgtgtgnnnnnnnnnnnnnnnnnnnnnnnnnnnnnnattataaaaggtacacttctgtttatatttaaacaacaaagaaaaaagcatctacacacttaaaaaattaattcaatattcctaaatctattttaactcattttaaaatactacatacagaagccagaatgcagagttaagaatggaataaggtggggagaagaaggggaccacgaagaaaaacacttagacaattacttgtctgttgtgggtaaagcaacaggaatcctgggagatacaagaaatcagtaacaactttgccataactgatattttcccctcatgtttgtttttaataacgtccatatgggtgctctctgtatgctcccttcactggcctagcaggaggggccttcagcgacggcctggtcccattccagtcgtcctggccataagcttcataagaatcttgaacctccccatgtccatagtcataatattctgagtccccttgactctggctgtaatagccttcgtagccttcgtaactttgttctgcgtatgtatcatcatatccatattcttcatatgtttctggtgcaggaggtggcacgcctcgagtcacagtggcacctctggtgatggctccccttactggtgtaccacgtaccaaagccccccgaggtggtccaacaccacggcccctgggaacaggtggtggaggaggtgcagctccccggcctctcactggcaccccacgtccacgagagggttcaggtactccattcaagtaggacagctctagaaattgctcctgacagatatcatccatcatatccggtactagaaatttcttgacttcctccatggcatgggccataagagcaccaa

SEQ ID NO: 184219 - DNA, 2824 bp, Homo Sapiens
  misc_feature (391)..(405): n is a, c, g, or t
  misc_feature (945)..(958): n is a, c, g, or t
ctttgtacaaaaaagttggctttgtaatgcacaatgatatggaacctagcaaagctgttccactgaatgcatctaagcaagatggacctatgccaaaaccacacagtgtttcacttaatgataccgaaacaaggaaactaatggaagagtgtaaaagacttcagggagaaatgatgaagctatcagaagaaaatcggcacctgagagatgaaggtttaaggctcagaaaggtagcacattcggataaacctggatcaacctcaactgcatccttcagagataatgtcaccagtcctcttccttcacttcttgttgtaattgcagccattttcattggattctttctagggaaattcatcttgtagagtgaagcatgcagagtgctgtttcnnnnnnnnnnnnnnnctcttgaccagaaaaagatttgtttacctaccatttcattggtagtatggcccacggtgaccatttttttgtgtgtacagcgtcatataggctttgcctttaatgatctcttacggttagaaaacacaataaaaacaaactgttcggctactggacaggttgtatattaccagatcatcactagcagatgtcagttgcacattgagtcctttatgaaattcataaataaagaattgttctttctttgtggttttaataagagttcaagaattgttcagagtcttgtaaatgttattttaataatccctttaaattttatctgttgctgttacctcttgaaatatgatttatttagattgctaatcccactcattcaggaaatgccaagaggtattccttggggaaatggtgcctcttacagtgtaaatttttcctcctttacctttgctaatatcatggcagaatttttcttatcccttgtgaggcagttgttgactgagtttttcatccttacaatcctgtcccatggtatttaacatnnnnnnnnnnnnnnctgttaacagattcttgctcgatagcttgtttgtgtctgtcgtgttattagagggaactccactatatatggtcacttgaaattatgatgcaaaggtttctcttgcattgaaaccctcttggatattacagtatttttaattgaaagtcctaattctgttaaggaaaggagttgattaaattttaaggtaccactggtattttgggagattataatcagtttgttttcaagataatagaaaataaggtccatgagaatagaagttatgtgatttcagtgagttgatgtgtacagcatggctgtgctccatctgatttaccccattcttaagttctgagagtatgttctcaaggaagatttaactctctttggttttaaattactttttaaccagcctaataaataagtcttactacttttcataatatttcataatagttaaaagtaggtgtttttttcgtgctcaatttggcactcaaaataatgttcattatggaagtttggtaatactgagcaagcctgtggaattttctttatgaaaaatgattttagcctttgcaaatgttaaccatgtgaaacacattttcagtataagtatgcgttacagggtttgatactttcctgcacttaggtttgtcctattcttcatttattcatactaggatagaaaattttggaatcagaaaatagatccagtgtttagctacatacaatctagtacaagtgaatttttattcttaaacataggtgtgttggctctttttttaaaagatgcgctctacctgaaaaggaaattggattttagaactggatgtggtgcagtgaagtattttaggcccaggtctgtgtacacattttatagaagaatgaagtactctgaagtattttggttgccttttcatttcaactgtgttttgaatttgtcagatcacacatatattgtgttattgggcgctgtggtatcttttataaaacctcttgcttgtgtgcaaaagttcctaaaaggaaacacaagtaatgcctatccattactagcatgctatgctgcatgctttactgccattgctgtatgctttactgtctttgtaaaaatccccctctccccttttctggtaactggaaaagcatgctaaaaatagtcttatattttcaccccataagtgcagaatcagtaattccttggcttaaagctcttatataatcaatattattggtggtaaataccaagtttggtatctcatagctatctttttttaaagaaattaagttcttgaaaatttagccaaatcccgttttatgggaatgctctttagaattcattttgttcagcccctttgttctatggttgagaaatctgaggccttacgaaggttaagagaactttccccgtgtctcacaggtaggtagaggcagagctggaactagatatctggtctgttgactctagctcagtgtcttctggtaactgttgaaaattgtcttagtttgagagatggctgaaataatgaacataaaatgctatttataataacaagtatatgtgaaatttcttattgtaagactactaccggcttactgttgaatagtttggttatagtgtttaggctagaaatgcctcccacattggtaataaacattacaaaatacaatgtatttttaggtaggcattttataaaatgcattatgccatggttgcttttgagatagattgtagtctgggtagcatctttaaaatgtatgtgggcttaactgttgttcatatcagagatgctctgattgtataggtgagactctgtttctgttatttttaattgctgtatgaaatgtgatcagattattttactaccaacagttatagtttgaaag

SEQ ID NO: 184220 - DNA, 2652 bp, Homo Sapiens
  misc_feature (2449)..(2461): n is a, c, g, or t
ttggcttgctgggggtcagcgtcattcgagccttcgaggagcaggagcgcttcatccaccagagtgacctgaaggtggacgagaaccagaaggcctattaccccagcatcgtggccaacaggtggctggccgtgcggctggagtgtgtgggcaactgcatcgttctgtttgctgccctgtttgcggtgatctccaggcacagcctcagtgctggcttggtgggcctctcagtgtcttactcattgcaggtcaccacgtacttgaactggctggttcggatgtcatctgaaatggaaaccaacatcgtggccgtggagaggctcaaggagtattcagagactgagaaggaggcgccctggcaaatccaggagacagctccgcccagcagctggccccaggtgggccgagtggaattccggaactactgcctgcgctaccgagaggacctggacttcgttctcaggcacatcaatgtcacgatcaatgggggagaaaaggtcggcatcgtggggcggacgggagctgggaagtcgtccctgaccctgggcttatttcggatcaacgagtctgccgaaggagagatcatcatcgatggcatcaacatcgccaagatcggcctgcacgacctccgcttcaagatcaccatcatcccccaggaccctgttttgttttcgggttccctccgaatgaacctggacccattcagccagtactcggatgaagaagtctggacgtccctggagctggcccacctgaaggacttcgtgtcagcccttcctgacaagctagaccatgaatgtgcagaaggcggggagaacctcagtgtcgggcagcgccagcttgtgtgcctagcccgggccctgctgaggaagacgaagatccttgtgttggatgaggccacggcagccgtggacctggaaacggacgacctcatccagtccaccatccggacacagttcgaggactgcaccgtcctcaccatcgcccaccggctcaacaccatcatggactacacaagggtgatcgtcttggacaaaggagaaatccaggagtacggcgccccatcggacctcctgcagcagagaggtcttttctacagcatggccaaagacgccggcttggtgtgagccccagagctggcatatctggtcagaactgcagggcctatatgccagcgcccagggaggagtcagtacccctggtaaaccaagcctcccacactgaaaccaaaacataaaaaccaaacccagacaaccaaaacatattcaaagcagcagccaccgccatccggtcccctgcctggaactggctgtgaagacccaggagagacagagatgcgaaccacccaaaacacgcacaccctgcccctggtgccctgagacagacacacagcctcacgcccccaggaatgcaagtggtttcctggtgcttcccacggaggagttttggcagccagacttctggaggaattggttgtatagaagatcctagtgaccaaattcagcctactgcctcggatctctccagccgaagtctgtggactgcaagtctttgagatgcttctggctcccatcacctctaacatccttgtctgggtctaccaggaacgcttcatttccttggggctgcagttttgtggttgaggggcctggagaaaatcattttctccccttggcagtgtcccagggccctggatggtcctcttaccaacatctggtcttccaggcactcaaaagctgggaaccagcatctcagcgccagctctaccagttctcgttttgggccagaggcagcctctgcactcccacgcctgtcctcctggaagggacctggttggactaacggctaacctggacctggaactgtagggccaggggattgtctcagggccgacgttccacctggggcttccctccccacccaccccgactccaggctttcccttttttcttttgttcaacattgtaagaacaatcaatgctgttattactgttcccaccatgattgatgtggggtaaatattaaggagatggcctcatgggaatttgaccttgactagaaatagagactgagagtgagcaaccagctggaaggtactatgccagtcctagcagaaaaatgtgttaggggcctggcccaaagcagtgttggttgcttacagtgttgattgattttgttcttttttcttaccacctcttttctttccctctcatggtacctgctcatggttatgaagctttcaaagtaaagaacacgaaatacctcccaagtattaccagtgggtaccaaaaaaatgtccccttgagtcttttccttgtttttagatgttaattctctcccttggcatccggttagccccccagggggggcagcattgtggagaacttgatatttagttactgatgctcttccaggacacgaaaagaacccatctttgaatatcaatgannnnnnnnnnnnnaagtactgttccggggagaaaaacagtctcaaaacttgaacttcttgggaagagaagtgttgggctgagaagtaacattcccagggaaatagtgagaagctcgccctgtgtttgaaaccgtgttggtctctgtgttcctggaagaaaacagggaagcagcatcttttaaagcctgttctttaatgtgtctc

SEQ ID NO: 184221 - DNA, 1630 bp, Homo Sapiens
  misc_feature (961)..(990): n is a, c, g, or t
ttggcgtacccatcattactcccactcagaaagaagaagtaaatgaatgtggtgaaagtattgacagaaataatctgaaacggtcacaaagccatcttccttactttactcctaaaccacctcaagatagtgcggttatcaaagctggatattgtgtaaaacaaggagcagtgatgaaaaactggaagagaagatattttcaattggatgaaaacacaataggctacttcaaatctgaactggaaaaggaacctcttcgcgtaataccacttaaagaggttcataaagtccaggaatgtaagcaaagcgacataatgatgagggacaacctctttgaaattgtaacaacgtctcgaactttctatgtgcaggctgatagccctgaagagatgcacagttggattaaagcagtctctggcgccattgtagcacagcggggtcccggcagatctgcgtcttctgagcatccccccggtccttcagaatccaaacacgctttccgtcctaccaacgcagccgccgccacctcacattccacagcctctcgcagcaactctttggtctcaacctttaccatggagaagcgaggattttacgagtctcttgccaaggtcaagccagggaacttcaaggtccagactgtctctccaagagaaccagcttccaaagtgactgaacaagctctgttaagacctcaaagtaaaaatggccctcacgaaaaagattgtgacctagtagacttggacgatgcgagccttccggtcagtgacgtgtgaggcagaagcgcacggagcctgcctgcctctgccgtcctcagtttcctttcatgaggcttctagccaaagatgataaagggggaaatggtttttagtgcgtatattatactgcctcttaggtgtactctttataagctggtaaaccaagaatctagggagtggccaaactaaatataatttctttnnnnnnnnnnnnnnnnnnnnnnnnnnnnnntatctcagtatcatctgtctgaagcattgtgtgttctcattcgggtggtaacaatgtatgtgtaatatttttttcttagtgattttgacagtttaaatgtttaacaacttaaagcattaaaaatgcttattaataactttggtcatttaaaaaatgctacaatgacttcctattaaaggttcaatatttacacattcttattggttgatattaccacatgaaatattgccagaccaagatacctaaactcatgatgtctgtggtgctgtaaaatttatactaaaatgtggactattttgaaattataaccatttttgatgccctgaatcttgaggtgacttattttgcatagaggatatggatagaccaacagtaagggttgtgggttataccggcatagagaaaagaagaaaactagaattgaaacaactgtgtcttagacatttgtttgaaaaagcttcatcacgccttggagcagtcactgctttattccgcaaaaattatttggtaggaaatttttgggagatctgattttcttatccaagttttgtaaatagttgttatttctatatttggattggtgaagacctcaagtttatatgtaaagacataactgcccttagtcatgaaattgttgtga

SEQ ID NO: 184222 - DNA, 1542 bp, Homo Sapiens
  misc_feature (1078)..(1151): n is a, c, g, or t
ttgggtcctcccatactggacccctacaggaagctccgtgtgcccagctggggcacagccccagctgatgccccagaggggccacccatcgcaagaggggctttgggctctgccctccctccccatggcgcatgggccaaagcctgagactgaaggactgttggacctcagcttcctgacagaggaggagcaggaggccattgctggcgtcctccaacgagatgcccgcctgcgccagctggaggaggggcgggtcagcaagctccgggcctcagtggcagaccctgggcagctgaagatcctgacaggggactggttccaggaagcacgctcccagcggcaccacaatgcccacttcggctctgaccttgtccgagcgtctatgcgcaggaagaagagcaccaggggagaccaggctccaggccacgacagggaggctgaggctgctgtgaaagagaaggaagaggggccagagcccaggctcaccattgatgaggcccctcaggagaggctcagggagactgagggacctgatttcccatcgccttctgtccccctaaaggcttcagatcctgaggaggcgtcccaggcccaggaagatcctggccaaggagaccaacaggtctgtgccgaggaggctgacccggagctggagcccgcgtcggggggagagcaggagccgcggccccagcaagcccagaccaaaccgcgtcccagatcctggagaatggggaggaggccccggggcccgacccctctctcgaccgcatgctcagcagcagctcctcggtgtccagccttaactcctccacgctgagcggcagccagatgagcctgtcaggcgacgcggaggcggtgcaggtccgcggctccgtgcacttcgcgctgcactacgagccgggcgccgccgagctgcgcgtgcacgtgatccagtgccagggcctggccgccgcccggcgccgccgctcggacccgtgagtgccccgccggccaagcggggcgcggctgtcacagcccagcccaccattcacagggtctcggcctcctcgtcctcatcttcaaaatgggaacaacagcnnnnnnnnnnnnnnnnnnnnnnnnnnnnnnnnnnnnnnnnnnnnnnnnnnnnnnnnnnnnnnnnnnnnnnnnnntacctcctcccggataagcagagcaagcgcaaaacggcggtgaagaaacggaatctgaatccggttttcaacgagactctccggtactctgtcccgcaggccgagcttcagggccgcgtgctgagcctgtctgtgtggcaccgcgaaagcctgggtcgcaacatctttctgggcgaagttgaagtgcccctggacacgtgggactggggctctgagcccacctggctccccctgcagccccgggtcccaccctctcccgacgacccttccgagccgcgggttactcgccctgtccctcaagtacgtccccgctcggctccgagggcgcatgactgcccccgagcggggagctgcacttctgggtgaaggaggctcgggactccctgccgct

SEQ ID NO: 184223 - DNA, 896 bp, Homo Sapiens
  misc_feature (187)..(209): n is a, c, g, or t
ttgggccaaacttcgggcggcggctgaggcggcggccgaggagcggcggactcggggcgcggggagtcgaggcatttgcgctgggcttcggagcgtagcgccagggcctgagcctttgaagcaggaggaggggaggagagagtggggctcctctatcgggaccccctccccatgtggatctgcccannnnnnnnnnnnnnnnnnnnnnnaggaggcgaccgagaagatacccgccctgcgccccgctctgctgtgggcgctgctggcgctctggctgtgctgcgcgacccccgcgcatgcattgcagtgtcgagatggctatgaaccctgtgtaaatgaaggaatgtgtgttacctaccacaatggcacaggatactgcaaatgtccagaaggcttcttgggggaatattgtcaacatcgagacccctgtgagaagaaccgctgccagaatggtgggacttgtgtggcccaggccatgctggggaaagccacgtgccgatgtgcctcagggtttacaggagaggactgccagtactcgacatctcatccatgctttgtgtctcgaccttgcctgaatggcggcacatgccatatgctcagccgggatacctatgagtgcacctgtcaagtcgggtttacaggtaaggagtgccaatggaccgatgcctgcctgtctcatccctttgcaaatggaagtacctgtaccactgtggccaaccagttctcctgcaaatgcctcacaggcttcacagggcagaaatgtgagactgatgtcaatgagtgtgacattccaaaacactgccaacatggtggcatctgcctcaaccagcctggttcctaccaatgccattgcctacagggcttcacaggccattaccgtgacagcctgtatgtgc

SEQ ID NO: 184224 - DNA, 488 bp, Homo Sapiens
  misc_feature (370)..(395): n is a, c, g, or t
ttggcacaagtaggaactaagccagtgcaccagaccggcaaaaagaagcgggagccgccgcggcagcgcggccgtggggtccgccgccgccgcatcggagcgggaggaggagcagcggggagggcgaggccgccgggccgagagccgtcccgcctgctctcggtcttctgccttcgcctccgcgcggtgcgtcggacccagggtctgtcacctgggcgccaggggccgccgccggggagccggagcgggcaggaccctccctccgccgactgcggcccgagagcgcccccgcggggtggagcggcagccgccttctgcgggcggctgagtgtccgtctcgcgcccggagcgggcgaccgccgttttcccnnnnnnnnnnnnnnnnnnnnnnnnnngggcggccctggggctgctgtcccatggctcgccgctgagctgggaggaaaccaagcgccatgccgaccacgtgcggcggcacgggatcctcc

SEQ ID NO: 184225 - DNA, 1367 bp, Homo Sapiens
ttgtacaaaaaagttgggttgccattccatatataacattgtctcattatctctggttgctttatcaaacccataggtcactgaagcccacttttgagacaaagactatttctcccccaaaagtcaagggaaatataaaaaatgaaattagtgattaagaatagaagtcaattaatacaatcattttgtcttaattatttaaagtccagtttttttcctgcagcaaacctgaaaatacactatcctccagctatcagaattatattgagatctactcacatttatgatgatgttcagagattctcattgggaaggaaaaggcacacgctgcggcggtcttgcatgactctgttgttgtggaaattcaatttgttcattgtgttttgggctccctgggtggtcagggctgggctctgggtccttggcaattcctcaggttcccagcactccaaagccaagctcacctcctcatcacacgccctgcaggagaagcattagggtgtccgactacgtgggtttcatagctgtggaaaagccaaaggggagactcctgaagaaaggcggtgaagactgtgaagagcgggtcaggaagatgagcacagcactgctactcctgtgggcacagggacagcatgtctccagccagcgccaccttgtttaatacatgggaactcactgaaattcattctgtattttgcccgcaaagttttaaagctttcatccacagtcaggaattaaacttataccaatgagagcctcacacattcaaggatgtactaagcactacaggcctcacagaaacagagatcccatcttggagttttcagtaccacatgggagataaagggttttgaacatgaaatgacaaaaacaacagcaagaagaaaattcttgtcctttttcattactatcagactcaaataaatgtcttggctcttacattacattcattcttcaaccattgtggtctggcttccacttccttcacttcaccaacatggctctgccaaaggaagcccgtgatctctaggccatcactttaattgatctttctacaacatttatcctggttgttaagccctccttacaacattcttctctctttgtttttatagctccatctctcctgcttctttaacttgataatgcatacttgatttttctatttgttatttcataaaccaattaatacacagataaaatgactgtatatcaaaccatgtttgtatagaaaaaatggattttggatgcctctcatatgtaattagttctattaaacatattaattgtattgttttaatttgtcaggtttttgacagaattttgtatacaagtaataaaaattttatctccaattttcactaatt

SEQ ID NO: 184226 - DNA, 2536 bp, Homo Sapiens
ttggctccccctcccaccattccaccagcccgggatgtatgcaaaggggccaaggcagatattgtgttcttgactgatgcctcctggagcattggggacgataattttaacaaagttgtaaaattcatcttcaatactgtgggaggctttgatgaaatcagtcctgctgggattcaggtttcatttgtgcaatacagcgatgaggtcaagtctgagttcaagctgaacacgtacaatgacaaggccctagcccttggggccctccagaatattaggtacagaggaggaaacacaagaacaggcaaggccctcacgtttatcaaggagaaagtcttgacttgggagagcggcatgaggaagaatgtccctaaggtgttggttgtggtcacggacggtcggtcccaggatgaggtcaagaaggcggctttggtcatccagcagtcagggttcagtgtctttgtagttggtgtggctgatgtcgactacaatgagcttgccaacattgccagcaaaccaagtgaacggcacgtgttcattgtggacgactttgaatcttttgagaagatcgaagacaatcttattacatttgtttgtgaaactgccacttcaagttgtcctctcatttatttggatggctacacctcaccaggttttaaaatgcttgaagcatacaacctgacagaaaagaattttgcttctgtacaaggagtatctttggagtcagggtctttccccagctactcagcatacaggattcagaagaatgcgtttgtgaatcagcctacagcagacctacacccaaatggactccctccttcatacacgattatattattattcagacttctcccagaaactcccagtgacccttttgcaatttggcaaatcacagacagagactacaaaccacaagttggagtgattgcagatccttctagcaagacgttatcattctttaacaaggatacaagaggcgaggtgcaaactgttacatttgacacagaagaagtaaagacattattttatggaagttttcacaaggttcatattgtagtgacctcaaaaagtgttaagatttacattgactgctatgaaattatagaaaaagacatcaaggaagctggaaatataacaactgatggttatgaaattcttggaaaactccttaaaggggaaaggaaatcagccgcattccaaatccagagttttgacattgtctgcagtccagtgtggaccagtagagacagatgctgtgatattccctctaggagagatgagggaaaatgccctgcttttccaaattcttgcacatgtacacaggacagcgttggacctccaggacctccaggccctgcaggaggacctggtgctaaaggtcccagaggtgaaagaggtatcagtggggcaattgggccccctggtcctcgtggagacataggtcctccaggcccccagggtcctccaggccctcagggacccaatggactctctattccgggagagcaaggtcgccaagggatgaaaggtgatgctggagagccaggacttccaggccgaacaggaaccccaggattacctggcccaccaggaccaatgggacctccaggagacagaggcttcactggaaaagacggtgcaatgggacccaggggcccaccagggccgccgggaagcccaggctccccaggagtcacaggaccaagtgggaagccaggaaaacctggagatcatggcagaccaggtccatctgggttgaaaggagaaaaaggtgataggggagacattgcttcccagaacatgatgcgagcagttgcaagacaagtctgtgaacaattgataagtggtcagatgaacagattcaatcagatgctgaatcagattccaaatgattaccagtccagtcgcaaccagccaggcccgccgggtccaccgggacctcctggtagcgcaggagccagaggagaacctgggcctggggggcggccaggcttcccgggcacaccagggatgcagggaccccctggggaacgaggtttgccaggagagaaaggtgaaaggggtactggatcttcaggacctcgggggctgcctggccccccaggtccacaaggagaatccagaacaggtccaccagggtccacaggttcaagaggtccccctggcccccctggccgtcctggaaactcaggtatccgaggacccccaggtcctcctggatactgtgattcttctcagtgtgccagcatcccatacaacgggcaaagctatccaggttccggctaacacattttctaagtcgccagtgctgcttacagtttgaatacatgaaaatcctgtttctgagatgtttgcgcacgtgcttattggaaatgagtctgtatggaaatctcaccacagataatggttaacgaaccgggtcgacatcacaaagaaggtggagactctttttactaaacttgaatagaaacaaaagcagtggtgtcagttttaatcctgatgcactttcagtaataatgtaaaaacattattttaaaaa

SEQ ID NO: 184227 - DNA, 1021 bp, Homo Sapiens
  misc_feature (800)..(810): n is a, c, g, or t
  misc_feature (942)..(963): n is a, c, g, or t
ttgtacaaaaaagttgggtcagtttataatcctgatgcatttcagtaataatgtagaaaaacattattttaaaaaagttccaacacacagccatgaggagcctcagttttgaaagaggtgcataataaaactactaaccagaggagtctatgccattttaagaaaaacaattaacctggttaaagagaaatgtcttatgtaaataataaactaattgtggcttgtaaatgatttgtatgtgatcctgtcgactaaaatcacttaacaattctacaataagcttctgcatcaaagcctgccgcttgctctatgccggaataacaccaaatggaatctcctcatctcttgcttgttagcgatgtgtctgattcagggcatctgtctttttgttacttttttgtccgtgtcctctcatttgggttttgtaactgcaattttcaaaccaaagtttaaaatcaccttttcttcctgttttgctgtagtcactggtgttcctcacccaccagctgtaactcagtttgtgtgaggtacagccacagaagatgtcatgtactgtatattacctggtgatagttgcttttcaccccccgagttcagtttctaggagccaatgaaacttcccctcacctcctcatctttccaagttgttctttgaattgaggagtttgaaggcataaacagttacttggggatttgcgaaaatcctacttagttactgcgtttacagttctttggcccagtctctgacccttcccaagtatttgtgcaatgattgtgtttactgctggatttttgaaggnnnnnnnnnnnaagaaagtgccatttcattatttgattatcaccaaattatctggaaataattgggacattgtaacttatctatttatagttatgagattaagactggagtgccatcaccgcgggtgatgatttacttttgcnnnnnnnnnnnnnnnnnnnnnnccttccaaatcatgcccataattgtaatgttgaatcggacagagccttacgtgcccga

SEQ ID NO: 184228 - DNA, 1141 bp, Homo Sapiens
  misc_feature (44)..(61): n is a, c, g, or t
ttggctggagtgccatcaccgcgggtgatgatttagcttttgcnnnnnnnnnnnnnnnnnnccttccaaatcatgccataattgtaatgttgaatcggacagagccttacgtgcccgagggcggggcctacctgcctgagcgcgagcccttcatcgtgccggtggagcccgagcggacagcggaatacgaggactacggcgcagacgagcctgcagaggagcctcctgagccccaccggcgctggcggcgcgccctgccccacggacccgggcagtgaaccagagatcacgcgccgcgccgcgaggcttgggggaggtgttgaaattctcatttacaggtcagatagagcagtgtacgtcttttctgaggtgtttcttccagcgttgctcatccaggagtaccctttctgattgtagagaaccttgtttctgcaggaagcctagctccaagcacgcagtctgtagacatttttgcctttgcccttgaaatgcttgcaaaatactttgttaacaaaagctgcaaagagagaacatgccgtgtgcctttagttagcacagcgggcagcctcagtgaaactcttaggttaagcagttaagtcctggaacccagagctgctgtgtatttcgagcgggcagtttatcttttgctatacttattttcaattcaattacaccacgattcaaataattcccctcctaaaaccaaaaaggagggaaacgtcaactccattgcaattacttatcttcctcttctatctctgttatacgccggggcatagaatgctcgtatacatctctttaacaaccacaaaccttaagccatgtagatgaagttagtgcatcaacgggatacagttccatattgccttaaacctccttgttttagacacactaacatttataccaaattgcagattattctgcagagagggaattgcatgtttgtgttgtatatttagtatgaacttttttcagaatataatatttcttagttatcaaaagtagttggaaaacatttgcaagactatgaacatagaattgctgcttttatattttaactgcagattgtgaatttcactgccttatattatttatttctgaaacaaaagaggcatttttcaataaaactactgaaaatttg

SEQ ID NO: 184229 - DNA, 909 bp, Homo Sapiens
  misc_feature (298)..(308): n is a, c, g, or t
  misc_feature (441)..(462): n is a, c, g, or t
ttggctgtaactcagtttgtgtgaggtacagccacagaagatgtcatgtactgtatattacctggtgatagttgcttttcaccccccgagttcagtttctaggagccaatgaaacttcccctcacctcctcatctttccaagttgttctttgaattgaggagtttgaaggcataaacagttacttggggatttgcgaaaatcctacttagttactgcgtttacagttctttggcccagtctctgacccttcccaagtatttgtgcaatgattgtgtttactgctggatttttgaaggnnnnnnnnnnnaagaaagtgccatttcattatttgattatcaccaaattatctggaaataattgggacattgtaacttatctatttatagttatgagattaagactggagtgccatcaccgcgggtgatgatttagcttttgcnnnnnnnnnnnnnnnnnnnnnnccttccaaatcatgccataattgtaatgttgaatcggacagagccttacgtgcccgagggcggggcctacctgcctgagcgcgagcccttcatcgtgccggtggagcccgagcggacagcggaatacgaggactacggcgcagacgagcctgcagaggagcctcctgagccccaccggcgctggcggcgcgccctgccccacggacccgggcagtgaaccagagatcacgcgccgcgccgcgaggcttgggagaggtgttgaaattctcatttacaggtcagatagagcagtgtacgtcttttctgatgtgtttcttccagcgttgctcatccaggagtacccttttctgattgtagagaactttgtttctgcaggaagcctagctccaagcacgcagtctgtagacatttttagcctttgcccttgaaatgcttgcaaaatacttt

SEQ ID NO: 184230 - DNA, 1333 bp, Homo Sapiens
  misc_feature (1055)..(1065): n is a, c, g, or t
  misc_feature (1198)..(1219): n is a, c, g, or t
ttggatttatattttttacttagtcattcaacttttaaaaactatcatctttgacctgtttcaggttccggctaacacattttctaagtcgccagtgctgcttacagtttgaatacatgaaaatcctgtttctgagatgtttgcgcacgtgcttattaggaaatgagtctgtatggaaatctcaccacagataatggttaacgaaccgggtcgacatcacaaaggagggtggagactctttttactaacttgaatgagacaaaagcagtggtgtcagtttataatcctgatgcatttcagtaataatgtagaaaaacattattttaaaaaagttccaacacacagccatgaggagcctcagttttgaaagaggtgcataataaaactactaaccagaggagtctatgccattttaagaaaaacaattaacctggttaaagagaaatgtcttatgtaaataataaactaattgtggcttgtaaatgatttgtatgtgatcctgtcgactaaaatcacttaacaattctacaataagcttctgcatcaaagcctgccgcttgctctatgccggaataacaccaaatggaatctcctcatctcttgcttgttagcgatgtgtctgattcagggcatctgtctttttgttacttttttgtccgtgtcctctcatttgggttttgtaactgcaattttcaaaccaaagtttaaaatcaccttttcttcctgttttgctgtagtcactggtgttcctcacccaccagctgtaactcagtttgtgtgaggtacagccacagaagatgtcatgtactgtatattacctggtgatagttgcttttcaccccccgagttcagtttctaggagccaatgaaacttcccctcacctcctcatctttccaagttgttctttgaattgaggagtttgaaggcataaacagttacttggggatttgcgaaaatcctacttagttactgcgtttacagttctttggcccagtctctgacccttcccaagtatttgtgcaatgattgtgtttactgctggatttttgaaggnnnnnnnnnnnaagaaagtgccatttcattatttgattatcaccaaattatctggaaataattgggacattgtaacttatctatttatagttatgagattaagactggagtgccatcaccgcgggtgatgatttagcttttgcnnnnnnnnnnnnnnnnnnnnnnccttcccaaatcatgccataattgtaatgtttgaatcggacagagccttacgtgcccgagggcggggccctacctgcctgagcgcgagcccttcatcgtgctggtggagcccga

SEQ ID NO: 184231 - DNA, 928 bp, Homo Sapiens
  misc_feature (584)..(594): n is a, c, g, or t
  misc_feature (727)..(744): n is a, c, g, or t
ttggcttgtaaatgatttgtatgtgatcctgtcgactaaaatcacttaacaattctacaataagcttctgcatcaaagcctgccgcttgctctatgccggaataacaccaaatggaatctcctcatctcttgcttgttagcgatgtgtctgattcagggcatctgtctttttgttacttttttgtccgtgtcctctcatttgggttttgtaactgcaattttcaaaccaaagtttaaaatcaccttttcttcctgttttgctgtagtcactggtgttcctcacccaccagctgtaactcagtttgtgtgaggtacagccacagaagatgtcatgtactgtatattacctggtgatagttgcttttcaccccccgagttcagtttctaggagccaatgaaacttcccctcacctcctcatctttccaagttgttctttgaattgaggagtttgaaggcataaacagttacttggggatttgcgaaaatcctacttagttactgcgtttacagttctttggcccagtctctgacccttcccaagtatttgtgcaatgattgtgtttactgctggatttttgaaggnnnnnnnnnnnaagaaagtgccatttcattatttgattatcaccaaattatctggaaataattgggacattgtaacttatctatttatagttatgagattaagactggagtgccatcaccgcgggtgatgatttagcttttgcnnnnnnnnnnnnnnnnnnccttccaaatcatgccataattgtaatgttgaatcagacagagccttacgtgccccgaggggcggggccctacctgcctggagcgcgagcccttcatcggtgccggtgggagcccgagcgggacagcgggattacaatgactaccggcgcagaccagcctgcaaaggatccttctgaacccacc

SEQ ID NO: 184232 - DNA, 1436 bp, Homo Sapiens
  misc_feature (1199)..(1209): n is a, c, g, or t
  misc_feature (1342)..(1363): n is a, c, g, or t
actttgtacaaaaaagttgggttgcctggccccccaggtccacaaggagaatccagaacaggtccaccagggtccacaggttcaagaggtccccctggcccccctggccgtcctggaaactcaggtatccgaggacccccaggtcctcctggatactgtgattcttctcagtgtgccagcatcccatacaacgggcaaggctatccaggttccggctaacacattttctaagtcgccagtgctgcttacagtttgaatacatgaaaatcctgtttctgagatgtttgcgcacgtgcttattaggaaatgagtctgtatggaaatctcaccacagataatggttaacgaaccgggtcgacatcacaaaggagggtggagactctttttactaacttgaatgagacaaaagcagtggtgtcagtttataatcctgatgcatttcagtaataatgtagaaaaacattattttaaaaaagttccaacacacagccatgaggagcctcagttttgaaagaggtgcataataaaactactaaccagaggagtctatgccattttaagaaaaacaattaacctggttaaagagaaatgtcttatgtaaataataaactaattgtggcttgtaaatgatttgtatgtgatcctgtcgactaaaatcacttaacaattctacaataagcttctgcatcaaagcctgccgcttgctctatgccggaataacaccaaatggaatctcctcatctcttgcttgttagcgatgtgtctgattcagggcatctgtctttttgttacttttttgtccgtgtcctctcatttgggttttgtaactgcaattttcaaaccaaagtttaaaatcaccttttcttcctgttttgctgtagtcactggtgttcctcacccaccagctgtaactcagtttgtgtgaggtacagccacagaagatgtcatgtactgtatattacctggtgatagttgcttttcaccccccgagttcagtttctaggagccaatgaaacttcccctcacctcctcatctttccaagttgttctttgaattgaggagtttgaaggcataaacagttacttggggatttgcgaaaatcctacttagttactgcgtttacagttctttggcccagtctctgacccttcccaagtatttgtgcaatgattgtgtttactgctggatttttgaaggnnnnnnnnnnnaagaaagtgccatttcattatttgattatcaccaaattatctggaaataattgggacattgtaacttatctatttatagttatgagattaagactggagtgccatcaccgcgggtgatgatttagcttttgcnnnnnnnnnnnnnnnnnnnnnnccttccaaatcatgccataattgtaatgttgaatcagacagagtcttacgtgcccgagggcggggcctacctg

SEQ ID NO: 184233 - DNA, 1995 bp, Homo Sapiens
  misc_feature (1220)..(1230): n is a, c, g, or t
  misc_feature (1599)..(1609): n is a, c, g, or t
caactttgtacaaaaaagttggctcatagaattaaaaagactgtacaggtggaacaatccaaagttttaatcaaagaaggtggtgttcagttgctgctcacaatagttgataccccaggatttggagatgcagtggataatagtaattgctggcagcctgttatcgactacattgatagtaaatttgaggactacctaaatgcagaatcacgagtgaacagacgtcagatgcctgataacagggtgcagtgttgtttatacttcattgctccttcaggacatggacttaaaccattggatattgagtttatgaagcgtttgcatgaaaaagtgaatatcatcccacttattgccaaagcagacacactcacaccagaggaatgccaacagtttaaaaaacagataatgaaagaaatccaagaacataaaattaaaatatacgaatttccagaaacagatgatgaagaagaaaataaacttgttaaaaagataaaggaccgtttacctcttgctgtggtaggtagtaatactatcattgaagttaatggcaaaagggtcagaggaaggcagtatccttggggtgttgctgaagttgaaaatggtgaacattgtgattttacaatcctaagaaatatgttgataagaacacacatgcaggattggaaagatgttactaataatgtccactatgagaactacagaagcagaaaacttgcagctgtgacttataatggagttgataacaacaagaataaagggcagctgactaagagccctctggcacaaatggaagaagaaagaagggagcatgtagctaaaatgaagaagatggagatggagatggagcaggtgtttgagatgaaggtcaaagaaaaagttcaaaaactgaaggactctgaagctgagctccagcggcgccatgagcaaatgaaaaagaatttggaagcacagcacaaagaattggaggaaaaacgtcgtcagttcgaggatgagaaagcaaactgggaagctcaacaacgtattttagaacaacagaactcttcaagaaccttggaaaagaacaagaagaaagggaagatcttttaaactctctattgaccaccagttaacgtattagttgccaatatgccagcttggacatcagtgtttgttggatccgtttgaccaatttgcaccagttttatccataatgatggatttaacagcatgacaaaaattannnnnnnnnnngttcttgatggagattaagatgccttgaattgtctagggtgttctgtacttagaaagtaagagctctaagtacctttcctacattttctttttttattaaacagatatcttcagtttaatgcaagagaacattttactgttgtacaatcatgttctggtggtttgattgtttacaggatattccaaaataaaaggactctggaagattttcattgaggataaattgccataatatgatgcaaactgtgcttctctatgataattacaatacaaaggttccattcagtgcagcatatacaataatgtaatttagtctaacacagttgaccctattttttgacacttccattgtttaaaaatacacatggnnnnnnnnnnnccctatatgcttactgtgcacctagagcttttttataacaacgtctttttgtttgtttgttttggattctttaaatatatattattctcatttagtgccctctttagccagaatctcattactgcttcatttttgtaataacatttaatttagatattttccatatattggcactgctaaaatagaatatagcatctttcatatggtaggaaccaacaaggaaactttcctttaactccctttttacacttttatggtaagtagcagggggggaaatgcatttatagatcctttctaggcaaaattgtgaagctaatgaccaaccctgtttctacctatatgcagtctctttattttactagaaatgggaatcatggcctcttgaa

SEQ ID NO: 184234 - DNA, 715 bp, Homo Sapiens
ttgggggtaaccccgttccggccaagccgcttcagcgggggacgtagccatgaaggaagagaaggagcacaggcctaaggagaagcgagtaaccctgttaacccccgccggggccacaggcagcggtggtgggacctcgggggacagctccaagggggaagataagcaggatcgcaacaaggagaagaaagaagcgctgagcaaggtggtaattcgaagattacctcccactttgaccaaggagcagcttcaggaacatcttcaacctatgcctgagcatgattattttgagtttttttctaatgatacgagtttgtatcctcatatgtatgccagagcatacatcaactttaaaaaccaagaggacattattttgttcagggatcgctttgatggttatgtattccttgacaataaaggtcaggaatatcccgctatagtagaatttgcaccttttcaaaaagctgcaaaaaagaagactaagaaaagagataccaaagtcgggactatcgatgatgatccagaatatagaaagtttttggaaagttatgccacagataatgagaaaatgacatctactccagagacactgctagaggaaatagaagcaaaaaatagagaattaatagctaaaaagacaaccccacttttgagcttcctgaaaaacaagcagagaatgagagaagaaaagatagaaaaaaggaggaggagagaa

SEQ ID NO: 184235 - DNA, 1091 bp, Homo Sapiens
ccaactttgtacaaaaaagttggaaccttttccagcctaaactttctgagccagcaatagctacaaatcacaataaacaggctttgctttcattttggtacaatgtctgtgctgactgtccagagaatatccgccttattgttcagaacccagtggtaaccaagaacattgccttcaattacatccttgctgaccatgatgatcaggatgtggtgctttttaaccgtgggatgctgccagcgtactatggcattctgaggctctgctgtgagcagtctcctgcattcacacgacaactggcttctcaccagaacatccagtgggcctttaagaatcttacaccacatgccagccaataccctggagcagtagaagaactgtttaacctgatgcagctgtttatagctcagaggccagatatgagagaagaagaattagaagatattaaacagttcaagaaaacaaccataagttgttacttacgttgcttagatggccgctcctgctggactactttaataagtgccttcagaatactattagaatctgatgaagacagacttcttgttgtatttaatcgaggattgattctaatgacagagtctttcaacactttgcacatgatgtatcacgaagctacagcttgccatgtgactggagatttagtagaacttctgtcaatatttctttcggttttgaagtctacacgcccttatcttcagagaaaagatgtgaaacaagcattaatccagtggcaggagcgaattgaatttgcccataaactgttaactcttcttaattcctatagtcctccagaacttagaaatgcctgtatagatgtcctcaaggaacttgtacttttgagtccccatgattttcttcatactctggttccctttctacaacacaaccattgtacttaccatcacagtaatataccaatgtctcttggaccttatttcccttgtcgagaaaatatcaagctaataggagggaaaagcaatattcggcctccgcgccctgaactcatatgtgcctcttgcccacaatggtggaaccagtaaggcaaagatgacgtttatgatcgtatg

SEQ ID NO: 184236 - DNA, 1282 bp, Homo Sapiens
ttggcatcaatataagacaaacttgtaatctgattttcagcctgtgtcgatacaataatcgacttgcagaacatattgtatctatgcttttcacatcaatagcaaagttgactcctgaggcagccaatcctttctttaagttgttgactatgctaatggagtttgctggtggacctccaggaatgcctccctttgcatcttatattctgcagaggatatgggaggtgattgaatacaatccttctcagtgtctagattggttggcagtgcagacaccccgaaataaactggcacacagctgggtcttacagaatatggaaaactgggtcgagcggtttcttttggctcacaattatcctagagtgaggacttctgcagcttatcttctggtgtcccttataccaagcaattcattccgtcagatgttccggtcaacaaggtctttgcacatcccaacccgtgaccttccactcagtccagacacaacagtagtcctacatcaggtctacaacgtgctccttggtttgctctcaagagccaaactttatgttgatgctgctgttcatggcactacaaagctagtgccctattttagctttatgacttactgtttaatttccaaaactgagaagctgatgttttccacatatttcatggatttgtggaaccttttccagcctaaactttctgagccagcaatagctacaaatcacaataaacaggctttgctttcattttggtacaatgtctgtgctgactgtccagagaatatccgccttattgttcagaacccagtggtaaccaagaacattgccttcaattacatccttgctgaccatgatgatcaggatgtggtgctttttaaccgtgggatgctgccagcgtactatggcattctgaggctctgctgtgagcagtctcctgcattcacacgacaactggcttctcaccagaacatccagtgggcctttaagaatcttacaccacatgccagccaataccctggagcagtagaagaactgtttaacctgatgcagctgtttatagctcagaggccagatatgagagaagaagaattagaagatattaaacagttcaagaaaacaaccataagttgttacttacgttgcttagatggccgctcctgctggactactttaataagtgccttcagaatactattagaatctgatgaagacagacttcttgttgtatttaatcgaggattgattctaatgacagagtctttcaacactttgcacatgatgtatcacgaagctac

SEQ ID NO: 184237 - DNA, 2236 bp, Homo Sapiens
gttgcaacaaattgatgagcaatgcttgacattaaagtagccaactttgtacaaaaaagttggatcgaggattgattctaatgacagagtctttcaacactttgcacatgatgtatcacgaagctacagcttgccatgtgactggagatttagtagaacttctgtcaatatttctttcggttttgaagtctacacgcccttatcttcagagaaaagatgtgaaacaagcattaatccagtggcaggagcgaattgaatttgcccataaactgttaactcttcttaattcctatagtcctccagaacttagaaatgcctgtatagatgtcctcaaggaacttgtacttttgagtccccatgattttcttcatactctggttccctttctacaacacaaccattgtacttaccatcacagtaatataccaatgtctcttggaccttatttcccttgtcgagaaaatatcaagctaataggagggaaaagcaatattcggcctccgcgccctgaactcaatatgtgcctcttgcccacaatggtggaaaccagtaagggcaaagatgacgtttatgatcgtatgctgctagactacttcttttcttatcatcagttcatccatctattatgccgagttgcaatcaactgtgaaaaatttactgaaacattagttaagctgagtgtcctagttgcctatgaaggtttgccacttcatcttgcactgttccccaaactttggactgagctatgccagactcagtctgctatgtcaaaaaactgcatcaagcttttgtgtgaagatcctgttttcgcagaatatattaaatgtatcctaatggatgaaagaacttttttaaacaacaacattgtctacacgttcatgacacatttccttctaaaggttcaaagtcaagtgttttctgaagcaaactgtgccaatttgatcagcactcttattacaaacttgataagccagtatcagaacctacagtctgatttctccaaccgagttgaaatttccaaagcaagtgcttctttaaatggggacctgagggcactcgctttgctcctgtcagtacacactcccaaacagttaaacccagctctaattccaactctgcaagagcttttaagcaaatgcaggacttgtctgcaacagagaaactcactccaagagcaagaagccaaagaaagaaaaactaaagatgatgaaggagcaactcccattaaaaggcggcgtgttagcagtgatgaggagcacactgtagacagctgcatcagtgacatgaaaacagaaaccagggaggtcctgaccccaacgagcacttctgacaatgagaccagagactcctcaattattgatccaggaactgagcaagatcttccttcccctgaaaatagttctgttaaagaataccgaatggaagttccatcttcgttttcagaagacatgtcaaatatcaggtcacagcatgcagaagaacagtccaacaatggtagatatgacgattgtaaagaatttaaagacctccactgttccaaggattctaccctagctgaggaagaatctgagttcccttctacttctatctctgcagttctgtctgacttagctgacttgagaagctgtgatggccaagctttgccctcccaggaccctgaggttgctttatctctcagttgtggccattccagaggactctttagtcatatgcagcaacatgacattttagataccctgtgtaggaccattgaatctacaatccatgtcgtcacaaggatatctggcaaaggaaaccaagctgcttcttgacattaggtgtagcatgtctacttttaagtccctcacccccaacccccatgctgtttgtataagttttgcttatttgtttttgtgcttcagtttgtccagtgctctctgcttgaatggcaagatagatttataggcttaattcttggtcaggcagaactccagatgaaaaaaacttgcatcttcagtatacttcctaaagggcaatcagataatgggatatgttttatgtaattaagagttcacttttattggctttcattttatatggctgtctgggaatacagggttgcctagccctgtactatgtaatttaaacttacagcatttttactgtgtatgatatggtgtcctctgtgccagttttgtaccttatagaggcagattgcctccgatcgctgtggtccttattatcaaatataagttta

SEQ ID NO: 184238 - DNA, 1386 bp, Homo Sapiens
tcacaaccccacagcgtgaaaacaggcagcgctggagctcccagtcatgttttctccaatacacgatgctgcctttagttgtttctgaccaaattaacttaaggcatcttaaaggtggaacatgtttgggaatggtatcccaagatgaagtattatgggaccattacttgcgtcttttaaaattagaagtgaaataaactgccccatctttcctgtgcagcaaatggctttcacaagtatcttccattctagaagcaaaggcagcgaaaggttcttttctcttttttgtaacagacgccaatcattcagcctttttctaagccctggatgaccgtgtaaatgaggaacagccctttggcaagatgattttgcaaatcctgtgcccttgctgtggctcctgggtgtttcgtattcttaccggacgggctgcagctgcactgggggagtgtggctctccctttctgtgtagaagcctgtatatgtgtgtacgtgaatgtgcacgcacgcacgtgtcaagctgacagcttctgggctggagtagagaatgggaaggctaagccatgcttgcctcagcggcaaggatctccatgagaggacacaaaattgttttcagaaagtaggaaaataaacattagggctttaatcctcttaaataaaaattttaaattaaacattaacatttaaagtacaccaagcgtgcagtcctattttgagaaagtccattttgccagggaatacaacttgaggtcattagtaactagttgaatatgatttaaatatgtctgcatttagatgaacagaacagggtaaaaggaactttgccaagccaagctcaattcctggccaaataatgggggagaactgtcagtgcccacacccatttctcagtggtcagtttcagccgctgttgactgaagacaaacgaactcactatgttcttcacaaagatcattttttttaagtaagaaaaatgtttcaactctcttgcctttccttcagcgaatgaaatgtgacgggctaaatacgccagtcactcatgcgccgcagggacacatggtgcagactggcgtgcccaggtagccaaacagaattccccaagaccttttatttgtttaaaatactttggtgtcagcagagtctgagcagacacgttactcatgatgctcgggagaccaggcagggccctgctgagctcttctgaaagtatgtggaactattcaacgcgtggcactaaaagggaacagactcccgaattagagttcattaatgcagttgggcaaccggcttttctgtttagccactggttacttaaggtttccaataaggtttgggaaaaggtcacacgtactcatagatgagaaacaatgaaccagccttgagagccaa

SEQ ID NO: 184239 - DNA, 1236 bp, Homo Sapiens
ttgggtatttattgatcatttgtgggtgtttctccgagagggggatgtgtcagggtcacaagacaatagcggggagagagtcagcagacaaacacgtgaacaaaggtctttgcatcatagacaaggtaaagaatcaagtgctgtgcttttagatatgcatacacataaacatctcaatgctttacaaagcagtattgctgtccgcatgtcccacctccagccctaaggcggtttttccctatctcagtagatggaacgtaaattgggttttataccgagacattccattgcccagggacgagcaggagacagatgccttcctcttgtctcaactgcaagaggcatgccttcctcttatactaatcctcctcagcacagaccctttacgggtgtcgggctgggggacggtcaggtctttcccttcccatgaggccatattgcagactatcacatggggagaaaccttggacaatacctggctttcctaagcagaggtccctgcggccttccgcagtgtttgtgtccctgggtacttgagattagggagtggtgatgactcttaaggagcatgctgccttcaagcatctgtttaacaaagcacaccctgcacagcccttaatccatttaaccctgagtggacacagcacatgtttcagggagcacagggttgggggtaaggccatagattaacagaatcccaaggcagaattttttcttagtagtaacaaaatggagtctcccatgtctacttctttctacacagagacagcaacaatctgatttctctttcctttccccacactttccccccttccacttgacaaaaccgccatcatcatcatggcccgttctcaatgagctgctgggtacacctcccagacggggtggcggccggagagaggggccccccacctcccagacggggcggcgagacagaggcaccccccgcctcccagacggggcggctggccgggcagaggctgtcccccacctcctggagggggcagctgcctggcatagacgctcctcacttcccagacggggcggctgccgggcggaggggctcctcacttctcatacggggcggccgggcagagacgctcctcacctcccagatggggtggcggtcgggcagagacactcctcagttcccagatggggtcgtggctgggcagaggcgctcctcacatctcagacggtgggcggcggggcagagacgctcctcacttcctagat

SEQ ID NO: 184240 - DNA, 1436 bp, Homo Sapiens
  misc_feature (330)..(340): n is a, c, g, or t
  misc_feature (363)..(374): n is a, c, g, or t
  misc_feature (396)..(439): n is a, c, g, or t
ttgggttatttttggtttttgacaattacggaaaatgctgctaagaagttcttgtctttgtcacctagtacaagaattactccagaaaacaggcctaattgctaggtcataggtagaatttagcagttgctgccaaattgtttccaattcccatttccatggcagggcaagagagttcccaaagctctatgctctggccaacacttggtattgttaggttataatttttgcaaatctcatggatataaagtagtattctttgtgcttttaatgtgcatttccctgattattgatagaatcgggtagtttttttcatatgtgtataagccnnnnnnnnnnnatgataaaaatattgtatgacannnnnnnnnnnnacttttcttgtactattaatgnnnnnnnnnnnnnnnnnnnnnnnnnnnnnnnnnnnnnnnnnnnnattgataattcttgggtgtttctcacagagggggatttggcagggtcatgggacaatagtggagggaaggtcagcagataaacaagtgaacaaaggtctctggttttcctaggcagaggaccctgcggccttccgcagtgtttgtgtccctgattacttgagattagggagtggtgatgactcttaacgagcatgctgccttcaagcatctgtttaacaaagcacatcttgcaccgcccttaatccatttaaccctgagttgacacagcacatgtttcagagagcacggggttgggggtaaagttatagattaacagcatcccaaggcagaagaatttttcttagtacagaacaaaatggagtctcctatgtctacttctttctacacagacacagtaacaatctgatctctctttcttttccccacatttcccccttttctattcgacaaaaccgccatcgtcatcatggcccgttctcagtgagctgttgggtacacctcccagacggggtggcggccgggcagaggggcccctcacctaccagatggggaggccgggcagaggcgccccccacctccctcttggacggggtggctggccgggctatatcttcttttgggaattttccattattatcctttagtgaatattgtttccttttgatgcctttgtcaacttcatatagatttatatgagctttttcttaaagatatgttgcatatatttttctgttagtaatttgcaagtttattttaatgtaatcttttaccaaatgaaaatatatttttatagcaagtttaatattttcccttgtggtttctactttaggactcattttctttaccacagcaaaaattatatatccacgtatatattcctttagtgtttcaatgttgttttattttttgtacctaaatcttttaataaagtctggaatttgttttgaatatagtataaggtactaatctagcttatttttccaaaattgttagtta

SEQ ID NO: 184241 - DNA, 685 bp, Homo Sapiens
actttgtacaaaaaagttgggatttctcaatcttttccccacctttcccccctttctattccacaaaaccgccattgtcatcatggcccgttctcagtgagctgttgggtacacctcccagacggggtggtggccgggcagaggggctcctcacttcccagtaggggcggccgggcagaggcgcccctcacctcccggacggggcggccggccgggcggggggctgacccccccacctccctcccggacggggcggctggccgggcagagtggctcctgtcgtcctggggaacctcggccccagccctgcctccccagccagtcacagctcctccctggtcaccctgagggagctcagggcccggctggtagctgggttgctctgcttctgtccccgactcctgtggagcctggcaggcaactccatgatctgaccccggttaccttgacagccctgcctggcctcccctctcatggcccagccaccccagaacctgaagaggttttctagctgccgtgcatttgccaggctgggttacccaccctactttccctgcctgccctccagtgctgccaggcctagtgtgccagccagcgctcagccttcagtaaagggttcccctgcttccaacctccattgcactgcttcccctaagactgtgacctcctggaaggctggagcaca

SEQ ID NO: 184242 - DNA, 958 bp, Homo Sapiens
gagggggctgccagcacgtccacagggccatctgggcccgggattgctctaagctgagaccaagttcccaatgagcagcatgtcagggtcattccagtgcccagggccggccactggctgcagtatgtcctggtgctccacgaaccaattcaggatggagagcacgctccaccaggagtcctggatgtcatcatagttacgccagaggttgcagatgtccgccagcagactgtagttcacccttggggggaggccgccttcataggctggccagctgcaggagaaggcgatggggcggcctgtggcattcagggcagcagccatcttggggtacccctgggcccgctcctcgggggtggagaagcagccatccagcttgagcatgtctaccttccactcggcgaaggtctgagcatcctggaccaccttgtccagtgtggtgcctgggtaacccatgcaggtgaagttgcccatgtccgcgtagatacccaacttcaggcccagggagtgaacgtagtcagccaggaaaggaatgccatgagggaagcgcttgggatctggcatcaggcggccactggcatcgcgaccaccgatccagcagtcatcaatgttgaggtatgtgtagcccatgtcccgccatccatcctgtgccatccggtcagccatctccatgaagagctgttcacttatgcagttctttgggccctcatcacagttaatgttgcagcggaagcgttcccaggccagccagcccatgggtggtgtctgcaggagcccattgtccagcatcagcacctgggccacatgtcccagcaagagcactgtcttcagcagcatcgctctggactcagcttccgaggacctgaccagatctggtctgcgtgtatcagctgtatgtgttgggctcgaagcgttcagacctgccgccgcttctgactcgaatccggtaacctgccaa

SEQ ID NO: 184243 - DNA, 1937 bp, Homo Sapiens
ttggctcttcaccctgcacagccttgttagttcttgcagatacagcgctaggaaaaggggagtaattcaggtctagaatggaaaaactgttttgttgctttcccaacagcatggtggtggaacaccccgagttcctcaaggcagggaaggagcctggcctgcagatctggcgtgtggagaagttcgatctggtgcccgtgcccaccaacctttatggagacttcttcacgggcgacgcctacgtcatcctgaagacagtgcagctgaggaacggaaatctgcagtatgacctccactactggctgggcaatgagtgcagccaggatgagagcggggcggccgccatctttaccgtgcagctggatgactacctgaacggccgggccgtgcagcaccgtgaggtccagggcttcgagtcggccaccttcctaggctacttcaagtctggcctgaagtacaagaaaggaggtgtggcatcaggattcaagcacgtggtacccaacgaggtggtggtgcagagactcttccaggtcaaagggcggcgtgtggtccgtgccaccgaggtacctgtgtcctgggagagcttcaacaatggcgactgcttcatcctggacctgggcaacaacatccaccagtggtgtggttccaacagcaatcggtatgaaagactgaaggccacacaggtgtccaagggcatccgggacaacgagcggagtggccgggcccgagtgcacgtgtctgaggagggcactgagcccgaggcgatgctccaggtgctgggccccaagccggctctgcctgcaggtaccgaggacaccgccaaggaggatgcggccaaccgcaagctggccaagctctacaaggtctccaatggtgcagggaccatgtccgtctccctcgtggctgatgagaaccccttcgcccagggggccctgaagtcagaggactgcttcatcctggaccacggcaaagatgggaaaatctttgtctggaaaggcaagcaggcaaacacggaggagaggaaggctgccctcaaaacagcctctgacttcatcaccaagatggactaccccaagcagactcaggtctcggtccttcctgagggcggtgagaccccactgttcaagcagttcttcaagaactggcgggacccagaccagacagatggcctgggcttgtcctacctttccagccatatcgccaacgtggagcgggtgcccttcgacgccgccaccctgcacacctccactgccatggccgcccagcacggcatggatgacgatggcacaggccagaaacagatctggagaatcgaaggttccaacaaggtgcccgtggaccctgccacatatggacagttctatggaggcgacagctacatcattctgtacaactaccgccatggtggccgccaggggcagataatctataactggcagggtgcccagtctacccaggatgaggtcgctgcatctgccatcctgactgctcagctggatgaggagctgggaggtacccctgtccagagccgtgtggtccaaggcaaggagcccgcccacctcatgagcctgtttggtgggaagcccatgatcatctacaagggcggcacctcccgcgagggcgggcagacagcccctgccagcacccgcctcttccaggtccgcgccaacagcgctggagccacccgggctgttgaggtattgcctaaggctggtgcactgaactccaacgatgcctttgttctgaaaaccccctcagccgcctacctgtgggtgggtacaggagccagcgaggcagagaagacgggggcccaggagctgctcagggtgctgcgggcccacctgtgcaggtggcagaaggcagcgagccagatggcttctgggaggccctgggcggaaaggctgcctacgcacatccccacggctgaaagaaaagaa

SEQ ID NO: 184244 - DNA, 1647 bp, Homo Sapiens
acaaaaaagttggcctgctttcccgacatggccttcaattttggggctccctcgggcacctccggtaccgctgcagccaccgcggcccccgcgggtgggtttggaggatttgggacaacatctacaactgcaggttctgcattcagcttttctgccccaactaacacaggcactactggactctttggtggtactcagaacaaaggttttggatttggtactggttttggcacaacaacgggaactagtactggtttaggtactggtttgggaactggactgggatttggaggatttaatacacagcagcagcagcaaactacattaggtggtctcttcagtcagcctacacaagctcctacccagtccaaccagctgataaatactgcgagtgctctttctgctccaacgctgttgggagatgagagagatgctattttggcaaaatggaatcaactgcaggccttttggggaacaggaaaagggtatttcaacaataatattccgccagtggaattcacacaagaaaatcccttttgccgatttaaggcagtaggttatagttgcatgcccagtaataaagatgaagatgggctagtggttttagttttcaacaaaaaagaaacagagattcgaagccaacaacaacagttggtagaatcattgcataaagttttgggaggaaaccagacccttactgtaaatgtagagggcactaaaacattgccagatgatcagacagaagttgttatttatgttgttgagcgttcgccaaatggtacttcaagaagagttccagctacaacgctatatgcccattttgaacaagccaatataaaaacacaattgcagcaacttggtgtaaccctttctatgactagaacagaactttctcctgcacagatcaaacagcttttacagaatcctcctgctggtgttgatcctattatctgggaacaggccaaggtagataaccctgattctgaaaagttaattcctgtaccaatggtgggttttaaggaacttctccgaagactgaaggttcaagatcagatgactaagcagcatcaaaccagattagatatcatatctgaagatattagtgagctacaaaagaatcaaactacatctgtagccaaaattgcacaatacaagaggaaactcatggatctttcccatagaactttacaggtcctaatcaaacaggaaattcaaaggaagagtggttatgccattcaggctgatgaagagcagttgcgagttcagctggatacgattcagggtgaactaaatgcacctactcagttcaagggccgactaaatgaattgatgtctcaaatcaggatgcagaatcattttggagcagtcagatctgaagaaaggtattacatagatgcagatctgttacgagaaatcaagcagcatttgaaacaacaacaggaacgccttagccatttgattagcatcattaaagacgatctagaagatataaagctggtcgaacatggattgaatgaaaccatccacatcagggtggtgtctttagttgacagttcacaaacttgtgtaaaggtttgtgaaatgcatcttcttactgcatcagaccttccttaagatgaaaccgaccacatggagggaaaaagaaaa

SEQ ID NO: 184245 - DNA, 1959 bp, Homo Sapiens
ttgggtgtctgctgccgccattgtgcggcgctggtcccctcagagggttcctgctgctgccggtgccttggaccctccccctcgcttctcgttctactgccccaggagcccggcgggtccgggactcccgtccgtgccggtgcgggcgccggcatgtggctgtgggaggaccagggcggcctcctgggccctttctccttcctgctgctagtgctgctgctggtgacgcggagcccggtcaatgcctgcctcctcaccggcagcctcttcgttctactgcgcgtcttcagctttgagccggtgccctcttgcagggccctgcaggtgctcaagccccgggaccgcatttctgccatcgcccaccgtggcggcagccacgacgcgcccgagaacacgctggcggccattcggcaggcagctaagaatggagcaacaggcgtggagttggacattgagtttacttctgacgggattcctgtcttaatgcacgataacacagtagataggacgactgatgggactgggcgattgtgtgatttgacatttgaacaaattaggaagctgaatcctgcagcaaaccacagactcaggaatgatttccctgatgaaaagatccctaccctaagggaagctgttgcagagtgcctaaaccataacctcacaatcttctttgatgtcaaaggccatgcacacaaggctactgaggctctaaagaaaatgtatatggaatttcctcaactgtataataatagtgtggtctgttctttcttgccagaagttatctacaagatgagacaaacagatcgggatgtaataacagcattaactcacagaccttggagcctaagccatacaggagatgggaaaccacgctatgatactttctggaaacattttatatttgttatgatggacattttgctcgattggagcatgcataatatcttgtggtacctgtgtggaatttcagctttcctcatgcaaaaggattttgtatccccggcctacttgaagaagtggtcagctaaaggaatccaggttgttggttggactgttaatacctttgatgaaaagagttactacgaatcccatcttggttccagctatatcactgacagcatggtagaagactgcgaacctcacttctagactttcacggtgggacgaaacgggttcagaaactgccaggggcctcatacagggatatcaaaataccctttgtgctagcccaggccctggggaatcaggtgactcacacaaatgcaatagttggtcactgcatttttacctgaaccaaagctaaacccggtgttgccaccatgcaccatggcatgccagagttcaacactgttgctcttgaaaatctgggtctgaaaaaacgcacaagagcccctgccctgccctagctgaggcacacagggagacccagtgaggataagcacagattgaattgtacaatttgcagatgcagatgtaaatgcatgggacatgcatgataactcagagttgacattttaaaacttgccacacttatttcaaatatttgtactcagctatgttaacatgtactgtagacatcaaacttgtggccatactaataaaattattaaaaggagcactaaaggaaaactgtgtgccaagcatcatatcctaaggcatacggaatttggggaagccaccatgcaatccagtgaggcttcagtgtacagcaaccaaaatggtagggaggtcttgaagccaatgagggatttatagcatcttgaatagagagctgcaaaccaccagggggcagagttgcacttttccaggctttttaggaagctctgcaacagatgtgatctgatcataggcaattagaactggaagaaacttccaaaaatatctaggtttgtcctcattttacaaatgaggaaactaaactctgtggaagggaaggggttgcctcaaagtcacagctta

SEQ ID NO: 184246 - DNA, 1334 bp, Homo Sapiens
  misc_feature (204)..(212): n is a, c, g, or t
  misc_feature (536)..(845): n is a, c, g, or t
  misc_feature (1079)..(1155): n is a, c, g, or t
ttggatttgacaatgaatatggaattgcatacaatagtctgtcttcagagattcttgaaaggttgcagaaaattgatgctccaccaagtgccagtgtcgagtggtgcaggaagtgttttggagcgcctctcatttaaatagagattcactagaatgttgacacacaaggcttggggattagatttcatctggaaacattcaagnnnnnnnnnccaaatcgtaagaactggtgaatacggaattgaagtaactcttggggacaatatataatgaattatgattcatattgcattaccttgaaatatgaagtgccatttgaatgtcccagggcttattaatattgaagattttcaacccctgaactgcttttctgcctctgtggaaaactactttgggattcttcagtatttgtagtagtttgatagaaataatgaggaaccatattcattctaggcattgtttatatttgaagttactgagtttgaggaatggcaaattaaatttgcctaacccccaaaacaaatgaaatatctcannnnnnnnnnnnnnnnnnnnnnnnnnnnnnnnnnnnnnnnnnnnnnnnnnnnnnnnnnnnnnnnnnnnnnnnnnnnnnnnnnnnnnnnnnnnnnnnnnnnnnnnnnnnnnnnnnnnnnnnnnnnnnnnnnnnnnnnnnnnnnnnnnnnnnnnnnnnnnnnnnnnnnnnnnnnnnnnnnnnnnnnnnnnnnnnnnnnnnnnnnnnnnnnnnnnnnnnnnnnnnnnnnnnnnnnnnnnnnnnnnnnnnnnnnnnnnnnnnnnnnnnnnnnnnnnnnnnnnnnnnnnnnnnnnnnnnnnnnnnnnnnnnnnnngagagcaacatatttgtgtaagtttgtatatgtgtagggctgtgtaggtatgtgtatatacagccatattctaagtgtatatttattaaaatagattgcatgttgcaatacggttttctgaaaggggtctcattgactattaaataaatgactactactaaacttgtctgtagtcattaatcttaaaattacctgaaaatctgatgacagctgccttccctaactttaatgtannnnnnnnnnnnnnnnnnnnnnnnnnnnnnnnnnnnnnnnnnnnnnnnnnnnnnnnnnnnnnnnnnnnnnnnnnnnnatacacctttcatattatgtattatcttgcttaatgggttttatcttgattatccagttacttccatcctcttcccaatgttaatttgcaatagttttaaatgggaacaaatgaatcattcatcagatagttaaaatgaaataaatcagctgcctaataatttatggaattcattggaa

SEQ ID NO: 184247 - DNA, 2376 bp, Homo Sapiens
ctttgtacaaaaaagttgggtttatgatcccattaaattaatgaaagacatttcacagaacttccccataaaagccagatctctaaccagaattgctgtaaatcaacatatgagagaagaaataaaggaaaatcaaaaggatcttcaagttagatttaaaattcagccaggcgatgctcgtctatttataaatggccttcgtgttgatatggatgtttatgacgcttttagtattttggatatgctgaaattagaaggaaaaatgatgaatggccttcgcaatcttgggatcaatggggaagatatgagcaaatttttaaaattaaattcacacatttgggaatatacttatgtattagatattcgacattcttctataatgtggattaatgacttagaaaatgatgatttgtatattacatggcctacaagttgccagaaacttctgaagccagtatttcctggaagtgtaccttccataaggcgcaattttcataatttggttctgtttattgatccggcccaagaatataccttggattttataaaacttgctgatgttttctattctcacgaagttcctcttagaattgggttttgtgttcattcttaatacagatgatgaagttgatggagcaaatgatgctggagttgctctctggcgagctttcaactatattgcagaagaatttgatatatcagaagcatttatttctatagtacacatgtaccaaaaagtgaagaaggatcaaaatatactcactgtggacaatgtgaagagtgttctccaaaatacatttcctcatgctaatatttgggatattttgggaattcattctaaatatgatgaagaaagaaaggctggagcaagcttttataagatgactggcctgggtcctttgcctcaagctctttataatggtgaaccctttaaacatgaagagatgaatattaaagaactaaaaatggctgttcttcaaagaatgatggatgcatctgtatatttacaaagagaagtttttttgggcacattaaatgatcgcacgaatgcaattgattttctaatggataggaataatgttgtaccccgtataaatactttgattttgcgtactaaccagcagtacctcaatttaatatctacatcagtaactgctgatgttgaagatttctctactttctttttcttggattcacaagataagagtgctgtaattgcaaagaacatgtattatttaacccaagacgatgagagtataatttctgcagtcactctctggattattgcagattttgataagccttctgggagaaaacttctttttaatgcattaaagcacatgaaaacaagtgttcatagtcggttggggattatttataatcctacatcaaaaataaatgaagagaacacagctatttctagaggaattttggcagcttttcttacacagaagaacatgtttttgagaagctttcttgggcaactggcaaaggaagaaattgctacagctatttactctggagataaaattaaaacattccttattgaggggatggataagaatgcttttgagaaaaaatataatactgttggagtgaatatttttcgaactcaccagttgttctgtcaagatgtacttaaattacgtcctggagaaatgggtattgtcagcaatgggagattcttaggacctttagatgaagatttttatgcagaagatttttacttgttggaaaagataacatttagtaatttaggagagaaaattaaaggcattgttgaaaatatgggaatcaacgcaaataacatgagtgactttattatgaaagttgatgcccttatgtcctctgtgcctaagcgtgcatctcgatatgatgtcacatttcttagggagaatcacagtgttataaagacgaatcctcaagagaatgatatgttcttcaatgtcattgctattgttgatccattaacaagagaagcacagaaaatggcacagttgttggttgtacttggcaagattatcaacatgaagataaagttgttcatgaactgtaggggcaggctttcagaagcccctttagaaagcttttaccgttttgttctggaaccagaactgatgtcaggggctaatgacgtttcttctcttggaccagtggcaaaatttttggatattcctgaatcacccctcctaatcctcaacatgattactccagaaggctggttggttgaaacagtgcacagcaactgtgaccttgataatattcacttaaaggatactgagaaaactgttacagcagaatatgaactagaatacttactactggaagacaatgctttgataaagtgacagaacagcctcctcgggtctgcagttc

SEQ ID NO: 184248 - DNA, 1828 bp, Homo Sapiens
ttggcttgtttcctagcgtatttagtaaatggcaggattaatagctaccatatctttaatctctaattcatttttgcttaataaagaaatatctatttgatgaggaaatgtttttcctaaactgatatcttctagaagatatatgataatataactgtttttattttaagttcttaggacctttagatgaagatttttatgcagaagatttttacttgttggaaaagataacatttagtaatttaggagagaaaattaaaggcattgttgaaaatatgggaatcaacgcaaataacatgagtgactttattatgaaagttgatgcccttatgtcctctgtgcctaagcgtgcatctcgatatgatgtcacatttcttagggagaatcacagtgttataaagacgaatcctcaagagaatgatatgttcttcaatgtcattgctattgttgatccattaacaagagaagcacagaaaatggcacagttgttggttgtacttggcaagattatcaacatgaagataaagttgttcatgaactgtaggggcaggctttcagaagcccctttagaaagtggaaatttttggatattcctgaatcacccctcctaatcctcaacatgattactccagaaggctggttggttgaaacagtgcacagcaactgtgaccttgataatattcacttaaaggatactgagaaaactgttacagcagaatatgaactagaatacttactactggaaggacaatgctttgataaagtgacagaacagcctcctcggggtctgcagttcacactaggcacaaaaaataaacctgctgtggttgatacaatagtgatggcacatcatgggtattttcaattaaaagcaaacccaggtgcttggatactgaggttacaccaaggaaaatctgaagatatttatcaaatagttgggcatgaaggaactgactctcaagcagacctagaagatatcattgttgtattaaacagcttcaaaagcaagatactcaaagtaaaagtgaaaaaagaaacagacaaaattaaggaagatatccttaccgatgaagatgaaaaaacaaaaggactgtgggattccattaaaagtttcacagtaagcttgcataaagaaaacaaaaaggaaaaagatgtcctaaacattttttcagttgcttctggtcatttatatgaacgttttttaagaattatgatgctttctgttttgcgtaacaccaaaacaccagtgaaattctggttgctaaaaaattatctctcaccgacatttaaagaagtaattcctcacatggctaaagagtatggattccgatatgaactagttcaatataggtggccccgttggcttcgtcaacagactgaaagacagaggattatttggggttacaaaattcttttccttgatgttcttttcccactagcagtggacaaaatcatttttgttgatgctgaccagattgtgagacatgatctaaaagaacttcgagatttcgatctggatggagctccttatgggtataccccattttgtgatagccgcagggaaatggatggatatcgtttctggaaaacaggatactgggcatcacatcttttaagacggaaaataccatatcagtgctttatatgtagtggatctcaagaagttcacgagattgggagcaagtgacaggctcacgagccagtatcaagctctcagtcaagatccaacagtcattcaaacctagatcagatctccccaataatatgatttaccaagtcgccataagtctctttcctcaagactggcagtggtgtgaacccggtgtga

SEQ ID NO: 184249 - DNA, 968 bp, Homo Sapiens
ttgggtcaactctgaaatggtcaagctttatgaccttcgttcttttgataaggggccattgggctacctttaagatgcagtatgatcgaacttgtgagtggacaggacttaaattcagcaatgatggcaagctcatcctcatttccaccaacggcagcttcattcgtctgattgatgcattcaaaggagtggtgatgcacacatttgggggttatgccaacagcaaagctgtcacactggaggcttcatttactccagactctcagtttattatgattggttcagaggatggcaagatccatgtctggaatggagagagcggtataaaagtagctgtgttggatggtaaacacacaggcccgattacctgtttgcaattcaaccccaagttcatgacttttgccagtgcgtgttccaacatggccttttggttgcccaccattgatgactgaccctgttgctgcttggctatttctgtatagtgagggcggccagcaggaagaaactcagagggaactgagataatagtgggattggatcatttgactgggctggagaacatccttttacatggccttcccatggatgtgctgtacatctgctcaaaagaaaataattactttgatgagcgtcttcaaaaggactcttggtgcaacagactcaattggaactcagcttttctaactgtcactgcaccaagctctgctggaggagtgaccagactcacgatttggtatagtggggctctcaagcatcttcaatttgaatgtacatgctgctgaggagccggtgaagtcatcagttccgcacatcccttctaccctccaactgcatgggaagccaaagtcctggttttgaaatgcttgggcagctcagccgcttgccctcaccctgcatgtcttgttactgggtctccctgtgtacttgtggcattatccacaccatcatgtttctagtgccaaacattt

SEQ ID NO: 184250 - DNA, 2620 bp, Homo Sapiens
  misc_feature (1822)..(1846): n is a, c, g, or t
acaaaaaagttggcttttgtacagaaaagcagtctgaagttttgttggtatatctaccatttcacatccttttcagactgtaaaattgccaggatgcagttttccccttgattggcgtgtgtgtatatatggaataaatatatatatacacacacacatattactgcaatctgtgattgcttcatctgtaaatcagttgtaaacctttacatatttgacttaaataactgtaagatatatatgtactacattaaaaagtgttgattaatagatgaaatttttaaattaattttttaaaacatgccatacattgtatcacaatgttaatgtgccaagatattgttcctgtcatgcagagtataagaatgctttgaacaatttgtagacttagtgaaataaaataagaggaaagccaaaaacaaacaaacaaaaagcatatggggagctggtattttctctttagcttactgttgtgcctttttatttttctaatcacagcagtatgagttatgagtgccctaatttgtggttagtttctaatttaatgttgtttcatagagtttggagtgttttgatacagggtgaaaatgaacttctggtttcaaacctgcgttactggagacagcccaaagagtaattttctgttttgacaggttttactggaagtatatgtgatgagcagaagaggttatcagcattaaattgttttggttctaaatttggaacagtatatataattaaaagtaaggaacattagaggatttaattagaataaatacatgttttggaaatacagtgacctcttgcagtgtcacaaaagtgcaaagtgatattagctgtcatctgcaatacagaatctcattgcttttgcacatggagcatataggaaactccaaacagatcacaatgaggtttctaaatctgttgggttctgtcttctattgggttctgtgaagcaaaccactgtagctttagctgggttcagtcatatgactcgttggtggaatgcctaggtttttcatcttacatgcagtcttgggggtggatgaatacataatttcttatgtattcgtgtatccattagtgaatagttcaagtctgtttaagagtgtattgagatggcattctctgcatgttaaagatcttaatggcaaccagcacctcttaagtatggtttaaacatattcttagctaattttttccattagtttttgaaattggtggcagttgtctgatccacaagggcaagatcttctgagtactctggggtgtgagtatgtgtgcacacgtgtgtgttggagtgagtgagagaatgtgtctgtgcatgtggccatgctttcctagaatgtcaagtagatatttttacactttgagttttaaagcaattactatcagactgagatcttgtatgccaaactttaatctgcttttatgttttcaggctgaaggtgtgaaaatcctaagaggatttcatattgaatatgtgtacacaatcttaactatcgtggtggaaaacatactactataatttattattatatcttccagataatgttattcatttagaacaaataaggtatattttttagaatcaactttgtaagcactataaaatctttaataagttataaggtctatgatgtgtttactttaaaaattgctgttaaaagcaacacgtattaaatatgtaattatcatctgggttaagagtctgtttttcttctttgtggtaagtcttagaatatggtactgtggattaatctaatgaaattaacatatgtggttgaagttaccaagaaacgatgaaaagaaactaaatatnnnnnnnnnnnnnnnnnnnnnnnnnaggggcaccactccccaacatagttgaaaatccatgtataacttttgactcctccaaaacttaactactaatagcctactcttgatgggaagccttaccaataagaaacagttgatgaacacatattgtgtatggtatatgtattatatactgttttcttacaatagtgtaagctaaggaaaagaaaatgtgtttactcttcattcagtggaagtggaccatcctaaaagtcttcactcatgctatcttcatgctgagtagtaggctgaggaggaggaggagggggttggtcttgctgttgcgggggtggaagaagatgtgcattattagtgggcccacacagctgaaaccatgctgttccacggtcaactgtgtgtggtatcggtgagactgaatgattatcgttggtgttcttaaattattttcaggtcctctagaaaataagataattatagcaaaaaataaaattgttttgaaattttgataaatatataaatgtatagaacctatttttttcaatgaaagaaaatgggaaacattttttaacattgctagattggcagtgctttcttttattatttcaagttatggaaatttgcacagttgaaaactggggataaattctacaaaagtgcaagaaaacaattcaaattagccagagccctgctaaaactcttaatgtaaaatttatttatttgcactgagctgttttaccttctttaaggccattgggacctctcaatgatgcatatgtttcatacatcttgtattttc

SEQ ID NO: 184251 - DNA, 916 bp, Homo Sapiens
ttcagaaagtcattgtgctctgggttctccacttccacaacaccccaggggtagaggcggcctctgaccttctttcctttggcttcaatcaactgattggatccaaccacagagaatgggatgctagccttgagaagtctagtctgctctttaaaatcttcatcttcatctgattctgcatcaggtaagtgatagattttgatgttatgttcttcaatttcatccagaatccttttcttcagccgctcccgttccttcagggtgagagtgtcagcttttgcaatgacaggcacaatattcaccttgttgtgtattgccttcataaacgccacatctaagggcttaagtctaaaattaattttagaattgtcacttatttaaaaaaaatacatacaaaactcttctctctcaaattatcttaattcttatattaaaatacacagtttgggtaaaacttacaaacccatgtagtaaagcatttctccacgataaacaattacttacccatgtccaaaaggtgaaataaagtaaaagcaacaatgcaccctattatcaatgatgtgccgcctgttcaagccgctctcgtcatgcaggtacctctcaaattgctcatcaatataggagataattgtcttaaaactgagagaaacagaaacattaacaataatcatagggtataaaacagggggtccctgacttcaaagggaaaacaagtgcctccgcccaaatatacataatttaataattcattttcaagatgagaacagaagactgacttttagatttggcaaatggaagtttttggaaactatgccaagcataactgcccctaagtgctgagagtcaaaagcctgaatggaataggttatgatgcacctgagagagggccagtgtagacagggctgccaattctttc

SEQ ID NO: 184252 - DNA, 1283 bp, Homo Sapiens
acctataaagccaactttgtacaaaaaagttgggcctattcctaactgatctgtacccagaaagagtcatacctggagcagcagaaaaaattgaaagaactgtccagattgaggcttcaactgttgaaattgaagagcgaggggtcaagctacgcctgacagtggtagatacccctggctatggtgacgctatcaactgcagagattgttttaagacaattatctcctatattgatgagcaatttgagaggtacctgcatgacgagagcggcttgaacaggcggcacatcattgataatagggtgcattgttgcttttactttatttcaccttttggacatggacttaagcccttagatgtggcgtttatgaaggcaatacacaacaaggtgaatattgtgcctgtcattgcaaaagctgacactctcaccctgaaggaacgggagcggctgaagaaaaggattctggatgaaattgaagaacataacatcaaaatctatcacttacctgatgcagaatcagatgaagatgaagattttaaagagcagactagacttctcaaggctagcatcccattctctgtggttggatccaatcagttgattgaagccaaaggaaagaaggtcagaggccgcctctacccctggggtgttgtggaagtggagaacccagagcacaatgactttctgaagctgagaaccatgctcatcacccacatgcaggatctccaggaggtgacccaggaccttcattatgaaaacttccgttctgagagactcaagagaggcggcaggaaagtggagaatgaggacatgaataaagaccagatcttgctggaaaaagaagctgagctccgccgcatgcaagagatgattgcaaggatgcaggcgcagatgcagatgcagatgcagggcggggatggcgatggcggggctctcgggcaccacgtgtaaggtgatgtgcacatatcaagaagtcagagtgtgttttgttttcttttttctagaaaacactttcctggataaaaaagaaaacattccagatgcatgatccagctgtgtgttttcaatccttgggagggtgccatccacattttaacagtacctgtgcctgagaatttaatttttaaaagactttgatgtgtttttgtatgaagtacttttaacgtatgtatttcattgctgtgtcacactctgtgttttgtgaggtgaatgtcttccttttctttctccctaaccactaatgttagaattgatttccaagatcggcatgtatacttaata

SEQ ID NO: 184253 - DNA, 3181 bp, Homo Sapiens
ttggcgcggtcggtcggcgcctgttctcgggctgtttggcggacgaagcttcacaaaagatgtctaagcaacagccaactcagtttataaatccagaaacacctggctatgttggatttgcaaacctccccaatcaagttcaccgaaaatcagtgaaaaaaggttttgagttcacactgatggtggtcggtgaatcaggtctaggaaaatcgactctcataaacagcctattcctaactgatctgtacccagaaagagtcatacctggagcagcagaaaaaattgaaagaactgtccagattgaggcttcaactgttgaaattgaagagcgaggggtcaagctacgcctgacagtggtagatacccctggctatggtgacgctatcaactgcagagattgttttaagacaattatctcctatattgatgagcaatttgagaggtacctgcatgacgagagcggcttgaacaggcggcacatcattgataatagggtgcattgttgcttttactttatttcaccttttggacatggacttaagcccttagatgtggcgtttatgaaggcaatacacaacaaggtgaatattgtgcctgtcattgcaaaagctgacactctcaccctgaaggaacgggagcggctgaagaaaaggattctggatgaaattgaagaacataacatcaaaatctatcacttacctgatgcagaatcagatgaagatgaagattttaaagagcagactagacttctcaaggctagcatcccattctctgtggttggatccaatcagttgattgaagccaaaggaaagaaggtcagaggccgcctctacccctggggtgttgtggaagtggagaacccagagcacaatgactttctgaagctgagaaccatgctcatcacccacatgcaggatctccaggaggtgacccaggaccttcattatgaaaacttccgttctgagagactcaagagaggcggcaggaaagtggagaatgaggacatgaataaagaccagatcttgctggaaaaagaagctgagctccgccgcatgcaagagatgattgcaaggatgcaggcgcagatgcagatgcagatgcagggcggggatggcgatggcggggctctcgggcaccacgtgtaaggtgatgtgcacatatcaagaagtcagagaaaacactttcctggataaaaaagaaaacattccagatgcatgatccagctgtgtgttttcaatccttgggagggtgccatccacattttaacagtacctgtgcctgagaatttaatttttaaaagactttgatgtgtttttgtatgaagtacttttaacgtatgtatttcattgctgtgtcacactctgtgttttgtgaggtgaatgtcttccttttctttctccctaaccactaatgttagaattgatttccaagaatcggcatgtatacttaatactgaatttctttgatttaactgacttaacaactgactaaccattgatgagcactcctgatttttatctagaacattcagatttaccataatgttccttagtggtagaggtgtgtgcctagtgatgtagaaagatacactgacttggtgcaaggccatctgcttaccacatcacaccacttggagatctttgcttccttgcttttatgtttgtacacaacacctaaaaccagttttgctgctataattctatactgttgattcgtctgcgattttatctgttaaccaaataaaacataatagaatttcctaatgagatatatctttatacttaaacagcttttttagaggtgagttttaaagaagtctcttaattctgatgctaggttgtttttaaaaccactatgcaaagaactcaccacaagccaccttttgtagtgttctccactaatactggttatcctgtgctacagagaaaatcaaagcagtcataagctccagttttcgtattgcaaataagactcttacctacaaaatgagattcagtgaactaatttggtttttactcaaccaaattaaaaatttttttaaggaaaattagcagttggtctattcagaatcaaacctttttatattttatactgcactttagtgtattttctgtcactgtaggtatagaagatctgcctcccctgtggaaattggggtctgttggtgggcttgcccctgaagcctggcttgggttgaaaagtgttcccgccctaaggccttggtgccctgaacctctgatgcctaccgggttctcctgatttgagtttcctttaaatactccctttttgagtaattttctgatgggaggaaagtagcagtcatcatctttttgtgtgcaggctgtctcatttatttttagccattgtcgtttcattcattttgtgtaatataaaccgtgtgtcatgtcaaagtgaaagacatttcaaatctgtagcataggctagtgggcaggtccgcacagtcgaagccacacctggtctgttttctgtgcactgtagccttagtgtcacctttcttcttgtgtctccttatggtacactccagcggttgccttttttatcatttctactgaagttgggaaattcaaccccagaaattgacagatgaaaggagacaatggttgtgtagggagatggagaaaatgcttaatctgaggatgagacagggttttttcatttttgtgggggctagaaaaaacataaaatgaggcagttaaataataatagttaatgaaggtgtgctacagaaaataatctggtgttcttgctaactttgcccttcactgttgcttaattgtgaacagccaaaagctatatgttatggcttattgtgtgaaggtaactaagaagtggtgttccatgacttcagagtacatccatgcggagtccattatttgagtttgacatttaataactttgctggaaaatctgtaaaaaagaaaaacaagtttgctagtgactaagccccgcatatgtgagtgaaagtacttcaggcacgctgcctcctggtaacagctatgcagggagggaggacccacactgctacacttctgatcccctttgggttttactacccaaatctaaatagatacttttgataatagataactgctcttttactaagacatagtctctacctatagaattgtattttgaaaacacttatttaccccgcaatttg

SEQ ID NO: 184254 - DNA, 2005 bp, Homo Sapiens
ttgggccggttccctgtgtgtgtgtccgctcgccctctgctccgtcctgcggctgcccactgccctcctacggtccaccatggccctgctgcactccggccgcgtcctccccgggatcgccgccgccttccacccgggcctcgccgccgcggcctctgccagagccagctcctggtggacccatgtggaaatgggacctccagatcccattctgggagtcactgaagcctttaagagggacaccaatagcaaaaagatgaatctgggagttggtgcctaccgggatgataacggaaagccttacgtgctgcctagcgtccgcaaggcagaggcccagattgccgcaaaaaatttggacaaggaatacctgcccattgggggactggctgaattttgcaaggcatctgcagaactagccctgggtgagaacagcgaagtcttgaagagtggccggtttgtcactgtgcagaccatttctggaactggagccttaaggatcggagccagttttctgcaaagattttttaagttcagccgagatgtctttctgcccaaaccaacctggggaaaccacacacccatcttcagggatgctggcatgcagctacaaggttatcggtattatgaccccaagacttgcggttttgacttcacaggcgctgtggaggatatttcaaaaataccagagcagagtgttcttcttctgcatgcctgcgcccacaatcccacgggagtggacccgcgtccggaacagtggaaggaaatagcaacagtggtgaagaaaaggaatctctttgcgttctttgacatggcctaccaaggctttgccagtggtgatggtgataaggatgcctgggctgtgcgccacttcatcgaacagggcattaatgtttgtctctgccaatcatatgccaagaacatgggcttatatggtgagcgtgtaggagccttcactatggtctgcaaagatgcggatgaagccaaaagggtagagtcacagttgaagatcttgatccgtcccatgtattccaaccctcccctcaatggggcccggattgctgctgccattctgaacaccccagatttgcgaaaacaatggctgcaagaagtgaaaggcatggctgaccgcatcattggcatgcggactcaactggtctccaacctcaagaaggagggttccacccacaattggcaacacatcaccgaccaaattggcatgttctgtttcacagggctaaagcctgaacaggtggagcggctgatcaaggagttctccatctacatgacaaaagatggccgcatctctgtggcaggggtcaccaagtaatgtccctggtgcgaggaaacagagacaacctttctgtcttcagcctctgctattgagagcttcacacagacaatgagagagggtggatggtggtgagtggatcatttctttcagccacagtgtgtaacactcagcatttgaatgtttctcagaaaagaacatgtagtgacacagggcagaggcatccatggctggcgtctggaatattaaaccaaactctccccggtccttttttctccaacttttctcaaagagtttacatgtgcaagaaagtcatcgcaccaaaaaacctgtcaattatgccattgcaatatttcagaagctttaactgaagtgtcaggttcctcgtgagaaacagcacacgttagaggctttgagagaaggcctagttctgtcatgagtagtcggcctcgtgtctgtcctcccatcttggaacaaccttatcaacaggccgcactgcagaaatgatgttttatgaaaaccaatgagctgctgccactccagcaagggaaataatgcagtttcctgtcttatttaagaaaaaagagaaggctctcttttctcccttgtcattgccgttcttttcctttacacgcaaagattttttaactattgcagattttcatcccatttctactgcttgattgaccatcaactccatcctatcgagatttattt

SEQ ID NO: 184255 - DNA, 1363 bp, Homo Sapiens
ttgggttctctagcagtctagaaatggatacagacatttctctgttcttcaagggtgataggaaccattatgttgagcccaaaatggaagtaataataaatgcctcctggaggctgtgggtgtgggggattctgtatctggattccgtatcactccaactggaggctgtgggtgtgggggattctgtatctggattccgtatcactccaagtggaggctggcaggtttttctgcaagatggtccagaatctaaaatgtcccattaatctggtcacttgggtttggctctgctgtatccatctatagtggtagagacccaccagggctcaagtggagtccatcatcctcccacgggggcctgttcttagcactgagttgatcgctccatgggggagagatcagacattccttatcagagatgatgtgaccttttctgactctgcccagtctctatgaatgttatggcctagggaagaatcatgaaactctttagcttgattagatggtaaacagtgttaacccatcctttactacagaggcatctgggtttgaatgttacctggggttctctctattgagttgagccccttcttcctttagtgggttttggacatcttctggcaagtgtccagatgccagaaccttcttttcctctagaagggatggtgcttggtaaccttaccttttaaaagctgggtctgtgacctggtcttcccatccctgcattcctgtctggaaccagtgaatgcattagaaccttccataggaaaagaaaaggggctgagttccattctgggtttgctgtagtttggttgggattattgttggcattacagatgtaaaagattgactagcccataggccaaaggcctgttctagttgaccaagtttcaagtaggattaagaggttggttgaggggtgcagtttctggtgtaggccaggtaggtagaaagtgaggaacagggttgcctcttggctgggtggagtctctgaaatgttagaagaagcgctgaagccttgattgatagttctgccccttgttgccctggggcttatctgattatgggacgagggtagaaagtaagaagcacttttgaatttgtggggtagaacttcaacaataagtcagttctagtggctgtcgcctggggactagtgagaaagctactcttctccctcttccctctttctccccatggccccactgcagaattaaagaaggaagaagggaaggcggaggagtctataagaaggaatcatgatttctatttagcagattggatgggcaggtggagaatgcctgggggtagaaatgttagatcttgcaacatcagatccttggaataaagaagcctctctgtg

SEQ ID NO: 184256 - DNA, 2670 bp, Homo Sapiens
  misc_feature (2272)..(2290): n is a, c, g, or t
ttgtacaaaaaagttgggaaatgctttcggtaggcactccacggctgtgaagatggcggcggctgcgtggcttcaggtgttgcctgtcattcttctgcttctgggagctcacccgtcaccactgtcgtttttcagtgcgggaccggcaaccgtagctgctgccgaccggtccaaatggcacattccgataccgtcggggaaaaattattttagttttggaaagatcctcttcagaaataccactatcttcctgaagtttgatggagaaccttgtgacctgtctttgaatataacctggtatctgaaaagcgctgattgttacaatgaaatctataacttcaaggcagaagaagtagagttgtatttggaaaaacttaaggaaaaaagaggcttgtctgggaaatatcaaacatcatcaaaattgttccagaactgcagtgaactctttaaaacacagaccttttctggagattttatgcatcgactgcctcttttaggagaaaaacaggaggctaaggagaatggaacaaaccttacctttattggagacaaaaccgcaatgcatgaaccattgcaaacttggcaagatgcaccatacatttttattgtacatattggcatttcatcctcaaaggaatcatcaaaagaaaattcactgagtaatctttttaccatgactgttgaagtgaagggtccctatgaatacctcacacttgaagactatcccttgatgatttttttcatggtgatgtgtattgtatatgtcctgtttggtgttctgtggctggcatggtctgcctgctactggagagatctcctgagaattcagttttggattggtgctgtcatcttcctgggaatgcttgagaaagctgtcttctatgcggaatttcagaatatccgatacaaaggagaatctgtccagggtgctttgatccttgcagagctgctttcagcagtgaaacgctcactggctcgaaccctggtcatcatagtcagtctgggatatggcatcgtcaagccacgccttggagtcactcttcataaggttgtagtagcaggagccctctatcttttgttctctggcatggaaggggtcctcagagttactggggcccagactgatcttgcttccttggcctttatccccttggctttcctagacactgccttgtgctggtggatatttattagcctgactcaaacaatgaagctattaaaacttcggaggaacattgtaaaactctctttgtatcggcatttcaccaacacgcttattttggcagtggcagcatccattgtgtttatcatctggacaaccatgaagttcagaatagtgacatgtcagtcggactggcgggagctgtgggtagacgatgccatctggcgcttgctgttctccatgatcctctttgtcatcatggttctctggcgaccatctgcaaacaaccagaggtttgccttttcaccattgtctgaggaagaggaggaggatgaacaaaaggagcctatgctgaaagaaagctttgaaggaatgaaaatgagaagtaccaaacaagaacccaatggaaatagtaaagttaacaaagcacaggaagatgatttgaagtgggtagaagagaatgttccttcttctgtgacagatgtagcacttccagcccttctggattcagatgaggaacgaatgatcacacactttgaaaggtccaaaatggagtaaggaatgggaagatttgcagttaaagatggctaccatcagggaagagatcagcatctgtgtcagtcttctgtacggctccatgggattaaaggaagcaatgacatcctgatctgttccttgatctttgggcattggagttggcgagaggtgtcagaacaaagagaacatcttactgaaaacaagttcataagatgagaaaaatctacgagcttcttatttacaacactgctgccccctttcctcccagactctgacatggatgttcatgcaacttaagtgtgttgttcctgaactttctgtaatgtttcattttttaaatctgacaaactaaaaagtttaacgtcttctaaaagattgtcatcaacaccataatatgtaatctccaggagcaactgcctgtaatttttatttatttagggagttacataggtgatgggggaaattgttaactacctttcattttcctgggaagtcaaggttacatcttgcagaggttgttttgagaaaaaagggcccttctgagttaaggagccatagttctatcaatgatcnnnnnnnnnnnnnnnnnnngagaaactgttacagtatgattcagatcatttaaaaaagcaaaatcaagtgcaattttgtttacaaatggtgtatattaaagatttttctatttcagatgtactttaaagagaaatattagcttaactcttttgacatctgctattgtgacacatcccattgctggcaatgtggtgcacactccgaaacttttaactactgttttgtaagcctccaagggtggcattgcaggtccttaggcaatgttttgtttgcctttatgcagagaggtgctccaagtgctgtgattgagcaccgtgctagaggaactgtaatgcttcagaagttgtagcttatacaaaggaaacaggtcctgctggcttaatttaacagttattgca

SEQ ID NO: 184257 - DNA, 1485 bp, Homo Sapiens
  misc_feature (877)..(895): n is a, c, g, or t
ttggctatgctgaaagaaagctttgaaggaatgaaaatgagaagtaccaaacaaccagaggtttgccttttcaccattgtctgaggaagaggaggaggatgaacaaaaggagcctatgctgaaagaaagctttgaaggaatgaaaatgagaagtaccaaacaagaacccaatggaaatagtaaagttaacaaagcacaggaagatgatttgaagtgggtagaagagaatgttccttcttctgtgacagatgtagcacttccagcccttctggattcagatgaggaacgaatgatcacacactttgaaaggtccaaaatggagtaaggaatgggaagatttgcagttaaagatggctaccatcagggaagagatcagcatctgtgtcagtcttctgtacggctccatgggattaaaggaagcaatgacatcctgatctgttccttgatctttgggcattggagttggcgagaggtgtcagaacaaagagaacatcttactgaaaacaagttcataagatgagaaaaatctacgagcttcttatttacaacactgctgccccctttcctcccagactctgacatggatgttcatgcaacttaagtgtgttgttcctgaactttctgtaatgtttcattttttaaatctgacaaactaaaaagtttaacgtcttctaaaagattgtcatcaacaccataatatgtaatctccaggagcaactgcctgtaatttttatttatttagggagttacataggtgatgggggaaattgttaactacctttcattttcctgggaagtcaaggttacatcttgcagaggttgttttgagaaaaaagggcccttctgagttaaggagccatagttctatcaatgatcnnnnnnnnnnnnnnnnnnngagaaactgttacagtatgattcagatcatttaaaaaagcaaaatcaagtgcaattttgtttacaaatggtgtatattaaagatttttctatttcagatgtactttaaagagaaatattagcttaactcttttgacatctgctattgtgacacatcccattgctggcaatgtggtgcacactccgaaacttttaactactgttttgtaagcctccaagggtggcattgcagggtccttaggcaatgttttgtttgcctttatgcagagaggtgctccaagtgctgtgattgagcaccgtgctagaggaactgtaatgcttcagaagttgtagcttatacaaaggaaacaggtcctgctggcttaatttaaacagttattgcatgaagtagcgtggaggccctggactgctgctcgttctttaggatggactgttctggtatctggtattgttttagagactgttaataagggacatcacaaggtgatgggattcatttgaagcactctatttctgttttaatggttttatccaattttgccttcccaagatttttgttctacataaaaagttcatgccactttttaatat

SEQ ID NO: 184258 - DNA, 1190 bp, Homo Sapiens
  misc_feature (857)..(869): n is a, c, g, or t
ttggaccagttcgtttcctctgcccactaatccctgcgcaggacttcccagaaccccttttgtctctgggaccagacttgttggtgctaccccttactcccctctgcaacccccattttgggagttgaccccagcaatgaccttggtggcacgctcactccctcattctctcgtttcccctttagctccctttcaccatttattcagctacatcatccctctattaaccccaccccatcaggcacgtgtgcaaacctcttgactttaccccacattactgaaaccaaaatatatttgcttcatctgcccctactaaccatccccctgcctgctgcctcagtcctgcaacctaaagctgtagtcgcctccaatagccatccatgccatccctgcctgtgcctagatcagaggcccagagggccccctcagttgcctgagcagctggtggcttccagggagcatctctgctctacccctgccccatgcctgccctgcgtgctggttccttcagacccctaaccctactaaccagcaggctcatctcacctccaggcctgaaacatttcttttctttcttttttcctcccccaattttccctgggcctggagcagccaagaatttcgggctgtttgactttctgtgagcccccagcgaggggaggcccagcctccgaggagaccaggaaccctgcttcagcagcccctcagggcttcccaaggatgtccagcccccacacccacacgttaacataatgagtcactaggcttctggggagggcccaacttcacccatgcatgagagactctcctcctttccagagagaatcggatcgcaccacgtgtggcagcctgcggcnnnnnnnnnnnnncctctttagctctctttatctttctctctcactcatgtatgcatacatgcacagagatgcatacacaggtgcctatgcaagttcatttaagcctcaagctggtccctgcccaaagggctggaccctcctaatcctctcctaggttgtggggctggtcccctgacacccttctccccttcctggtagaccttaacctcgcacacatgtccccagcattttctcacctggataaagcccataagctgggtctcaggctggggctcagcaaaggactcgccttgcaaccgacaggcaattccctcccccacacacaacctcccc

SEQ ID NO: 184259 - DNA, 1453 bp, Homo Sapiens
  misc_feature (464)..(747): n is a, c, g, or t
ttgtacaaaaaagttggccttaaacctcgcctcctacaataagataccccagcattttctcacctggataaagcccataagctgggtctcaggctgggctcagcaaaggactcgccttgcaaccgacaggccattcccacccccacacacaacctcccctgttttcacattcaccatggcatcccagagcaaggacacaggagcccacaggccagttgaggttgggcaaggagacttccaggacttccagacagagtaccaggttttatttttcaccttattctctactttaaacaaatcataactttctctttaagcctctgctataaattctcctggctctcctgggcttccatattttgggggctggggtgtcaaaagtgagatgaagttcttagctccaggttttggggtaaaccaaggtaggaacattttggcatttatttcaattaacaatacttccnnnnnnnnnnnnnnnnnnnnnnnnnnnnnnnnnnnnnnnnnnnnnnnnnnnnnnnnnnnnnnnnnnnnnnnnnnnnnnnnnnnnnnnnnnnnnnnnnnnnnnnnnnnnnnnnnnnnnnnnnnnnnnnnnnnnnnnnnnnnnnnnnnnnnnnnnnnnnnnnnnnnnnnnnnnnnnnnnnnnnnnnnnnnnnnnnnnnnnnnnnnnnnnnnnnnnnnnnnnnnnnnnnnnnnnnnnnnnnnnnnnnnnnnnnnnnnnnnnnnnnnnnnnnnnnnnnnnnnnnnnnngcaaactaacaaagaaaaacaatacttcctggggttttggtgtgcagagggctttgttggaagtgtgactcaatcttgcctgccttctgggagctctagaattgttcccaacccagtccatggcttctagccaccactacagggctgtttcatgtacttctctctctgactctgtcttgtccgactctcttgagaatttctcaacgattgctcatgcctgtcagtatcagtgcttccatcgttccatctttgattcacttctctttcctttctatttactcccaaaatggagtcattcatcctgatgtcctcaattgctgctgatatgctggtgattcccaaatacatagctccaacccccaacttcccccagactttagatctgtattggtattacctactggacatctctatggacagttccgtatagactcaactcatctgcccaaccaagtatgttcctcctgaattcctctcctggttacttcatcacaatctacataggctcaccagctagaaacatttatgagcttacattccttcttcccatatcttatcagcatatcatatccatttcactccaacactctgtcttgaatttggccctccctctcccctctctactttaattcattggagcatgggatttggagttaggtggttttgggtttgaattccagctctactatttttggttgtgtgatag

SEQ ID NO: 184260 - DNA, 1339 bp, Homo Sapiens
ttggcaggccaccagaaccagcagtcactgccaggaggcctggcagggcaggaggtcatggtggagaccgtgactatgacatgaccatatagtgaccctggccaacgtgggcacacaaggccagaactgctcctgcccagaatcagggacagggcctcgggcccagctgacactgcaccccccaactctcctttgcagctttctgtatgagcccaatagccaagggtacaagtactaccgacagaagctggaggagttccggaaagccaaggccagctccacaggcagcttcacagcacctgatcccggcctgaagcgcaagtcccctcctgaggccctgtcagggtccttacccccagccaccacctgccccgcctcgtccacgcctgcgcccactatcatccctgctccagctgcccccgggaagccagcctccgcagccaccgtgaagaggaagcggaagagccggtgggggcctgaagaggataaggtagagctcccacctgctgaactggtgcagagggacgtggatgcctctccctcgcctctgtcagttcaggacctcaaggggctcggctatgagaaggggaagcctgtgggtctagtgggcgtcacagagctttcagacgcccagaagaagcagctgaaggagcagcaggagatgcagcagatgtacgacatgatcatgcagcacaagcgggccatgcaggacatgcagctgctgtgggagaaacagtccaacagcaccagcacggctatgacagtgatgaggaggtggacagcgagctgggcacctgggagcaccagctgcggcgcatggagatggataagaccagggaatgggccgagcagctgacaaagatgggccggggcaagcacttcatcggagacttcctgcctccagacgagctggaaaagtttatggagaccttcaaggccctgaaggagggccgtgagcctgactactcagagtacaaggagttcaagctgactgtggagaacatcggctaccagatgctgatgaagatgggctggaaggagggcgaggggctgggctcagagggccagggcatcaagaaccctttgaacaagggcaccaccacagtggacggcgctggcttcggcattgaccggccggcggagctctccaaggaggacgacgagtatgaggcgttccgcaagaggatgatgctggcctaccgcttccggcccaaccccctgaacaatcccagacggccttactactgagtgttctggaaatacatactttctgaaagaccaaccgtccctggactgtgaaatgttccggcctgcatttctgcccaccccttccgttgtc

SEQ ID NO: 184261 - DNA, 997 bp, Homo Sapiens
ctttgtacaaaaaagttggctgccttttaaccccttaagtgatttggaagtattcactttaacattggttttaatcctacttttacttttttgaagtaccctatgatgagaggacctgatcctgctgctgctccatatagtactcagaaatcatctgttctacctctttatgaaaatacttttcaggagctccaggtaatgaggcggagcctgaatttgtttagaacacaaatgatggatttagaattggcaatgctgcgtcagcaaaccatggtttatcatcatatgactgaggaggagaggtttgaagttgatcagctccagggtttgagaaattcagtccgaatggaacttcaggacctggaactgcagctggaggagcgcctgctgggcctggaggagcagcttcgtgctgtgcgcatgccttcacccttccgctcctccgcactcatggtcactgaactgatgcaggagcagtcatacctgaagtctgaattgggcctgggacttggagaaatgggatttgaaattcctcctggagaaagctcagaatctgttttttcccaagcaacatcagaatcatcttctgtatgttctggtccctctcatgctaacagaagaactggagtaccttctactgcctcagtgggcaaatccaaaaccccattagtggcaaggaagaaagtgttccgagcatcggtggctctaacgccaacagctccttctagaacaggctctgtgcagacacctccagatttggaaagttctgaggaagttgatgcagctgaaggagccccagaagttgtaggacctaaatctgaagtggaagaaggcatggaaaactcccatcaatgccagctgctgaggaaatgcataaaaatgtggagcaagatgagttgcagcaagtcatacgggagattaaagagtctattgttggggaaatcagacgggaaattgtaagtggacttttggcagcagtatcttcaagtaaagcgtc

SEQ ID NO: 184262 - DNA, 1023 bp, Homo Sapiens
ttggggtagttagagctgtaacatgaccacgtttttaacagaaatctgtctttattgtgttagacagattggttcatttgggggcaaaagcactatgagtaactatttttcactagttactcttccttacaagtgatttggacactttggtggtaacaagtaaaatttcatcctactatgtattctgtttacctgttttgttgcttcatctcaataggaatttaaattttacttaccatttttgcaaataaaattgagtagttattaaattaatggaatagatttatgtctttacaaattacatgattttaggcaataatgacaaccaggactttaacctttttagctaccaatcttaattccaagagagaagaataacatttttttatgatctccaggtcactgaactgatgcaggagcagtcatacctgaagtctgaattgggcctgggacttggagaaatgggatttgaaattcctcctggagaaagctcagaatctgttttttcccaagcaacatcagaatcatcttctgtatgttctggtccctctcatgctaacagaagaactggagtaccttctactgcctcagtgggcaaatccaaaaccccattagtggcaaggaagaaagtgttccgagcatcggtggctctaacgccaacagctccttctagaacaggctctgtgcagacacctccagatttggaaagttctgaggaagttgatgcagctgaaggagccccagaagttgtaggacctaaatctgaagtggaagaagggcatggaaaactcccatcaatgccagctgctgaggaaatgcataaaaatgtggagcaagatgagttgcagcaagtcatacgggagattaaagagtctattgttggggaaatcagacgggaaattgtaagtggacttttggcagcagtatcttcaagtaaagcgtctaattctaagcagattatcattaacagaattataggttggcatggatcctattagctgtgtatactggaattatcaatga

SEQ ID NO: 184263 - DNA, 1586 bp, Homo Sapiens
aattgatgagcaatgctttcttttaaggggcaactttgtacaaaaaagttggcacccttcccctcctccgcactcatggtcactgaactgatgcaggagcagtcatacctgaagtctgaattgggcctgggacttggagaaatgggatttgaaattcctcctggagaaagctcagaatctgttttttcccaagcaacatcagaatcatcttctgtatgttctggtccctctcatgctaacagaagaactggagtaccttctactgcctcagtgggcaaatccaaaaccccattagtggcaaggaagaaagtgttccgagcatcggtggctctaacgccaacagctccttctagaacaggctctgtgcagacacctccagatttggaaagttctgaggaagttgatgcagctgaaggagccccagaagttgtaggacctaaatctgaagtggaagaagggcatggaaaactcccatcaatgccagctgctgaggaaatgcataaaaatgtggagcaagatgagttgcagcaagtcatacgggagattaaagagtctattgttggggaaatcagacgggaaattgtaagtggacttttggcagcagtatcttcaagtaaagcgtctaattctaagcaagattatcattaaacagaaattataggttggcatggatcctattagctgtgtaatactggaattatcaatgatatgcactggtggaggtgttatttgtgctttagaagatacttgctgttgagctgggctactgtatacagtgtacaatgtgtatttcttcaaccatatattttaaaaagacgtacatagaaacttaggcactttgctatttcttttctaaactatcaaaaactctagcagtttgaaaagcctaatatttatttgtatgtcaatatttttcatttgattccctattagaattaattttaaaacttgaagacttccagacttatccaacttataaataacatatttcttcagactaacatcttaaaacactgacctctatgaggtatttactgtgcaataactgattcatttttttcagagcttgaagcatccaatgatttttccctccactgctgttaattaatgtcacttccaagaagaaaaactgttctgttgtaaaaaatataattgctcttaattcttggggaggttactaatagcagtaggatagaattttatgaggttacctacaactacttaatgtacttacactgtaagccttgttgctttacccaagacaaatgtaattttatcattgcttatgtagtatttttcttttggaaatgtgccttatgttaaacactatgtacttttactttttgcattgtccagacttctttattagatggagatgtttctttttctgtcttctagactaaatagagtatcatccaaataatggggcctatgacttgaatgaatagaaatgaataagctggtgtttgttttttcaaaatggaagtaatttagatttgttctcctcatacataaaatgattttagttcagttttaaccagtgaaaactttgtttttatgaaaaaaaggaaaatggtttcccattt

SEQ ID NO: 184264 - DNA, 1106 bp, Homo Sapiens
ttgggaatttgtttagaacacaaatgatggatttagaattggcaatgctgcgtcagcaaaccatggtttatcatcatatgactgaggaggagaggtttgaagttgatcagctccagggtttgagaaattcagtccgaatggaacttcaggacctggaactgcagctggaggagcgcctgctgggcctggaggagcagcttcgtgctgtgcgcatgccttcacccttccgctcctccgcactcatgggaatgtgtggcagtagaagcgctgataacttgtcatgcccttctccattgaatgtcactgaactgatgcaggagcagtcatacctgaagtctgaattgggcctgggacttggagaaatgggatttgaaattcctcctggagaaagctcagaatctgttttttcccaagcaacatcagaatcatcttctgtatgttctggtccctctcatgctaacagaagaactggagtaccttctactgcctcagtgggcaaatccaaaaccccattagtggcaaggaagaaagtgttccgagcatcggtggctctaacgccaacagctccttctagaacaggctctgtgcagacacctccagatttggaaagttctgaggaagttgatgcagctgaaggagccccagaagttgtaggacctaaatctgaagtggaagaagggcatggaaaactcccatcaatgccagctgctgaggaaatgcataaaaatgtggagcaagatgagttgcagcaagtcatacgggagattaaagagtctattgttggggaaatcagacgggaaattgtaagtggacttttggcagcagtatcttcaagtaaagcgtctaattctaagcaagattatcattaaacagaaattataggttggcatggatcctattagctgtgtaatactggaattatcaatgatatgcactggtggaggtgttatttgtgctttagaagatacttgctgttgagctgggctactgtatacagtgtacaatgtgtatttcttcaaccatatattttaaaaagacgtacatagaaacttaggcactttgctatttctttttctaaactatcaaaaactctagcagtttggaaa

SEQ ID NO: 184265 - DNA, 2584 bp, Homo Sapiens
ttggagcagatgttcatcttttagatgtaaaggaaaaacttaagaaggagaacttttatctcagcatttctgttcaaagtacggagggagaagctcctcatgttccagccacttaccagctaggtcttacgaagtcgaaaagagatcatctgttacgtactgcaagtcagcattccgatagcagtggttttgctgaagattctacagactgcctatcccttaatcatcttcaggttcaggagtccttgcaggctatggggagtagtgctgatagttgtgacagtgagacaacagttacgtcacttggtgaagaccttgccacaccaacagcacaagaccagccttattttaatgaatcagaggaggagtctcttgtccctcttcagaagggactagagaaggcagcagcagttgcaaacaaaagaaaatcaggtagccaggatttccctcagtgcaacaccattgagaatacaggaactaaacagtccacctgtagtccaggggatcatatcattgaaattactgaagtggaagaggatttgtttccagcagagacagtagagctactgagggaagcaagtgctgaaagtgatgtgggtaaaagcagtgaaagtgaatttactcagtataccacacaccatattctgaaatcattggcttctattgaagctaaatgcagtgatatgagctctgaaaatacaactgggcctccctcttccatggacagagttaatacagctttgcaaagagctcaaatgaaggtttgcagtctgtctaatcaaaggatggggcgtagcctgctaaaatcaaaagatttgttaaaacaaaggtacttatttgcaaaagctggctatcctctaagaaggtctcagtctttaccaaccaccttattgagcccagtaagggttgtgtcctctgtcaatgttcgattatctccaggaaaagagaccagatgcagcccaccttccttcacctataagtacacacctgaagaggagcaggaattggaaaagcgggtgatggaacatgatggtcagtctttagttaaatcgaccattttcatctctccatcatctgtgaagaaagaagaagccccccagagtgaggcgccgcgggtggaggaatgccatcatggaaggactcctacctgttcacggcttgctccaccaccaatgtctcagtctacctgttcccttcattccatccactctgagtggcaagaaaggcccctgtgtgagcacacaagaactctgagcactcacagtgttcccaacatatcaggggctacttgtagtgccttcgcttcccctttcgggtgtccttactcacatagacatgccacctacccttaccgagtgtgctctgtgaatcctccttcagccatagaaatgcagttgcgaagagtattacatgatattagaaactcactgcagaatctttcacagtaccctatgatgagaggacctgatcctgctgctgctccatatagtactcagaaatcatctgttctacctctttatgaaaatacttttcaggagctccaggtaatgaggcggagcctgaatttgtttagaacacaaatgatggatttagaattggcaatgctgcgtcagcaaaccatggtttatcatcatatgactgaggaggagaggtttgaagttgatcagctccagggtttgagaaattcagtccgaatggaacttcaggacctggaactgcagctggaggagcgcctgctgggcctggaggagcagcttcgtgctgtgcgcatgccttcacccttccgctcctccgcactcatgggaatgtgtggcagtagaagcgctgataacttgtcatgcccttctccattgaatgtaatggaaccagtcactgaactgatgcaggagcagtcatacctgaagtctgaattgggcctgggacttggagaaatgggatttgaaattcctcctggagaaagctcagaatctgttttttcccaagcaacatcagaatcatcttctgtatgttctggtccctctcatgctaacagaagaactggagtaccttctactgcctcagtgggcaaatccaaaaccccattagtggcaaggaagaaagtgttccgagcatcggtggctctaacgccaacagctccttctagaacaggctctgtgcagacacctccagatttggaaagttctgaggaagttgatgcagctgaaggagccccagaagttgtaggacctaaatctgaagtggaagaagggcatggaaaactcccatcaatgccagctgctgagaaatgcataaaaatgtggagcaagatgagttgcagcaagtcatacgggagattaaagagtctattgttggggaaatcagacgggaaattgtaagtggacttttggcagcagtatcttcaagtaaagcgtctaattctaagcaagattatcattaaacagaaattatagttggcatggatcctattagctgtgtaatactggaattatcaatgatatgcactggtggaggtgttatttgtgctttagaagatacttgctgttgagctgggctactgtatacagtgtacaatgtgtatttcttc

SEQ ID NO: 184266 - DNA, 876 bp, Homo Sapiens
ctacaacttctggggctcttcagctgcatcaacttcctcagaactttccaaatctggaggtgtctgcacagagctgttctagaaggagctgttggcgttagagccaccgatgctcggaacactttcttccttgccactaatggggttttggatttgcccactgaggcagtagaaggtactccagttcttctgttagcatgagagggaccagaacatacagaagatgattctgatgttgcttgggaaaaaacagattctgagctttctccaggaggaatttcaaatcccatttctccaagtcccaggcccaattcagacttcaggtatgactgctcctgcatcagttcagtgaccatgagtgcggaggagcggaagggtgaaggcatgcgcacagcacgaagctgctcctccaggcccagcaggcgctcctccagctgcagttccaggtcctgaagttccattcggactgaatttctcaaaccctggagctgatcaacttcaaacctctcctcctcagtcatatgatgataaaccatggtttgctgacgcagcattgccaattctaaatccatcatttgtgttctaaacaaattcaggctccgcctcattacctggagctcctgaaaagtattttcataaagaggtagaacagatgatttctgagtactatatggagcagcagcaggatcaggtcctctcatcatagggtactgtgaaagattctgcagtgagtttctaatatcatgtaatactcttcgcaactgcatttctatggctgaaggaggattcacagagcacactcggtaagggtaggtggcatgtctatgtgagtaaggacacccgaaaggggaagcgaagccaacttttttgtacaaa

SEQ ID NO: 184267 - DNA, 1147 bp, Homo Sapiens
ttggcgtttattgtttttacctgtagccaaccacctccatgaaagtgatgctcaaattgaaaactgcaataatatcttggccaaagagagaagattacagtttcatcagaaagggagaagtatgaattccactggatctgggaaaagtagtgggacagtttcaagtgtttcagaattgttggaactttatgaggaagatcctgaagaaattctttataatcttggatttggacgtgatgaaccagatattgcttctaaaattccttccagattttttaattcatcatcctttgccaaagggatagatattaaagtatttttgagtgctcagatgcaacggatggaagtagaaaacccaaattatgctttaacaagccgttttcgtcaaattgaagtgcttactactgtggccaatgcgttttcttctttatattctcaagtctccgggacgcccctgcagagaattggaagtatgtcctcagtgacctctaacaaggagacagacccacctccacctttaactcgaagtaacactgcaaatcgtttaatgaaaacactctcaaaactgaatttatgtgttgataaaacagagaaaggagaaagtagtagtccttctccatcagctgaaaaaggaaagattctaaatgtttcagtgattgaagaaagtggcaataaaaacgatcaaaagtctcaaaaaattatgaagaagaaagagtcatcttctatgttggctacagttaaagaagaagtctctggtagttcagcagctgttacggagaatgctgatagtgatagaatttctgatgaagcaaatagtaattttaaccaaggaactgaaaatgaacaaagtaaagaaactcaaagtcatgagagtaaactgggtgaggaatctggtattgtagaatccaaattagatagtgatttcaacatatccagccacagtgagctggaaaatagcagtgagctgaaaagtgtccatatatccacacctgaaaaagagccttgtgcaccactgacaataccatccataagaaatataatgacacagcagaagggactccttcgaaatggaagaggttcaaagtacggagggagaagctcctcatgttccagccacttacccagctaggtcttacgaagtcgaaaa

SEQ ID NO: 184268 - DNA, 1597 bp, Homo Sapiens
  misc_feature (1489)..(1519): n is a, c, g, or t
ttgggttccgcgcgccggagcgcgctagccgcattgcgagccgaacccgggagctggcgccatggtgctgttgcacgtgctgtttgagcacgcggtcggctacgcgctgctggcgctgaaggaagtggaggagatcagtctgctgcagccgcaggtggaggagtccgtgctcaacctgggcaaattccacagcatcgttcgtctggtggccttttgtccctttgcctcatcccaggttgccttggaaaatgccaacgccgtgtctgaaggggttgttcatgaggacctccgcctgctcttggagacccacctgccgtccaaaaagaagaaagtactcttgggagttggggatcccaagattggtgccgcaatacaggaggagttagggtacaactgccagactggaggagtcatagctgagatcctgcgaggagttcgtctgcacttccacaatctggtgaagggtctgaccgatctgtcagcttgtaaagcacagctggggctgggacacagctattcccgtgccaaagttaagtttaatgtgaaccgggtggacaatatgatcatccagtccattagcctcctggaccagctggataaggacatcaataccttctctatgcgtgtcagggagtggtacgggtatcactttccggagctggtgaagatcatcaacgacaatgccacatactgccgtcttgcccagtttattggaaaccgaagggaactgaatgaggacaagctggagaagctggaggagctgacaatggatggggccaaggctaaggctattctggatgcctcacggtcctccatgggcatggacatatctgccattgacttgataaacatcgagagcttctccagtcgtgtggtgtctttatctgaataccgccagagcctacacacttacctgcgctccaagatgagccaagtagcccccagcctgtcagccctaattggggaagcggtaggtgcacgtctcatcgcacatgctggcagcctcaccaacctggccaagtatccagcatccacagtgcagatccttggggctgaaaaggccctgttcagagccctgaagacaaggggtaacaccccaaaatatggactcattttccactccaccttcattggccgagcagctgccaagaacaaaggccgcatctcccgatacctggcaaacaaatgcagtattgcctcacgaatcgattgcttctctgaggtgcccacgagtgtattcggggagaagcttcgagaacaagttgaagagcgactgtccttctatgagactggagagataccacgaaagaatctggatgtcatgaaggaagcaatggttcaggcagaggaagcggctgctgagattactaggaagctggagaaacaggagaagaaacgcttaaagaaggaaaagaaacggctggctgcacttgccctcgcgtcttcagaaaacagcagtagtactccagaggagtgtgaggagacgagnnnnnnnnnnnnnnnnnnnnnnnnnnnnnnnccccaggaggttccttcagagaatggaatgggaagacccatctatctctttctccaaacccagaaaaagaaatctttt

SEQ ID NO: 184269 - DNA, 968 bp, Homo Sapiens
ttgggtctgtgtgcatatcagataaagcaaagaaaactaccaaaaccagagattatataatgatcaaaggtttaatccatgaagaagacagcaattttaaaagtgtattcaccaaaaaataaagcttcaaaatatgtgatgtgaaaactgccagaactaaggcgggccgggctcagaccagcgctgcctcaggatgtgaagtgtaacaagagggccaggggaggtggtgggggacaacatgggcctgtgaggcctgtgggtgcccgcgttccccagctccccccgcagcccgctccacagtggtccgctccggttggttgtcacgtgcgcattcgggttccagacccaaggctgcgtgttctccaccgcttgttgtggccagtgttactgcggtgaccgccagagcagcctcgacgctatggaggagcctggtgctacccctcagccctacctggggctggtcctggaggagctacgcagagttgtggcagcactacctgagagtatgagaccagatgagaatccttatggttttccatcggaactggtggtatgtgcagctgttattggattttttgttgttctcctttttttgtggagaagttttagatcggttaggagtcggctttacgtgggaagagagcaaaaacttggtgcaacgctttctggactaattgaagaaaaatgtaaactacttgaaaagtttagccttattcaaaaagagtatgaaggctatgaagtagagtcatctttagaggatgccagctttgagaagcggcagcagaagaagcacgaagtttggaggcaacctgtgaaaagctgaacaggtccaattctgaacttgaggatgaaatcctctgtctagaaaaagacttaaaacagagaaatctaaacattctcaacaagatgattgatggcggatatttcaaaaaagtatacagtctctagaagatgagtcaaaatccctc

SEQ ID NO: 184270 - DNA, 1847 bp, Homo Sapiens
  misc_feature (1580)..(1589): n is a, c, g, or t
ttgggtgaactttggtaaaagtccatctaatcctttacaagaactagggaacacgtgtcaaaagaatagcatttcttcaatcaacgtgcagacagatctgtcttatgcctcacaaaactttataccttctgcacagtgggccactgctgattcctctgtgtcgtcttgttctcaaactgatttgtcgtttgattctcaagtgtctcttcccattagtgttcacactcagacatttttgcccagctctaaggtaacttcatctatagctgctcagactgatgcatttatggacacctgtttccagtcaggtggggtctccagagaaactcaaaccagtgggatagaaagtccaacggatgaccatgtacagatggaccaagctggaatgtgcggagacatttttgagagtgttcattcatcatataatgttgctacaggtaacattataagcaacagtttagtagcagagacagtaactcatagtttgttacctcagaatgagcctaagactttaaatcaagatattgagaaatctgcaccaattataaatttcagtgcacagaatagtatgcttccttcacagaacatgacagataatcagacccaaaccatagatttattaagtgatttggaaaacatcttgtcaagtaatctgcctgcccagacattggatcatcgtagtcttttgtctgacacaaatcctggacctgacacccagctcccatctggcccagcccagaaccccggaatcgattttgatatcgaagagttcttttcggcctcaaatatccagactcaaactgaagagagtgaacttagcaccatgaccaccgagccagtcttggagtcactggacatagagactcaaacggacttcttactcgcagatacctctgctcagtcctatgggtgtaggggaaattctaacttcttaggccttgagatgtttgacacacagacacagacagacttaaactttttcttagacagtagccctcatctgcctctgggaagtattctgaaacactccagcttttccgtgagtactgattcatctgacacagagacccaaactgaaggagtctccactgctaaaaatatacctgctctagaaagcaaagttcagttgaacagtacagaaacacagaccatgagttctgggtttgaaaccctggggagcttgttcttcaccagcaacgaaactcagacagcaatggatgactttcttctggctgatctggcctggaacacgatggagtctcagttcagctctgtagaaacccagacttctgcggaaccacacacagtctccaacttctaaaactaacggtggagtccatgtgtgaaatggcatctaccatttcctctggattaaaactacggactggggacaacagtattaattcgattgaatgtggctgatgatgcagttgcttagcttctttgtgtttctttgccttttgtacttgtaaacagaaatttgcgtataaatgtgagtgtattataaagtttgagatgttgatctaaattgtttttgtgttgcctacatttgccttttcacagctagtcttttcatgttnnnnnnnnnntgtatttcatatctataaaacctatatagccatttagctgaagcccagcttaccaggttcaagggtacaaacttctcaaatcttcaaaacattttagtcaaagtgtaatatacttaaactgcacctaaaatatctttggcactgcttgttagaaattcctgattcctgttactaatcactaaagaaaccggatgctgccaccgtagatttaagcagtagtgcttccatgctcttaagactcctgctgcctggaccttc

SEQ ID NO: 184271 - DNA, 1623 bp, Homo Sapiens
actttgtacaaaaaagttggccgctcttgtccttcctcccgctttttcttctctctccttgcggtctgaagatgccctcggccaccagccacagcgggagcggcagcaagtcgtccggaccgccaccgccgtcgggttcctccgggagtgaggcggccgcgggagccggggccgccgcgccggcttctcagcaccccgcaaccggcaccggcgctgtccagaccgaggccatgaagcagattctcggggtgatcgacaagaaacttcggaacctggagaagaaaaagggtaagcttgatgattaccaggaacgaatgaacaaaggggaaaggcttaatcaagatcagctggatgccgtttctaagtaccaggaagtcacaaataatttggagtttgcaaaagaattacagaggagtttcatggcactaagtcaagatattcagaaaacaataaagaagacagcacgtcgggagcagcttatgagagaagaagctgaacagaaacgtttaaaaactgtacttgagctacagtatgttttggacaaattgggagatgatgaagtgcggactgacctgaaacaaggtttgaatggagtgccaatattgtccgaagaggagttgtcattgttggatgaattctataagctagtagaccctgaacgggacatgagcttgaggttgaatgaacagtatgaacatgcctccattcacctgtgggacctgctggaagggaaggaaaaacctgtatgtggaaccacctataaagttctaaaggaaattgttgagcgtgtttttcagtcaaactactttgacagcacccacaaccaccagaatgggctgtgtgaggaagaagaggcagcctcagcacctgcagttgaagaccaggtacctgaagctgaacctgagccagcagaagagtacactgagcaaagtgaagttgaatcaacagagtatgtaaatagacagttcatggcagaaacacagttcaccagtggtgaaaaggagcaggtagatgagtggacagttgaaacggttgaggtggtaaattcactccagcagcaacctcaggctgcatccccttcagtaccagagccccactctttgactccagtggctcaggcagatccccttgtgagaagacagcgagtacaagaccttatggcacaaatgcagggtccctataatttcatacaggattcaatgctggattttgaaaatcagacacttgatcctgccattgtatctgcacagcctatgaatccaacacaaaacatggacatgccccagctggtttgccctccagttcattctgaatctagacttgctcagcctaatcaagttcctgtacaaccagaagcgacacaggttcctttggtatcatccacaagtgaggggtacacagcatctcaacccttgtaccagccttctcatgctacagagcaacgaccacagaaggaaccaattgatcagattcacgcaacaatctctttaaatacagaccagactacagcatcatcatcccttcctgctgcgtctcagcctcaagtatttcacgctgggacaagcaaacctttacatagcagtggaatcaatgtaaatgcagctccattccaatccatgcaaa

SEQ ID NO: 184272 - DNA, 942 bp, Homo Sapiens
ttggagtccctcccgctcccggctctcgcctcactaggagcggctctcggtgcagcgggacagggcgaagcggcctgcgcccacggagcgcgcgacactgcccggaagggaccgccacccttgccccctcagctgcccactcgtgatttccagcggcctccgcgcgcgcacgatgccctcggccaccagccacagcgggagcggcagcaagtcgtccggaccgccaccgccgtcgggttcctccgggagtgaggcggccgcgggagccggggccgccgcgccggcttctcagcaccccgcaaccggcaccggcgctgtccagaccgaggccatgaagcagattctcggggtgatcgacaagaaacttcggaacctggagaagaaaaagggtaagcttgatgattaccaggaacgaatgaacaaaggggaaaggcttaatcaagatcagctggatgccgtttctaagtaccaggaagtcacaaataatttggagtttgcaaaagaattacagaggagtttcatggcactaagtcaagatattcagaaaacaataaagaagacagcacgtcgggagcagcttatgagagaagaagctgaacagaaacgtttaaaaactgtacttgagctacagtatgttttggacaaattgggagatgatgaagtgcggactgacctgaaacaaggtttgaatggagtgccaatattgtccgaagaggagttgtcattgttggatgaattctataagctagtagaccctgaacgggacatgagcttgaggttgaatgaacagtatgaacatgcctccattcacctgtgggacctgctggaagggaaggaaaaacctgtatgtggaaccacctataaagttctaaaggaaattgttgagcgtgtttttcagtcaaactactttgacagcacccacaaccaccagaatgggctgtg

SEQ ID NO: 184273 - DNA, 3080 bp, Homo Sapiens
ttgggcattaaagcccgttctgtttatagtatagatggtttatgtagtgtgggggacccatcatggtggtagtgagtggagcttttttgctctcctattccttctaatccttttttttctaccttaggtggtaaattcactccagcagcaacctcaggctgcatccccttcagtaccagagccccactctttgactccagtggctcaggcagatccccttgtgagaagacagcgagtacaagaccttatggcacaaatgcagggtccctataatttcatacaggattcaatgctggattttgaaaatcagacacttgatcctgccattgtatctgcacagcctatgaatccaacacaaaacatggacatgccccagctggtttgccctccagttcattctgaatctagacttgctcagcctaatcaagttcctgtacaaccagaagcgacacaggttcctttggtatcatccacaagtgaggggtacacagcatctcaacccttgtaccagccttctcatgctacagagcaacgaccacagaaggaaccaattgatcagattcaggcaacaatctctttaaatacagaccagactacagcatcatcatcccttcctgctgcgtctcagcctcaagtatttcaggctgggacaagcaaacctttacatagcagtggaatcaatgtaaatgcagctccattccaatccatgcaaacggtgttcaatatgaatgccccagttcctcctgttaatgaaccagaaactttaaaacagcaaaatcagtaccaggccagttataaccagagcttttctagtcagcctcaccaagtagaacaaacagagcttcagcaagaacagcttcaaacagtggttggcacttaccatggttccccagaccagtcccatcaagtgactggtaaccaccagcagcctcctcagcagaacactggatttccacgtagcaatcagccctattacaatagtcgtggtgtgtctcgtggaggctcccgtggtgctagaggcttgatgaatggataccggggccctgccaatggattcagaggaggatatgatggttaccgcccttcattctctaacactccaaacagtggttatacacagtctcagttcagtgctccccgggattactctggctatcaacgggatggatatcagcagaatttcaagcgaggctctgggcagagtggaccacggggagccccacgaggtcgtggagggcccccaagacccaacagagggatgccgcaaatgaacactcagcaagtgaattaatctgattcacaggattatgtttaatcgccaaaaacacactggccagtgtaccataatatgttaccagaagagttattatctatttgttctccctttcaggaaacttattgtaaagggactgttttcatcccataaagacaggactacaattgtcagctttctattacctggatatggaaggaaactatttttactctgcatgttctgtcctaagcgtcatcttgagccttgcacatgatactcagattcctcacccttgcttaggagtaaaacaatatactttacagggtgataataatctccatagttatttgaagtggcttgaaaaaggcaagattgacttttatgacattggataaaatctacaaatcagccctcgagttattcaatgataactgacaaactaaattatttccctagaaaggaagatgaaaggagtggagtgtggtttggcagaacaactgcatttcacagcttttccagttaaattggagcactgaacgttcagatgcataccaaattatgcatgggtcctaatcacacatataaggctggctaccagctttgacacagcactgttcatctggccaaacaactgtggttaaaaacacatgtaaaatgctttttaacagctgatactgtataagacaaagccaagatgcaaaattaggctttgattggcactttttgaaaaatatgcaacaaatatgggatgtaatccggatggccgcttctgtacttaatgtgaaatatttagatacctttttgaacacttaacagtttctttgagacaatgacttttgtaaggattggtactatctatcattccttatgacatgtacattgtctgtcactaatccttggattttgctgtattgtcacctaaattggtacaggtactgatgaaaatctctagtggataatcataacactctcggtcacatgtttttccttcagcttgaaagcttttttttaaaaggaaaagataccaaatgcctgctgctaccacccttttcaattgctatcttttgaaaggcaccagtatgtgttttagattgatttccctgtttcagggaaatcacggacagtagtttcagttctgatggtataagcaaaacaaataaaacgtttataaaagttgtatcttgaaacactggtgttcaacagctagcagcttatgtgattcaccccatgccacgttagtgtcacaaattttatggtttatctccagcaacatttctctagtacttgcacttattatcttttgtctaatttaaccttaactgaattctccgtttctcctggaggcatttatattcagtgataattccttcccttagatgcatagggagagtctctaaatttgatggaaatggacacttgagtagtgacttagccttatgtactctgttggaatttgtgctagcagtttgagcactagttctgtgtgcctatgaagttaatgctgcttattgtctcattctgacttcatggagaattaatcccacctttaagcaaaggctactaagttaatggtattttctgtgcagaaattaaattttattttccgcatttagcccaggaattcttccagtaggtgctcagctatttaaaaacaaaactattctcaaacattcatcattagacaactggagtttttgctggttttgtaacctaccaaaatggataggctgttgaacattccacattcaaaagttttgtagggtggtgggaaatgggggatcttcaatgtttattttaaaataaaataagaataaattcttgactt

SEQ ID NO: 184274 - DNA, 952 bp, Homo Sapiens
caactgcaggtgctgaggctgcctcttctcctcacacagcccattctggtggtgtgggtgctgtcaaagtagtttgactgaaaaacacgctcaacaatttcctttagaactttataggtggttccacatacaggtttttccttcccttccagcaggtcccacaggtgaatggaggcatgttcatactgttcattcaacctcaagctcatgtcccgttcagggtctactagcttatagaattcatccaacaatgacaactcctcttcggacaatattggcactccattcaaaccttgtttcaggtcagtccgcacttcatcatctcccaatttgtccaaaacatactgtagctcaagtacagtttttaaacgtttctgttcagcttcttctctcataagctgctcccgacgtgctgtcttctttattgttttctgaatatcttgacttagtgccatgaaactcctctgtaattcttttgcaaactccaaattatttgtgacttcctggtacttagaaacggcatccagctgatcttgattaagcctttcccctttgttcattcgttcctggtaatcatcaagcttaccctttttcttctccaggttccgaagtttcttgtcgatcaccccgagaatctgcttcatggcctcggtctggacagcgccggtgccggttgcggggtgctgagaagccggcgcggcggccccggctcccgcggccgcctcactcccggaggaacccgacggcggtggcggtccggacgacttgctgccgctcccgctgtggctggtggccgagggcatcgtgcgcgcgcggaggccgctggaaatcacgagtgggcagctgagggggcaagggtggcggtcccttccgggcagtgtcgcgcgctccgtgggcgcaggccgcttcgccctgccccgcggcaccggccaccaacttttttgtacaaagt

SEQ ID NO: 184275 - DNA, 1971 bp, Homo Sapiens
  misc_feature (1402)..(1424): n is a, c, g, or t
ttgggtcatagtcgacggcccagtggcggcggcgccatggcagggcttgcaggatccctgctgccttggtgatcccgggctgacagccagagagcacagcggctcagctcctggagagtgagggttgaagaaagcggagggcagccgcctgcgcccgctggctcccattaggtcggttcctgcagcggtgcccggcagccttggtgaaggccctgcccggcagagatcatgtattgcctccagtggctgctgcccgtcctcctcatccccaagcccctcaaccccgccctgtggttcagccactccatgttcatgggcttctacctgctcagcttcctcctggaacggaagccttgcacaatttgtgccttggttttcctggcagccctgttccttatctgctatagctgctggggaaactgtttcctgtaccactgctccgattccccgcttccagaatcggcgcatgatcccggcgttgtgggcacctaacggcctgccctgttagctttccaaggaagcagaagacgggaggggaggcattgacataggtcataaagcattgttggttcaaatcccgcagcctcgcgggtgtcacattcctgacggcgcctttttggcctgtgatgttttatccttacaatgtgaataatggcactgaccggtgcttttattgtaaagtcctatagtcgtgggtggtcttgtggttgtgtgtgttctgtccccatctaggtcctggctggccgcatgaccacccctctcgcctcattactgtgaggagtctgggtccatcctggtcagctgccccaatgtgacctggggcagataaaatgccagtctcattgtcacctctgtgacccctccttgtcagggtctccttccttcccagaatgttactgactcctcagtccctcttctggtttccctttatttctcttctacccttttccttttttggggagtacctgtccaagacagggctcatttttgcacttatctcgaatttgaagagattgctgacgcccgagagcctcgctttttcatccttctttccttgttcagcaggctagacagaaacatgtcttgactgttagttgtccacaaatcttcagtattttctccacttcatttttaagaaaggaagcaacagatagatgttgctctttcacctgggtgtctgggctcaagctttcccgcccagcctcacttcctttgcccttcctcctgcctttctcaactgtcccaaggagggggcctcattgtgtctcccgtgcatgctctgcagcattgaagtatggtgtgttcacgtagttctagcagtccccagctgagtgagtgggagagtacctgtgtgtttcgtaacggccttgatccccttgatagatgtttggatattttttgnnnnnnnnnnnnnnnnnnnnnnnacaaatacatgtgtatattccttttaaagaagctttatcgaacgtggtctgattttgaggtttagcaatatctagctatatatggtaggtgccgctacagtttttatttagcatggggattgcagagtgaccagcacactggactccgaggtggttcagacaagacagaggggagcagtggccatcatcctcccgccaggagcttcttcgttcctgcgcatatagactgtacgttatgaagaatacccaggaagactttgtgactgtcacttgctgctttttctgcgcttcagtaacaagtgttggcaaacaagactttctcctggcctctgcctgctggagatcagcatgcctgtcctttcaatctgatccatccatctctctcttgcctgaggcgaaagagaaatgggccaggcagagaacagaaactggaggcagtccatctaaggaataggactgtgaggccatacttgtgaaacgtctggactgctattctagagcttttatatggtgtgttccttgcacagctgtttgaaaatgtttaata

SEQ ID NO: 184276 - DNA, 785 bp, Homo Sapiens
  misc_feature (603)..(625): n is a, c, g, or t
ctttgtacaaaaaagttggggcagataaccatgcaaagtctcattgtcacctctgtgacccctccttgtcagggtctccttccttcccagaatgttactgactcctcagtccctcttctggtttccctttatttctcttctacccttttccttttttggggagtacctgtccaagacagggctcatttttgcacttatctcgaatttgaagagattgctgacgcccgagagcctcgctttttcatccttctttccttgttcagcaggctagacagaaacatgtcttgactgttagttgtccacaaatcttcagtattttctccacttcatttttaagaaaggaagcaacagatagatgttgctctttcacctgggtgtctgggctcaagctttcccgcccagcctcacttcctttgcccttcctcctgcctttctcaactgtcccaaggagggggcctcattgtgtctcccgtgcatgctctgcagcattgaagtatggtgtgttcacgtagttctagcagtccccagctgagtgagtgggagagtacctgtgtgtttcgtaacggccttgatccccttgatagatgtttggatattttttgnnnnnnnnnnnnnnnnnnnnnnnacaaatacatgtgtatattccttttaaagaagctttatcgaacgtggtctgattttgaggtttagcaatagctagctatatatggtaggtgccgctatgtttttaatttagcatggggattgcaaattgaccaccacactggaactccccaggtggttca

SEQ ID NO: 184277 - DNA, 1901 bp, Homo Sapiens
  misc_feature (531)..(555): n is a, c, g, or t
aaaaattttccaaagctcggcagtgtatgaaagaaaaaactgggaaagatacttggtttctgttaacttttgtgttgcttgcttaagtgattaaagccagtgcttggagccaagccttcatgccacgaacatgctccacagcctgccctttgctctcctgctcacactgaccaagaatgccgcgtgcttggcctactgaggtgaaaggacaattgaatgacaggtgggcaaagggagaacttccccttcttggtgcgaggaaagtcacaaatttaaaaatgttgcttccagcccagatcctaaatgctagttctcagcagctgcgtggcttaccgttcgccatttccaccaccgccagctgccagcaccgctacagatcacagagatgtgaacagacaatggaaagcactcttagccttgcagtggtctacattttttaggaaccaatatttcagcattctttattacccggcacgctgtgtcctttgcagagttcaagtttatgttactgccagggtcagacagtcattnnnnnnnnnnnnnnnnnnnnnnnnntctcgaactggatgcattaggaagctgctgtctgagtgtaggaatgtcttgctaagaaagcaatgtcttccttcatccttttctttcttccctctgcgtgtccttgtttttgtgtaatgcgggagagggttagagctatagagattatatatacactatccgtgcacattatatatatgtagatatacccctatcatgtcagagatctgcatgtcagtttttcagcaactaaggtgcctcatgttctgagttcagcagatataggaaccaagccgccccctcctgcacttgatgctcccacctttgttgtgcctcacttaaaatggtgcttttttcagttgtctgtcttttcttatgtttttatttgtaaggtgctgtatataagttgaatatattatgcacatatcctacccaatgggtagaacaaaaagttgttaatactgtaatataatgtatagatgataccaattttaacagaaatggcatagaatttgtgaatgcctatgtgctttgtcctcctttgtaaggaaatttgcaaatggatgcatacagattaaagtctatgtagtttattttcctattaaatatcaatattataacacaagagaaagaagtgtgaacaaacaagcaacagtttatgatgaccagcgtatatatagcaatggaaagttgcatctttgctgtgaaaacactttaaagaaaatactttttaaaaaatcccacagctttttggttgccactagacgcttcttattttaatcattttagtaatgctcagctggaccagtgttagttatatttgagtcagaaaaatgttgtttttcaacttgctttataatctcctgcatctatctcctgctgtagcatcacgaaggtgtcaggcaacagtgaaaagtgcacatttttgttgttgcagaaactgtgtcagaggaataagtaaatcagcctgcagcagaagactttgttcagctccagaggcatctgtgaccgtctgtgtccaagtctctctgtgcctttttcttttacaaactgaagctgtggagccaatgaagtaacagtagagattgtagggaaagaatacctcaggaaaaacaaatacacttacaagaagaccctgttcttagaaaatgtgtttagttatgggttagcactagaagagacttggctgtcagccagccgagtgaaggacctctcatccattcccattcatgtcccatcataatacggacccaaaaagcaaactcggttttgccatcagttagaaattacgttttggattgtatattgttacatctctcttccggcttagttttagtgtctgattgtgacctctgcattatcttcaa

SEQ ID NO: 184278 - DNA, 1774 bp, Homo Sapiens
actttgtacaaaaaagttgggaacaaacaagcaacagtttatgaccagcgtatatatagcaatggaaagttgcatctttgctgtgaaaacactttaaagaaaatactttttaaaaaatcccacagctttttggttgccactagacgcttcttattttaatcattttagtaatgctcagctggaccagtgttagttatatttgagtcagaaaaatgttgtttttcaacttgctttataatctcctgcatctatctcctgctgtagcatcatgaaggtgtcaggcaacagtgaaaagtgcacatttttgttgttgcagaaactgtgtcagaggaataagtaaatcagcctgcagcagaagactttgttcagctccagaggcatctgtgaccgtctgtgtccaagtctctctgtgcctttttcttttacaaactgaagctgtggagccaatgaagtaacagtagagattgtagggaaagaatacctcaggaaaaacaaatacacttacaagaagaccctgttcttagaaaatgtgtttagttatgggttagcactagaagagacttggctgtcagccagccaagtgaaggacctctcatccattcccattcatgtcccatcataatacggacacaaaaagcaaactcggttttgccatcagttagaaattacgttttggattgtatattgttacatctctcttccagcttagtttttagtgtctgactgtgacctctgcatttatcttcaaataccctaattttaaaacaaaagaacaagaaaagtttataacaccatgttcactaaaaccacggttgaatcttgggtgtgggcatcctttcgagtgttgtccataagagcagttcgtggaattttgcccatctgacccatattatcagcttattctgccaccagagtagagtctaataaattccaaagtttttatttgctccatggtgtatgttctgactttgaaaatgtcagattctataatcatacccctaacatccaggaaacaaatgacagattatctttaaactgaaattgactctacaatgcaacccttaatgctgaatggattaaaaaagtcagcccttttagtatctgtttgaaagggccgtaaaaagttgacacttttgttgttgtggatcctgcgtgtctagacccacgtgttgtttccatcgtatactgtagggtgcaccccttgggattcatcattaagaactgaggctcactgttgtcagaaacaaagctcccaccccccaggttcaaccttgtgggagaactgttgagcatgagaatgttctagactcagaggtactaaaatttgttaccacatcattgcttcctttctacaggacgaattgaggcttaaactttactgttaatgatactggttcattttaatgtgcttgttggtatgttgctatttttcatttcatagctttcaaaaatcatgctaattgtatacttgtctagtttaaggctattttaaaatatgtacaatactattcacagcatttagttcgtttaatttttattataaagcaatctactaaaaaagtacaactgtatttgaacttttcaatagttgtttgtgagctatgataatcaaaagtcattaaagtcttttttaacaaacattcgtgcttacttttcaacataattcccagttatatacagaaaaagatttccacctgtcacgtatctgcctcttttacctgagcaatggtgtagttcttaaacctaaaggtctgtaattgcaatacttttaaag

SEQ ID NO: 184279 - DNA, 1682 bp, Homo Sapiens
ccctggatgcagcgggcacactgctccagcacccgggcacgcccacattccagaagctccagcatagagtcagtcatgaacacttggtcctgccacagtgcatgggggctggcatggctcagccgagtcaccagttatggctgctgcttgagttaggaccggcagagtgtggagaatgtcctggatgagaggttcaagcgtggcttcctcgctgtgtggacaccattcagggagccctttggcaggatatgggctgtcggggccagaggatgtgcaaggatgaagccttcttagtaacttgtatcgttctacaaagtttcggtgagagacccggatggggaagccagcagcactgatatggatggtctccacgaggccacaggcctccagctggctcaggacctcctcttggagaaaggtctgcgcctggccctggctgttgggcttgatgcagcgaatgtagtggggcgtggtgctgtgtaggacctgcagaagctgctccagtgaggccttgaacttggacaccacggtcaacacaggggccctgctctggccagggggttcctcctgggtcttctctttggggttagtaggaaacagccccatgagcagggggtcctgggattgctgcaggagcctggtcagctcaggtgggatagggtccttgttcttctccaccaggcctgctgtgtggtaccgcacaggccccgcataatgcaccacaatgaagctgggctcccggctgagcttattgtggcccaggcaggggctgcctgccagggcagtctcaatgcgtgtctggagctgggctgcgctgctgggtcgattgaggcggcattcctcatttatgagggagcagatgctgatggggcttccctcaatgagatccaaacagggctggtggtcctggtagttgatgaatgaccactccaggccctcaactgcgtattcctcctgctgggcccttaggtagtgagccacaaaatgctgctgcagcttctcattggcgtagttgatgcacaactgttccagactgttgtcaggaaatgattcaaatccatacacatccagcaggcctatgaaagtggtccacgagtcggtgtctgcacagatgctgctgttgatcactgataccagccagtcaaacaaccgcgcatagatcagtttggccaggcagtctctacgggtgtcacactcggctcgggcgcagggcttccggaacacctgctgctgtctgcctgccctgatggttctaatctgcaccatctccagcagcacgtcctctgggagccccagcagcgaggctgccgtcctgacagagtacttggcatcatccatcggctggcagggctgggcttcatcctcggaggcagcaaactggatattgccaaggtgcagcagtccagctaggacctggcagtgtctgagcagcccccatctggaggtgagggtcactttccactgcattgctacctccctgaagtggcctccctttctcgactgccaggccatcctatctatcccctcctgctgctctggggcagtctcatgttccagaggacgacggggcacgggttgggggaagacagagagggtaggaacttggaattactatgtctggtactctgtatcaccacttagtggtatctgaccttgggcacgtcactttacctctctgccaa

SEQ ID NO: 184280 - DNA, 1182 bp, Homo Sapiens
ttggctctggcaatgaggacactgagctcgcttctgaaatttgacaagataaccactaaaatctctttgaattctatgttgttgtgatcccatggctacagaggatcaggagttgacatagatactctttggatttcataccatgtggaggctttcttacttccacgtgaccttgactgagttttgaatagcgcccaacccaagttcaaaggctgataagagagaaaatctcatgaggaggttttagtctagggaaagtcattcagtggatgtgatcttggctcacaggggacgatgtcaagctcttcctggctccttctcagccttgttgctgtaactgctgctcagtccaccattgaggaacaggccaagacatttttggacaagtttaaccacgaagccgaagacctgttctatcaaagttcacttgcttcttggaattataacaccaatattactgaagagaatgtccaaaacatgaataatgctggggacaaatggtctgcctttttaaaggaacagtccacacttgcccaaatgtatccactacaagaaattcagaatctcacagtcaagcttcagctgcaggctcttcagcaaaatgggtcttcagtgctctcagaagacaagagcaaacggttgaacacaattctaaatacaatgagcaccatctacagtactggaaaagtttgtaacccagataatccacaagaatgcttattacttgaaccaggtttgaatgaaataatggcaaacagtttagactacaatgagaggctctgggcttgggaaagctggagatctgaggtcggcaagcagctgaggccattatatgaagagtatgtggtcttgaaaaatgagatggcaagagcaaatcattatgaggactatggggattattggagaggagactatgaagtaaatggggtagatggctatgactacagccgcggccagttgattgaagatgtggaacatacctttgaagagattaaaccattatatgaacatcttcatgcctatgtgaggcaaagttgatgaatgcctatccttcctatatcagtccaattggatgcctccctgctcatttgcttggtgatatgtggggtagattttggaaaaatctgtactctttgacagttccctttggacagaaaccaaacatagatgttactgatgcaa

SEQ ID NO: 184281 - DNA, 1701 bp, Homo Sapiens
  misc_feature (229)..(248): n is a, c, g, or t
  misc_feature (1545)..(1558): n is a, c, g, or t
tgtacaaaagagagaggagttgctgagaattctgtagtcatcagtaatggtgacattaatttatctcttagaaaagcaaagaagcgggcatttcagttagaggagggtgaagaaactgaaccagattgcaaatattcaaagaagcattggaagagtcgagagaacaataacaataatgagaaggtcttggatctggaaccaaaagctgtcacagatcagactgtcagcnnnnnnnnnnnnnnnnnnnntaaagcaacctgtggcacagtgggtgatgataacgaagaggccaaaagaaaatcaccaaagaaaaaggagaaatgtgaatataaaaaaaaggctaagaatcccaagtctccgaaagtacaggcagtgaaagactgggccaatcagagatgtagttctccaaaaggttctgctagaaacagccttgttaaagccaaaaggaaaggtagtgtaagcgtttgctcaaaagagagtcccagttcctcctcggagtctgagtcttgtgatgaatctatcagtgatggtcccagcaaagtcactttggaggccagaaattcctcagagaaattaccaactgagttatcaaaggaagaaccctctaccaaaaatacaactgcagacaaactggctataaaacttggctttagccttacccccagcaagggcaagacctctggaacaacatcttccagttcagactctagtgcagagtcagacgaccaatgcttgatgtcatcgagcaccccggagtgtgctgcgggtttcttaaagacagtaggcctttttgcacgaagaggtcgtccaggcccagggctgtcatcacagactgcaggtgctgctggatggaggcgttctggctcaaatggtggtggacaggctcctggtgcttctcccagtgtgtctctccctgctagtttaggaagaggatggggtagagaagagaaccttttttcttggaagggagctaagggacggggcatgcgggggagaggtcgaggacgagggcatcctgtttcctgtgttgtaaatagaagcactgacaaccagaggcaacagcaattaaatgacgtggtaaaaaattcatctactattatccagaatccagtagagacacccaagaaggactatagtctgttaccactgttagcagctgcccctcaagttggagaaaagattgcatttaagcttttggagctaacatccagttactctcctgatgtctctgactacaaggaaggaagaatattaagccacaatccagagacccagcaagtagatatagaaattctttcatccttacctgccttgagagaacctgggaaatttgatttagtttatcacaatgaaaatggagccgaggtagtggagtacgctgtgacacaggagagcaagatcactgtattttggaaagagttgattgacccaagactgattattgaatctccaagtaacacatcaagtacagaacctgcctgagtatgacctctccaccttatagtttatgaatgtcttgtttgtgaaagtgactataaccaaacnnnnnnnnnnnnnnaaagaggatttggaagttgtatggacttttttgttatcttcacttactgcctaggaaacaatctacctcatcctttaaaatgacatgggtgtcgggttttgtaaatctttggttttttgtcaggtttactttcagttacaaaa

SEQ ID NO: 184282 - DNA, 2095 bp, Homo Sapiens
ttggtacagttgctaccatactggtcacggcagctgtagactgactgggtccatagttcatcacctcaaaattctttcaaaatttattatctctttctctccttacatgtttatttcccaggcctaccctggtgattagaacagctgaagggcctttcttgttaggctgtccatgccctaaggatgggttcctgtttatccttgccacgcagctgagcttactgcatgtttatatctcccaaggactgttctctgctcagaaatgccctgtcaagggtgtggcatggcacgcagtttcatccaagttgtttcaggaattgctgacactgctgggtgcagttctatcccctaaagcctagggtgtggccctttaacttccccttcagtagaactgggaaaggcagtaccattcctagttatgagtgaagcatccactttcttttgtaacaatgaggaacagaaaggataagactgaagagtgatcttttgtccaactaaaccatttatctccttttgtaggtaaattcaaatcctgcccagttatagttttcagtcactggagaattccaggtaggagccctactttaggtgatcctaggaactcctatgttcagaaaagaattttcttcctactatataattacagtatttagctgtcaattttaagatgaatttggtagagccttatagtaaagtatgtatcttggtcacacacaaagcttggaaaaagtaaaagatgtctaaaccataatcttgtaactcataacatctgggctggggcccggggatctaattgtttagagagccccaaaagtggctcagatgtaaagccagggttaagaaccatctgccttggaagatttaagggaaacatataaacttgtacaaaggacacagaagcagtcagttttaattttttagccatgttggtaaaagttcattttcagtacatgggtaacacccaggccctttcccattatatccaggtatgctacaagttcttttaactcttatcagaagttattattactgtttcccttagagaggctaccaggctaaaattcacttagtttggtttgtctaatgtcctcattattttatccctgaagatgatgtcatttctcagacttgaaaatgacttggctgaactaaaggtaaaaaagccaagcctctgtcacttttcctagactcctaggcacagctatggagtctttgcacagtgcccataccctaaaaattaataatgaaaaccaacctcaagaacctagagcagctctctacttgccaccatggactccagtggtcagcataagaaaagcagatagttgcattctatttagtttatagctgctttgttcctttgtgtttcactaagcagaggctcaaaaattcccttgataacttcagctgcccctgttcttttcctcaaactccaggatgagacctttaatgtgggacaatttctggtgaaggtactcacagcgacgcttttcttctctgtaacttgggtacttcctgaactttttatattcctggattatcttgtcttccaggaccttgtattctggagttcctcgccgaactcttttaatctctgctcccagctctatgaacctttggcttgcagtcccaacacgggcatgcaggatgcggtattcagcataatctgtctcaaagtcctgctcataggcatgttgctgttctgcactgtggatggccctgtattgcaggaggtagtctggtatatcttcaggacttggggattcagaatcttcttgaactgaggaactgtgttctaatctggggtccatgtcctcatcttcttgctcccaatcttctccctcttgtaaatcctgattggtcaggccttgtagggggcttggcactaaaggcagagttctgaacctcttttcttccagttctacagtggctacaggcactgaacgtttcttgtccagacgtttccggctggcagaggaaggcagtgcctgaacaggttctctgtttggaacatgggtctggcttctcacttcccactgtgccatgtgctcccttgaggatcctgggagtgactgtccttggttgcttgccccaa

SEQ ID NO: 184283 - DNA, 1653 bp, Homo Sapiens
ttggcaattaaatatcctgcacttgttaggaatacgcatatcccttctttgtcgagttcttcgctccctggtgtggacactgcaagagacttgcacctgagtatgaagctgcagctaccagattaaaaggaatagtcccattagcaaaggttgattgcactgccaacactaacacctgtaataaatatggagtcagtggatatccaaccctgaagatatttagagatggtgaagaagcaggtgcttatgatggacctaggactgctgatggaattgtcagccacttgaagaagcaggcaggaccagcttcagtgcctctcaggactgaggaagaatttaagaaattcattagtgataaagatgcctctatagtaggttttttcgatgattcattcagtgaggctcactccgagttcctaaaagcagccagcaacttgagggataactaccgatttgcacatacgaatgttgagtctctggtgaacgagtatgatgataatggagagggtatcatcttatttcgtccttcacatctcactaacaagtttgaggacaagactgtggcatatacagagcaaaaaatgaccagtggcaaaattaaaaagtttatccaggaaaacatttttggtatctgccctcacatgacagaagacaataaagatttgatacagggcaaggacttacttattgcttactatgatgtggactatgaaaagaacgctaaaggttccaactactggagaaacagggtaatgatggtggcaaagaaattcctggatgctgggcacaaactcaactttgctgtagctagccgcaaaacctttagccatgaactttctgattttggcttggagagcactgctggagagattcctgttgttgctatcagaactgctaaaggagagaagtttgtcatgcaggaggagttctcgcgtgatgggaaggctctggagaggttcctgcaggattactttgatggcaatctgaagagatacctgaagtctgaacctatcccagagagcaatgatgggcctgtgaaggtagtggtagcagagaattttgatgaaatagtgaataatgaaaataaagatgtgctgattgaattttatgccccttggtgtggtcattgtaagaacctggagcccaagtataaagaacttggcgagaagctcagcaaagacccaaatatcgtcatagccaagatggatgccacagccaatgatgtgccttctccatatgaagtcagaggttttcctaccatatacttctctccagccaacaagaagctaaatccaaagaaatatgaaggtggccgtgaattaagtgattttattagctatctacaaagagaagctacaaacccccctgtaattcaagaagaaaaacccaagaagaagaagaaggcacaggaggatctctaaagcagtagccaaacaccactttgtaaaaggactcttccatcagagatgggaaaaccattggggaggactaggacccatatgggaattattacctctcagggccgagaggacagaatggatataatctgaatcctgttaaattttctctaaactgtttcttagctgcactgtttatggaaataccagaccagtttatgtttgtggtttgggaaaattatttgtgttgggggaa

SEQ ID NO: 184284 - DNA, 964 bp, Homo Sapiens
  misc_feature (584)..(646): n is a, c, g, or t
  misc_feature (686)..(741): n is a, c, g, or t
tgtacaaaaaagttggctccatatgaccattacaaaagagttttcctaccatatacttctctccagccaacaagaagctaaatccaaagaaatatgaaggtggccgtgaattaagtgattttattagctatctacaaagagaagctacaaacccccctgtaattcaagaagaaaaacccaagaagaagaagaaggcacaggaggatctctaaagcagtagccaaacaccactttgtaaaaggactcttccatcagagatgggaaaaccattggggaggactaggacccatatgggaattattacctctcagggccgagaggacagaatggatataatctgaatcctgttaaattttctctaaactgtttcttagctgcactgtttatggaaataccaggaccagtttatgtttgtggttttgggaaaaattatttgtgttgggggaaatgttgtgggggtggggttgagttgggggtattttctaattttttttgtacatttggaacagtgacaataaatgagacccctttaaactgtcttattttccaccagattgagaaccagatgttctctacacactatnnnnnnnnnnnnnnnnnnnnnnnnnnnnnnnnnnnnnnnnnnnnnnnnnnnnnnnnnnnnnnngtagctacagagcatctgaaatatggctagaaactacatnnnnnnnnnnnnnnnnnnnnnnnnnnnnnnnnnnnnnnnnnnnnnnnnnnnnnnnnctgtagactgactgggtccatagttcatcacctcaaaattctttcaaaatttattatctctttctctccttacatgtttatttcccaggcctaccctggtgattagaacagctgaaggcctttcttgttaggctgtccatgccctaagatgggttcctgtttatcttgccacgcagctgagcttactgcatgtttatatctccaaaggactgttctctgctca

SEQ ID NO: 184285 - DNA, 1642 bp, Homo Sapiens
gtacaaaaaagttggggttgcacgcagctcgaattaaaaagaggaagagcctcaagcgctccaaggagctcaacctggtgctggacgagatcaagagggccgtgtcagaaaggcaggcgctgcgagacggagacggcaatcgcacctggggccgcctaacagaggacccccgattgaagccgtggaacggctcacaccggcacgtgctgcacctgcccaccgtcttccatcacctgccacacctgctggccaaggagagcagtctgcagcccgcggtgcgcgtgggccagggccgcaccggagtgtcggtggtgatgggcatcccgagcgtgcggcgcgaggtgcactcgtacctgactgacactctgcactcgctcatctccgagctgagcccgcaggagaaggaggactcggtcatcgtggtgctgatcgccgagactgactcacagtacacttcggcagtgacagagaacatcaaggccttgttccccacggagatccattctgggctcctggaggtcatctcaccctccccccacttctaccctgacttctcccgcctccgagagtcctttggggaccccaaggagagagtcaggtggaggaccaaacagaacctcgattactgcttcctcatgatgtacgcgcagtccaaaggcatctactacgtgcagctggaggatgacatcgtggccaagcccaactacctgagcaccatgaagaactttgcactgcagcagccttcagaggactggatgatcctggagttctcccagctgggcttcattggtaagatgttcaagtcgctggacctgagcctgattgtagagttcattctcatgttctaccgggacaagcccatcgactggctcctggaccatattctgtgggtgaaagtctgcaaccccgagaaggatgcgaagcactgtgaccggcagaaagccaacctgcggatccgcttcaaaccgtccctcttccagcacgtgggcactcactcctcgctggctggcaagatccagaaactgaaggacaaagactttggaaagcaggcgctgcggaaggagcatgtgaacccgccagcagaggtgagcacgagcctgaagacataccagcacttcaccctggagaaagcctacctgcgcgaggacttcttctgggccttcacccctgccgcgggggacttcatccgcttccgcttcttccaacctctaagactggagcggttcttcttccgcagtgggaacatcgagcacccggaggacaagctcttcaacacgtctgtggaggtgctgcccttcgacaaccctcagtcagacaaggaggccctgcaggagggccgcaccgccaccctccggtaccctcggagccccgacggctacctccagatcggctccttctacaagggagtggcagagggagaggtggacccagccttcggccctctggaagcactgcgcctctcgatccagacggactcccctgtgtgggtgattctgagcgagatcttcctgaaaaaggccgactaagctgcgggcttctgagggtaccctgtggccagccctgaaacccacatttctgggggtgtcgtcactgccgtccccggagggccggatacggccccgcccaaaggggttctgcctgg

SEQ ID NO: 184286 - DNA, 1996 bp, Homo Sapiens
ttgggtgttgagtctcttgattgtgtcatttaccaattaaataactgagacctaagtctgggaacagagccacgaatctgcctttgagatgctggcagatctcaaggccatcaattattgggggagggagggacaaacactcccaatcatccaccagtcagactgaatgtgtagctggcgaggaattacttccacttctggcccagcacaagccctgctttggccacctgtctgcaagagaggcggcccctgtgcttgcaacgcttacgtgttgatcccagtgtccttttccaaatgagtgctgtagctttagaagtggccctctatagaaagaagtcaaaagatgaggccccttctagaatctaggataacaagagtgttgacagtttgaggagtcgaattgagattcatcatcaaagagcaatgcagcgtcgttaaaataaaaactgtgccttttaaaaagaaaaatgcaaatatagagcaaatccctaaacttgaaccatttcctagtgccttgctagacaaacataaaggggcagggttgtggggaggggaacgtttttggtggtgtgtgcagttcctactggatgagtgtgtgtttcttaatgtctcatttcaagcaggagatgttgggtctggagcaagatctgagactgagatgtcccccaagggtgacaggtcagatttatttcagtcagtgcaagtcacactccaaactaaaggctgggcagtgcgtttagtctgtggcctagaagacctcatcagcccccgagaggaggccttgcattacctcactgggacctgtttgggggccatccctgcggtccaccctctgaacccccagcatgtttgtcctgtttctcaccattgggttaaggggtgccgagcactagctagacttccacatagtcccaccccaagtgggcggcagtgttcctggcatgaccaggattcctgtgaaagcaggagcagcagcaagccgtcccgggcctgcctttcccatcctttggttctcctttccagtctgggttcacaccctgaaaagggatgggtgtgtcctctgagcactctggcatttgtcattgctgagcccatatcagtaggtcctgggacttgacaaagtatgtgggaggggaaggaaggacagaacttgactggctccatttcatggaccaactgatcaattgccagtactaagccactcattgttatggcttcctttttgaaaaccacctgtctcaaggattcaggtttctgctcacatccccagctgatgctcaataaaactcagccaggagcatatggagatgctgacagccaggtaatgggtgagactgtggggtcccttttcctctaaagcctttactctgaggataaggtcacaaagtagggtgtgacttgaaagtatcgtgaccatgtggcccaccagcagcctttccaaaggggaactccagagacatttcataatgcaaacagcactgttgctttaagaacaaggcctttggaggtggctaaacttgcacgcacgtgtgtgaaaagccatcccatcttctgcctccagttggagctttcagctgttaaaacagtcagaaactattgattcttccctttaggaaaaaatgctcaggcagaacggggtacatccacaggaggaatcggacgagaggatgtgacattcggtccaggagagaaagagcagtttctgttaaagatgtaacaaatggatttccaaagtctacatgacattcacttttcaaacttcccaccagttgaatttctttttttccttaagaaacaggtgatgtcttggaaaacagctccttatgtctctctgtgcatctccattttcctagtctctggagtctcaaaaagagtggcaaagcactttacagtagtaactgaggaatcagagtctctgcttcagcgatatctagtttgtacagttgggtgatcttttgtaattcctacgagtaatgcatttttaatgttttctgaa

SEQ ID NO: 184287 - DNA, 1329 bp, Homo Sapiens
ttggcgttagtccggcccaatggcggcaccgctgcttcacacgcgtttgccgggagatgcggccgcttcgtcctctgcagttaagaagctgggcgcgtcgaggactgggatttcaaatatgcgtgcattagagaatgactttttcaattctcccccaagaaaaactgttcggtttggtggaactgtgacagaagtcttgctgaagtacaaaaagggtgaaacaaatgactttgagttgttgaagaaccagctgttagatccagacataaaggatgaccagatcatcaactggctgctagaattccgttcttctatcatgtacttgacaaaagactttgagcaacttatcagtattatattaagattgccttggttgaatagaagtcaaacagtagtggaagagtatttggcttttcttggtaatcttgtatcagcacagactgttttcctcagaccgtgtctcagcatgattgcttcccattttgtgcctccccgagtgatcattaaggaaggcgatgtagatgtttcagattctgatgatgaagatgataatcttcctgcaaattttgacacatgtcacagagccttgcaaataatagcaagatatgtaccatcgacaccgtggtttctcatgccaatactggtggaaaaatttccatttgttcgaaaatcagagagaacactggaatgttacgttcataacttactaaggattagtgtatattttccaaccttgaggcatgaaattctggagcttattattgaaaaactactcaagttggatgtgaatgcatcccggcagggtattgaagatgctgaagaaacagcaactcaaacttgtggtgggacagattccacggaaggattgtttaatatggatgaagatgaagaaactgaacatgaaacaaaggctggtcctgaacggctcgaccagatggtgcatcctgtagccgagcgcctggacatcctgatgtctttggttttgtcctacatgaaggatgtctgctatgtagatggtaaggttgataacggcaaacaaaggatctatatcgcgacctgataaacatctttgacaaactcctgttgcccacccatgcctcctgccatgtacagtttttcatgttttacctctgtagtttcaaattgggattcgcagaggcatttttggaacatctctggaaaaaattgcaggacccaagtaatcctgccatcatcaacaactgctggaaattatattggaagctttttggcaagagctaaatttattcctcttattactgtaaaatcatgcctagatcttttggttaactggctgcacatataccttaa

SEQ ID NO: 184288 - DNA, 3137 bp, Homo Sapiens
ttggcacagactgttttcctcagaccgtgtctcagcatgattgcttcccattttgtgcctccccgagtgatcattaaggaaggcgatgtagatgtttcagattctgatgatgaagatgataatcttcctgcaaattttgacacatgtcacagagccttgcaaataatagcaagatatgtaccatcgacaccgtggtttctcatgccaatactggtggaaaaatttccatttgttcgaaaatcagagagaacactggaatgttacgttcataacttactaaggattagtgtatattttccaaccttgaggcatgaaattctggagcttattattgaaaaactactcaagttggatgtgaatgcatcccggcagggtattgaagatgctgaagaaacagcaactcaaacttgtggtgggacagattccacggaaggattgtttaatatggatgaagatgaagaaactgaacatgaaacaaaggctggtcctgaacggctcgacctgataaacatctttgacaaactcctgttgcccacccatgcctcctgccatgtacagtttttcatgttttacctctgtagtttcaaattgggattcgcagaggcatttttggaacatctctggaaaaaattgcaggacccaagtaatcctgccatcatcaggcaggctgctggaaattatattggaagctttttggcaagagctaaatttattcctcttattactgtaaaatcatgcctagatcttttggttaactggctgcacatataccttaataaccaggattcgggaacaaaggcattctgcgatgttgctctccatggccattttactcagcctgccaagctgtgttctacacctttgtttttagacacaagcagcttttgagcggaaacctgaaagaaggtttgcagtatcttcagagtctgaattttgagcggatagtgatgagccagctaaatcccctgaagatttgcctgccctcagtggttaacttttttgctgcaatcacaaataagtaccagctcgtcttctgctacaccatcattgagaggaacaatcgccagatgctgccagtcattaggagtaccgctggaggagactcagtgcagatctgcacaaacccgctggacaccttcttcccctttgatccctgtgtgctgaagaggtcaaagaaattcattgatcctatttatcaggtgtgggaagacatgagtgctgaagagctacaggagttcaagaaacccatgaaaaaggacatagtggaagatgaagatgatgactttctgaaaggcgaagtgccccagaatgataccgtgattgggatcacaccaagctcctttgacacgcatttccgaagtccttcaagtagtgtgggctccccacccgtgttgtacatgcaacccagtcccctctgacggcagaaatttgtgactgagatgtgacatttgggattccccatcacttgtcatgccctcagcacccagcttgtgccattgggcattgatggcattgaactagagcgagtgcctgcctcggctgtggcacttccaggttcgactgaatcaagcatctgaagactgggtttttttgttgttgttgttccccttacagacaaaatgaagactatcatgtgcaatcttttacagtggggttgatgatacatttggaaggatttgcttgtttaatatgtacattttttgtgttaacagctttttgacacaattactgggtaatttctaatataggcagcagactgttttacgggttgctgttttaacatgggtttttgtcagatccatggtcttaggacttgactgatgagctttcagtgaagaatcctctaagataaaacttctatttaaagactttaactagaaagtgtttattttggctacattgttcaccttctgctgtattggtatttgtctgttgggatttcaagggagtgtagagaagacagaaggaaagctgagagctggcccgacatggtctgggacacagagttggagctggcactgaagatctccagggacttcagagaccaataaaagcccatagggaagagagagaggatatagggaaacagaatcagatgtgtaatatacttggcacagcgaaaaaatggatttaaaagacaaaaatggaggtccaggtagatgtaattcacacagactgaaagtgagttcgggcttgtgtaaaacacatgagattggatttgaccccttggctctcaagtgtccccttagatctagaactgctccttggtggccattagatcgagtcagttttgatctgcatcacttagttattgggaatttctttgttggaaacaggaaaatttttttagattatttggtgtacggttttgctcacaacaataggtggaagttgctagtgcagtcttggtctgatggctgtgtgcatcgcacattcggcttggtgaaatccttctctaaagcctctttttgtatttttataactaaacagaggaagtcttcagaagacctcgctttaaaacaaatttgtgcaaacactgctagagtcattttgaagctcaagcattttcactttgtttcttacatgtgtacttttttgtttacttgtgaaaatggccatctttaagcatatttattttctgccactttatttaaaggcaagcaatattttcttgatcataaatattttgtaatgaaatacttcctcttttccagggctttgtatgcacttgtataattacattgatggcaatgtagagtttgaatttcagtctgtaaatacttttttggaaaatagaaatttttattgctttaaagttttggatatgggtggttttcttttccgggtttggtggaaagtaatttgagaactttaaggttgtctttttaactgctggcaaaatgttgattttttaatattagataaaacgagtaaacgaaattccccagaaattagtagtaagtggggtctttgtgggttgggaagtagttttaatgtagaaagacatttacatataagtctgtttaatttcaaaggagtttgtgaaaaaaaatccatggtgaaaatgaaacaatgacatggttaatctggaacttacgttcttataccaataaaaggtacctcaatacatgttcttt

SEQ ID NO: 184289 - DNA, 2104 bp, Homo Sapiens
  misc_feature (1704)..(1713): n is a, c, g, or t
actttgtacaaaaaagttggatgaaatcttgccccttatccatgttttcaggcccgatatctctccctattttggcctattctatgagaaaaatgggactaatgatggagactatgtttttctaactggagaagacagttaccttaactttacaaaaattgtggaatggaatgggaaaacgtcacttgactggtggataacagacaagtgcaatatgattaatggaacagatggagattcttttcacccactaataaccaaagatgaggtcctttatgtcttcccatctgacttttgcaggtcagtgtatattactttcagtgactatgagagtgtacagggactgcctgcctttcggtataaagttcctgcagaaatattagccaatacgtcagacaatgccggcttctgtatacctgagggaaactgcctgggctcaggagttctgaatgtcagcatctgcaagaatggtgcacccatcattatgtctttcccacacttttaccaagcagatgagaggtttgtttctgccatagaaggcatgcacccaaatcaggaagaccatgagacatttgtggacattaatcctttgactggaataatcctaaaagcagccaagaggttccaaatcaacatttatgtcaaaaaattagatgactttgttgaaacgggagacattagaaccatggttttcccagtgatgtacctcaatgagagtgttcacattgataaagagacggcgagtcgactgaagtctatgattaacactactttgatcatcaccaacataccctacatcatcatggcgctgggtgtgttctttggtttggtttttacctggcttgcatgcaaaggacagggatccatggatgagggaacagcggatgaaagagcacccctcattcgaacctaaacattgcctttgcttggtgaagaaactgtgtgagctgtcctgacctggacgatgacgtggggaaaccctccacctccttgcaggcttgttgcctgttgaaagaaggaaaaagacacggcgctggcaagtgataggaacattctggccagaggttaaagagcaggctgacatggctggccattaagctttataaaatcatgtgggctctgaaattgttcttttatgtgtctagcaagtatttaataaacccttgtatagtaattttgttgttgttgggtgctggtagctccagaattttgtgaccactattgtgggtaaaatgtctctgcatcacttgttaatgctactggtctaacttcattcagtatgcttcattcaccgaactttgtgctcaaaatgcgtatataccattttatgttgtattcctccatttcacttgcaaaacagaagtaaataagagttcgggacccagggtaaaatggtagcttcatccaatatatcattcaaatgcatctgatttctaaaacatattacattttatgctgatcttcagttcataattcttccaggaaaactcagtcttccaactgcaataaaatactgggtagaatcaaatgggaaaggggttgggtggggcaatacccatgagttgatagtgataagctcctaaggatttttaacttgtacttttgtgaacgaagagaatgcataaataatgttggtgaggataaagtacagatatttcatgtagaattaattgctagttatgatgcttgtggatagttaactgnnnnnnnnnnagtcaaaatgatcatgctacgaaaagatgcttctgagagaatgtaatgagtaactgatttttcttcctgagtcgcccttgccaaatatgttactgtattaattaatctaatattgagtgattatttgtaaaattatgaatatgggaaatccatctatctacagcctaagttacacataagtttcagaaagtctgattagactaaagagatatttcttctgggacagccgccttcttggtaattttgaagttctttttacaagttccttcctcagtttcagttctttccagtgttttgtagctcactgtcactcactgaatagagaaacgtgtgccctatacttcctgtgacaatcattttgctgacagaatgatggatgtttaaaatattg

SEQ ID NO: 184290 - DNA, 2275 bp, Homo Sapiens
  misc_feature (99)..(108): n is a, c, g, or t
  misc_feature (1293)..(1301): n is a, c, g, or t
  misc_feature (1311)..(1559): n is a, c, g, or t
ttggcgaagagaatgcataaataatgttggtgaggataaagtacagatatttcatgtagaattaattgctagttatgatgcttgtggatagttaactgnnnnnnnnnnagtcaaaatgatcatgctacgaaaagatgcttctgagagaatgtaatgagtaactgatttttcttcctgagtcgcccttgccaaatatgttactgtattaattaatctaatattgagtgattatttgtaaaattatgaatatgggaaatccatctatctacagcctaagttacacataagtttcagaaagtctgattagactaaagagatatttcttctgggacagccttcttcttggtaattttgaagttctttttacaagttccttcctcagtttcagttctttccagtgttttgtagctcactgtcactcactgaatagagaaacgtgtgccctatacttcctgtgacaatcattttgctgacagaatgatggatgtttaaaatattgcacaaagtactttaaagaaaggtctgttaggaccagaagcagagacaccacttttcaaaggacttcttggtttcagcataacctaagacagggaattgggagccatcatatgtcacagtgttcagaattcaagcatatttaagggcattttctttgattctcaaagttcagcattcattttgaattgagaagcctatacatttagctgacaaagtgcttatagaatttcttaacaactgaaccattcaaaaggattttttttgtttaaaactggatttcaatgtaagcaaatgaagaaaaaaatatagatttcatttccatagcttcttatccctgtattgaggtaataaattgttttactgacaatttttcctttttctacactaaaacaatatgtgatatatttcccctcttgaagaggcaattcattaaactctcaaattttctatagaatcaagatagaacctttagatactccaactcaccaaaatgtaaaaaaactaacaaaaatatttggtcttcaataatgctaaatatctacatttttagaatttatcaacatttaactagataattgggcatgtcttaattatgcatgtacttatccatactaataaaattgacaatgctagtgcatacttattggtttagtcctattatcaggatataatcatctgtgaggaggatattttaaatactgtaaatgataacagttaatgatatacacatttagactgagttgcacactggcagggagaccaaaaacattacttccatacttgtgtcatgattcnnnnnnnnngagagagtcnnnnnnnnnnnnnnnnnnnnnnnnnnnnnnnnnnnnnnnnnnnnnnnnnnnnnnnnnnnnnnnnnnnnnnnnnnnnnnnnnnnnnnnnnnnnnnnnnnnnnnnnnnnnnnnnnnnnnnnnnnnnnnnnnnnnnnnnnnnnnnnnnnnnnnnnnnnnnnnnnnnnnnnnnnnnnnnnnnnnnnnnnnnnnnnnnnnnnnnnnnnnnnnnnnnnnnnnnnnnnnnnnnnnnnnnnnnnnnnnnnnnnnnnntaagccaccgggcctggcctgttttatgattcttaatagttacttggtttaaatcacatttgatactatccttctgaaaagtctgagacagatctacaaactacagtcaaaattatagattaagaggaatgaatgcacctatttggctttaagttgaagatgaattatttctcatgctcattttcttgcggcagttatcttagaaagacccccaaaggctttgtgattgtaagcactgtcatgatcacagaatgcaagcttctggtaccatgatcctcaacttaaagaggaagaaaccaagacagagagcttaactcacttctctcagggaaaattaggagttgagcacaggacaggaaatgggctttgccacttttagctccaggcttttctaaccagacttgatttcctcatgttctagaaagatcactaatggtcaagtggaacaagcactacacgactaacccctattggggtttttaacttaagggaggctaatttttaatttaaactgctcgagatatgagttctgcaaaaggtggtccgcatccttggccctctggacattatcactaaattgcttgtgcctgttaacaagaatactgaccagaatgctcttcatgtagcttatacagttggttcacttcatgcggttcttgacatgtttatttctacccttaatgcaatgaaatgtttcattaataaaaaaccacttt

SEQ ID NO: 184291 - DNA, 1482 bp, Homo Sapiens
ttggctcccgagctgcgctaggcgggcgccacggctgcccggcgaaggaaaccgaaaccgagtccgggcccgtccctccgcggccccatccgcccggtgcacccggggtcgcgctcgccaggccgcggagcccagagctgcgcgcacgaaccgtgcgccgggagggcgtgggcgtggcgccgaagggtcccgggtcttcgacgcctctgcggcggctcctccctccttgcagttggatccctggcgggtgcggcccggcccggcccgtgagcggcgcacagaatgggccgatgctgcttctacacggcggggacgttgtccctgctcctgctggtgaccagcgtcacgctgctggtggcccgggtcttccagaaggctgtagaccagagtatcgagaagaaaattgtgttaaggaatggtactgaggcatttgactcctgggagaagccccctctgcctgtgtatactcagttctatttcttcaatgtcaccaatccagaggagatcctcagaggggagacccctcgggtggaagaagtggggccatacacctacagggaactcagaaacaaagcaaatattcaatttggagataatggaacaacaatatctgctgttagcaacaaggcctatgtttttgaacgagaccaatctgttggagaccctaaaattgacttaattagaacattaaatattcctgtattgactgtcatagagtggtcccaggtgcacttcctcagggagatcatcgaggccatgttgaaagcctatcagcagaagctctttgtgactcacacagttgacgaattgctctggggctacaaagatgaaatcttgtcccttatccatgttttcaggcccgatatctctccctattttggcctattctatgagaaaaatgggactaatgatggagactatgtttttctaactggagaagacagttaccttaactttacaaaaattgtggaatggaatgggaaaacgtcacttgactggtggataacagacaagtgcaatatgattaatggaacagatggagattcttttcacccactaataaccaaagatgaggtcctttatgtcttcccatctgacttttgcaggtcagtgtatattactttcagtgactatgagagtgtacagggactgcctgcctttcggtataaagttcctgcagaaatattagccaatacgtcagacaatgccggcttctgtatacctgagggaaactgcctgggctcaggagttctgaatgtcagcatctgcaagaatggtgcacccatcattatgtctttcccacacttttaccaagcagatgagaggtttgtttctgccatagaaggcatgcacccaaatcagaagaccatgagacatttgtgggacattaatcctttgactgggaataatcctaaaagcagccaagaggttccaaattcaacatttatgtcaaaaattagatgactttgttgaaacgggaga

SEQ ID NO: 184292 - DNA, 987 bp, Homo Sapiens
  misc_feature (243)..(256): n is a, c, g, or t
ccaactttgtacaaaaaagttgggtgggatacccggggaaattgtagtgaagggcttaatgtagttaataaaagttaaaagtcagtagaaaacaggtgcctcagccttcaaatggttgctttttttccattttccctcatgaatagactcaccagcattttacccccttgttataaaactgtgcagagcaagaagatgatacttatttttgaatttgtatttttaaaactagatttatagacnnnnnnnnnnnnnnaactagggcacttgcttccttcttagctaaaagcaccagctgaaatttttcaggtaattttgttgttactcacttaagactggaattagaatgtttctggtatttctcatttttttccctggctatgatagaatctcatctaatcttgacatctctcctaggggaagaatatcacaggctaatagcgtggttgggggtgaagatgatagcagttattaaatcaggaatctcttttatgtgtgtccttgttacattgaggttaagagacaaaatcattggcagtgcaatctctttccaggatttcgtttgctgtggcattggttatatcagagcactttaatctgaaggatgatactgtaacttgatttatctaattagcttttaattatctacagctattttattttatttaattctctcctacagtactgggaccactgtaaacttctcagatgacttgtatttttgtagtgctatgaaatttatttacatacttataaagaaaactgtatgttcacttgaactctgaaaatgtacatgtatggacaccgcaccctaccacattttctgtaaaaaagctaagcttgaacactgttgatgttcttgagggaagcatattgggctttaggctgtaggtcaagtttatacatcttaattatggtggaattcctatgtagagtctaaaaagccaggtaattggtgctacagtcagtcaccctgcgaagggttaa

SEQ ID NO: 184293 - DNA, 2350 bp, Homo Sapiens
ttggcaactaccgcctggacatggatatccaggagatcctgaactacatcagcaggaaagagtttgagcccctcctcagggtggaccagctcaacctggagcgggagaagcacaaggtcttccttcgattcagtgaggaggagatctccttcccacccacctaccgctatgagcggggttcccggggcacatatgcctggcacaagcagaagccaactggggtccggaccaatgtgccctcatggtgtgaccggattctgtggaaatcctaccctgaaactcacatcatctgcaattcttatggttgcactgatgacatcgtcaccagcgaccattcccccgtgtttgggacatttgaggttggagttacctcccagttcatctccaagaaagggctctcaaagacttcagaccaggcctacattgagtttgagagcatcgaggccattgtgaagacagccagccgcaccaagttcttcatcgagttctactctacctgcctggaggaatacaagaagagctttgagaatgatgcccagagcagtgacaacatcaacttcctcaaagtgcagtggtcttcacgccagctgcccacgctcaaaccaattctggctgatatcgagtacctgcaggaccagcacctcctgctcacagtcaagtccatggatggctatgaatcctatggggagtgtgtggttgcactcaaatccatgatcggcagcacggcccaacagttcctgaccttcctatcccaccgtggcgaggagacaggcaatatcagaggctccatgaaggtgcgggtgcccacggagcgcctgggcacccgtgagcggctctacgagtggatcagcattgataaggatgaggcaggagcaaagagcaaagccccctctgtgtcccgagggagccaggagcccaggtcagggagccgcaagccagccttcacagaggcctcctgcccgctctccaggttatttgaagaaccagagaaaccgccaccaacggggaggcccccagccccaccccgagcagctccccgggaggagcccttgacccccaggttgaagccagagggagctcctgaaccagaaggggtggcggcccccccacccaagaacagcttcaataaccctgcctactacgtccttgaaggggtcccgcaccagctgctgcccccggagccaccctcgcctgccagggcccctgtcccatctgccaccaagaacaaagtggccattacagtgcctgctccacagcttgggcaccaccggcaccctcgtgtgggagaggggagttcttcagatgaggagtctggaggcacactgccccctccagactttccacctccaccactgccggactcagccatcttcctgccccccagcctggatcctttaccagggccagtggtccggggccgtggtggggctgaggcccgtggcccaccacctcccaaggcccatccaaggcctccactgcccccaggcccctcaccagccagcactttcctgggggaagtggccagtggggatgaccggtcctgctcggtgctgcagatggccaagacgctgagcgaggtggactatgcccctgctgggcctgcacgctcagcgctcctcccaggccccctggagctgcagcccccccggggactgccctcggactatggccggcccctcagcttccctccaccccgcatccgggagagcatccaggaagacctggcagaggaggctccgtgcctgcagggcgggcgggccagcgggctgggcgaggcaggcatgagtgcctggctgcgggccatcggcttggagcgctatgaggagggcctggtgcataatggctgggacgacctggagtttctccgtgacatcaccgaggaggacttggaggaggctggggtgcaggacccggctcacaagcgcctccttctggacaccctgcagctcagcaagtgatagcggaggcaccacgaagctgtgaactcagagcccctccctgctaccaaggcccagctatggccccagggttgaaaagttatgagggtcagggcagtatctctctgcctatttattggggtgcctatttattggggatctgcattccccgctgcccaatcatttgcaatgccctaattagggcatcctgcccctcgccttttatgttcaggacggaaggtcagttgccatggttaccgaggaccctggttactctggtgctgtcctgttttactggaccccgcctcccagccccaggggtgcctgtgggggtccatttgggtacgtctgggcccccactttcaccagtttctgcggccttccaccgggcctgaaccacagcggaggagctc

SEQ ID NO: 184294 - DNA, 2647 bp, Homo Sapiens
  misc_feature (259)..(286): n is a, c, g, or t
ttggctcttctcaaaggaagcacccaagagaaaggcacaagctgtttcagaagaagaggaggaggaggagggaaagtctagctcaccaaagaaaaagatcaagttgaagaaaagtaaaaatgtagcaactgaaggaaccagtacccagaaagaatttgaagtgaaagatcctgagctggaggcccagggagatgacatggtttgtgatgatccggaggctggggagatgacatcagaaaacctggtccaaactgctccnnnnnnnnnnnnnnnnnnnnnnnnnnnngggttggagccttctcagagcactgctgccaaggtgcccaaaaaagcgaagacatggattcctgaagttcatgatcagaaagcagatgtgtcagcttggaaggacctgtttgttcccaggccggttctccgagcactcagctttctaggcttctctgcacccacaccaatccaagccctgaccttggcacctgccatccgtgacaaactggacatccttggggctgctgagacaggaagtgggaaaactcttgcctttgccatcccaatgattcatgcggtgttgcagtggcagaagaggaatgctgcccctcctccaagtaacaccgaagcaccacctggagagaccagaactgaggccggagctgagactagatcaccaggcaaggctgaagctgagtctgatgcattgcctgacgatactgtaattgagagtgaagcactgcccagtgatattgcagccgaggccagagccaagactggaggcactgtctcagaccaggcgttgctctttggtgacgatgatgctggtgaagggccttcttccctgatcagggagaaacctgttcccaaacagaatgagaatgaggaggaaaatcttgataaagagcagactggaaatctaaaacaggagttggatgacaaaagcgccacctgtaaggcatatccaaagcgtcctctgcttggactggttctgactcccactcgagagctggccgtccaggtcaaacagcacattgatgctgtggccaggtttacaggaattaaaactgctattttggttggtggaatgtccacgcagaaacagcagaggatgctgaaccgtcgtcctgagattgtggttgctactccaggccggctgtgggaattaattaaagaaaagcattatcatttgaggaaccttcggcagctcaggtgcctggtagtggatgaggctgaccggatggttgagaaaggccattttgctgagctctcacagctgctagagatgctcaatgactcccaatacaacccaaagagacaaacgcttgttttttctgccacactcaccctggtgcatcaggctcctgctcgaatccttcataagaagcacaccaagaaaatggataaaacagccaaacttgacctccttatgcagaaaattggcatgaggggcaagcccaaggtcattgacctcacaaggaatgaggccacggtggagacgctaacagagaccaagatccattgtgagactgatgagaaagacttctacttgtactacttcctgatgcagtatccaggccgcagcttagtgtttgccaacagtatctcctgcatcaaacgcctctctgggctcctcaaagtccttgatatcatgcccttgaccctgcatgcctgtatgcaccagaagcagaggctcagaaacctggagcagtttgcccgtctggaagactgtgttctcttggcaacagatgtggcggctcggggtctggatattcctaaagtccagcatgtcatccattaccaggtcccacgtacctcggagatttatgtccaccgaagtggtcgaactgctcgagctaccaatgaaggcctcagtctgatgctcattgggcctgaggatgtgatcaactttaagaagatttacaaaacgctcaagaaagatgaggatatcccactgttccccgtgcagacaaaatacatggatgtggtcaaggagcgaatccgtttagctcgacagattgagaaatctgagtatcggaacttccaggcttgcctgcacaactcttggattgagcaggcagcagctgccctggagattgagctggaagaagacatgtataagggaggaaaagctgaccagcaagaagaacgtcggagacaaaagcagatgaaggttctgaagaaggagctgcgccacctgctgtcccagccactgtttacggagagccagaaaaccaagtatcccactcagtctggcaagccgcccctgcttgtgtctgccccaagtaagagcgagtctgctttgagctgtctctccaagcagaagaagaagaagacaaagaagccgaaggagccacagccggaacagccacagccaagtacaagtgcaaattaactggtcaagtgtgtcagtgactgcacattggtttctgttctctggctatttgcaaaacctctcccacccttgtgtttcactccaccaccaaccccaggtaaaaaagtctccctctcttccactcacacccatagcgggagagacctcatgcagatttgcattgttttggagtaagaattcaatgcagcagcttaatttttctgtattgcagtgtttataggcttcttgtgtgttaaacttgatttcataaattaaaaacaatgg

SEQ ID NO: 184295 - DNA, 889 bp, Homo Sapiens
  misc_feature (179)..(233): n is a, c, g, or t
  misc_feature (335)..(385): n is a, c, g, or t
gaccatgtcataattttttattatgtatcaaattgtcttcaatataagttacaacttgattaaagttgatagacatttgtatctatttaaaagacaaaaaaattctttttatgtacaatatcttgtctagagtctagcaaatatagtaccctttcattgcaggatttctgcttaatatnnnnnnnnnnnnnnnnnnnnnnnnnnnnnnnnnnnnnnnnnnnnnnnnnnnnnnngctcaactacaaatgtcaatattgaatgaagcattaaaagacaaacataaagtaacttcagcttttatctagcaatgcagaatgaatactaaaattagtggnnnnnnnnnnnnnnnnnnnnnnnnnnnnnnnnnnnnnnnnnnnnnnnnnnntcccaccaatcttcatgggtaaactttcctgctcagggatgtaagctgactctagaccatctcgcggttcctgcggatagcacagcacaagatcatactgaagatcatgccaaatatcatgaccacggcaatgccgatgcccactgcgccgatgatgtggaatttattgtcgaagacctctttgatggcatcaggacaggacttcacggtgaaggtttcgagtacgtccttcttggggcagatgtctgagataaactgttccacgcccccagccaaaccacagcagttcaacgcatagtggatggctttcagcgtttcccgctggggctcatccttggttttcagcttgttgtaggtgtccttgtaaaactcctggacttccttaatcacctcatccttgtgggaatatccccagatggccgcagctatttcaatggcgaatatcaccaagaggaagccgaagaacagtcccagcatgcactgggacccaacttttttgtacaa

SEQ ID NO: 184296 - DNA, 1828 bp, Homo Sapiens
  misc_feature (192)..(210): n is a, c, g, or t
ttggagaacgtctcctgtctttggtgcaacactaacaaggcttgtctggactacccagttacaagcgtcttgccaccggcttccctttgtaaattgagctctgcacgctggggagtttgttgggtgaactttgaggcgctgatcatcaccatgtcggtagtcgggggaaccctcctcctgggcattgccatnnnnnnnnnnnnnnnnnnnaggaggaagaggagccggaagccggacaggagtgaggagaaggccatgcgtgagcgggaggagaggcggatacggcaggaggaacggagagcagagatgaagacaagacatgatgaaatcagaaaaaaatatggcctgtttaaagaagaaaacccgtatgctagatttgaaaacaactaaagcgctccagcacatcagtcccgacgcttcctgtgaggtgcacactccgcagcccagcccagccgggagaccacgtggccattgcggtctcctgaccttggccagtgaacctgccagccttccaggacaggcggccggagagctgcccctgaaggacagtcctctcgtcttgcagactggtgaccttctattccctgttcatctctgtttctagatttagtcacttgaaataagaaatctttggggtttgggcttttttatactcttctcagtttgtgaaacgctaactgcacacgaagccgcctgacggcacccagcgctgtggctgtcattctcccagggcagaaccctgcgtttctctctgtccactaacaagcttcacacgcaacacagggaagtcggtttgacttttgtcatgaggagaactgaccagccctcatcattccccataaaaccacggacagcgtctgtgtgcgcatcttgagtcttcacacctgttgactcacacggcttttgctgatgacacggggctccagtacacagtctgataaggacttaacgtcctaacctcaattgtattaaatagcattggggaatagctaaacctttttaaaaaaatttattggattttcctccctgcttaaaagatttcaccagaaaaccttcatataaaaattcaggccctttttggacaatttttaaaatttgtatctttactagaacatgagaatctttttcccttggaagcttgaattataaatgtggtgtttggcctgcctcagcagcaccagttgactgctcgtgtgccagcggtgtggggaggacggggcaggacgctgcagctctctccagccctgttggcatcctcagtgcctgcaggcctctcgctgcctgttgggctgtctggggggtggccatttagggatcgtggggacggggtccaccccaagaagaaagaaaggcccgtccacaggcccggctctgggccacgtgccccggaagcaggtgtgtccagagtcagctgagggctctccccacaccacccagcaggcgctggtgctccttctgcctcatgggaccagtccagcttccagccgctctggctcgagggtggtctgagcacttccttctgagtgggcttctctgggagctctccagtggcactgctggacctgcccacgtttctgtaaaatcaggatacgtggctttagtaagcagaccaagcgcttcgtggcagggaaagcagcgtgcggggaagtcactgaaaagtgctgcctaaggaagtttggaaatagtccccgttccagattgccttgaattttaaaacattttgctttgggaaagtaggtcagcagcacctaagatcaaggatgcgttccattttcacacttcacagtcatgaaaactgagaagactgtcttcagcgtgaactaaagtt

SEQ ID NO: 184297 - DNA, 1403 bp, Homo Sapiens
  misc_feature (934)..(942): n is a, c, g, or t
ttggtgaagcctccagtggagaactgggcttgctcagacgcactcgcattgacacaacgtaacaccagcattgtgtgtgcagacttcaggagaactcatgttattttttaaccccgtcaacaaatctaggaaaatattttgatcttcaacaaattgccctttagtctccccgtatgagttagaataataaatatttagtaggtgagttttcacctcgaattttgttttcttgatttttacgtttgaagacattgcaccagatgccattacatttattggccccccgaccttgtagaaaaacccctaccctcacaataccttatttaagtaactttaaattatgccgttacttttcatatttgcactaagatatttccaggctgcatttgtatatttagattttttggttaagctttgacactggaatgagttgaaaaaatgtgccattttgcattttcatctactcatttaaagtattttattcttattcaaagaaatatctgagctctttgcactacctgttatcagtagtgcctttacttcaggcttgataatacttaggtgtgattataaaatcatgaagcaggtaaagggaggggcaagcccccaaactgctgtggggacattttataatctatatgctgcacccacttaatctactgtggtgttttgtttattagttttgcataatttcagcttctatatattgtatgtatatattttttaaaaatctatattttgggaaaaaaacatacacaatgtgtctttctttttggacatttacctttttgaaaaagaaaacacttaaaatgatcattaggacataacagactaggccagacatagcatcttgtggctttgcaaccattttcatttgtttgttttccttttatttcttcaccagatttaaataactggaggaattttctccaannnnnnnnnccttctctggcaggtatccccagcagtcaattaacaataagccagtataaaacacctaaataaccaatctacaatctcccttcacaagtttttttactgtttttagatgaatgtacgatgagaaattcaacgttaataattctggattttcttatcacaaaaaagaaaatgaaggacctcaaagcacctgaacagtttatcgaccagtttgaatctatttatcttcatttgaatgtcttctagaatatgtaaaaagtcataaaatgtatcttccatgctacatgtacaataagaacttctataattgtatatatgcctttgatgtattttcccctcaagattatcaactgtgtgttcgacagtgaatattcaatctggtaccagttgaaatttttggttataaatgtaatacgaattgtttcacaaacagaaaacatgtaaagcagtattaaaatttggcc

SEQ ID NO: 184298 - DNA, 1953 bp, Homo Sapiens
ttggggcgatcccagacagtcagtgctatagcaacaacagccatgggctccccaaaggaagtcattttctcagacatcactgaaaattcggctactgtcagctggagggcacccacagcccaagtggagagcttccggattacctatgtgcccattacaggaggtacaccctccatggtaactgtggacggaaccaagactcagaccaggctggtgaaactcatacctggcgtggagtaccttgtcagcatcatcgccatgaagggctttgaggaaagtgaacctgtctcagggtcattcaccacagctctggatggcccatctggcctggtgacagccaacatcactgactcagaagccttggccaggtggcagccagccattgccactgtggacagttatgtcatctcctacacaggcgagaaagtgccagaaattacacgcacggtgtccgggaacacagtggagtatgctctgaccgacctcgagcctgccacggaatacacactgagaatctttgcagagaaagggccccagaagagctcaaccatcactgccaagttcacaacagacctcgattctccaagagacttgactgctactgaggttcagtcggaaactgccctccttacctggcgacccccccgggcatcagtcaccggttacctgctggtctatgaatcagtggatggcacagtcaaggaagtcattgtgggtccagataccacctcctacagcctggcagacctgagcccatccacccactacacagccaagatccaggcactcaatgggcccctgaggagcaatatgatccagaccatcttcaccacaattggactcctgtaccccttccccaaggactgctcccaagcaatgctgaatggagacacgacctctggcctctacaccatttatctgaatggtgataaggctcaggcgctggaagtcttctgtgacatgacctctgatgggggtggatggattgtgttcctgagacgcaaaaacggacgcgagaacttctaccaaaactggaaggcatatgctgctggatttggggaccgcagagaagaattctggcttgggctggacaacctgaacaaaatcacagcccaggggcagtacgagctccgggtggacctgcgggaccatggggagacagcctttgctgtctatgacaagttcagcgtgggagatgccaagactcgctacaagctgaaggtggaggggtacagtgggacagcaggtgactccatggcctaccacaatggcagatccttctccacctttgacaaggacacagattcagccatcaccaactgtgctctgtcctacaaaggggctttctggtacaggaactgtcaccgtgtcaacctgatggggagatatggggacaataaccacagtcagggcgttaactggttccactggaagggccacgaacactcaatccagtttgctgagatgaagctgagaccaagcaacttcagaaatcttgaaggcaggcgcaaacgggcataaattccagggaccactgggtgagagaggaataaggcccagagcgaggaaaggattttaccaaagcatcaatacaaccagcccaaccatcggtccacacctgggcatttggtgagagtcaaagctgaccatggatccctggggccaacggcaacagcatgggcctcacctcctctgtgatttctttctttgcaccaaagacatcagtctccaacatgtttctgttttgttgtttgattcagcaaaaatctcccagtgacaacatcgcaatagttttttacttctcttagtggctctgggaatgggagaggggtaggatgtacaggggtagttttgttttagaaccacccgtattttacatgaagctgtataattaattgtcattatttttgttagcaaagattaaatgtgtcattggaagccatcccttttttt

SEQ ID NO: 184299 - DNA, 1192 bp, Homo Sapiens
gccaactttgtacaaaaaagttggtgtcaagcaacccagccaaagagaccttcacaacaggcctcgatgctcccaggaatcttcgacgtgtttcccagacagataacagcatcaccctggaatggaggaatggcaaggcagctattgacagttacagaattaagtatgcccccatctctggaggggaccacgctgaggttgatgttccaaagagccaacaagccacaaccaaaaccacactcacaggtctgaggccgggaactgaatatgggattggagtttctgctgtgaaggaagacaaggagagcaatccagcgaccatcaacgcagccacagagttggacacgcccaaggaccttcaggtttctgaaactgcagagaccagcctgaccctgctctggaagacaccgttggccaaatttgaccgctaccgcctcaattacagtctccccacaggccagtgggtgggagtgcagcttccaagaaacaccacttcctatgtcctgagaggcctggaaccaggacaggagtacaatgtcctcctgacagccgagaaaggcagacacaagagcaagcccgcacgtgtgaaggcatccactgccatgggctccccaaaggaagtcattttctcagacatcactgaaaattcggctactgtcagctggagggcacccacggcccaagtggagagcttccggattacctatgtgcccattacaggaggtacaccctccatggtaactgtggacggaaccaagactcagaccaggctggtgaaactcatacctggcgtggagtaccttgtcagcatcatcgccatgaagggctttgaggaaagtgaacctgtctcagggtcattcaccacagctctggatggcccatctggcctggtgacagccaacatcactgactcagaagccttggccaggtggcagccagccattgccactgtggacagttatgtcatctcctacacaggcgagaaagtgccagaaattacacgcacggtgtccgggaacacagtggagtatgctctgaccgaccctcgagcctgcccacggaatacacactgaaaatctttgcagagaaagggccccaaaaaaagctcaaccatcactgccaagttcacaacagaacctcgattcctccaagggacttgacctgctaactggaggttcagtcggaaactgcc

SEQ ID NO: 184300 - DNA, 1825 bp, Homo Sapiens
actttgtacaaaaaagttggctcaaagtttgtaggaatgagtgcagatgcaacccctcttcatgtagctagaagtgggaatgacactgaagatttcagcaacccttctgcttgctcagatatttatggtgagagtatttcatctcattttacagagtcaacaggaaagttgatagagagcttgtcagattgtgcttcctccttacctataaaaaagattgctggtagtaattataacacttttttggactctgaactcagtatgttaaatgggacaaaagttctttcagacagtgccgtgggcattgacctgggtagtactggtgatacaacagaagcattgcacgaactaagaactgccgaagagttcaaaacagaagagcaagatgactcagggagtatagaatttggtgtatcttttcctgatagggaatcatcatctatggaaacatccatcgaaccaaaagcaactgaaacttctcgcacagagggaattactgccattgaggagagctgggagtctatgtttaacgatgatggtgactgcctggatccacgtcttctacaagagttatcagggaataccaagagcagagagagcatccaggaacctagatctgattactacaatcatgaagttcctgatattgacctcagtgattgtgaattcccacatgtcattgaaatttatgactttccccaagaatttcgtactgaagaccttctacgggttttctgcagttatcaaaagaaaggatttgatattaaatgggtggatgatacacatgccctaggagtattctccagtccaattacagctcgtgatgcgttgggtattaaacacaccatggtgaagattcgtcccttgtcacaggccacaagagcagccaaggccaaagctagagcttatgctgagttcctccagccagcaaaggagcgtcctgagacttcagcagccctagccagaaggttagtcatcagtgcccttggggttcgaagtaagcagagcaaaaccgaacgagaagcagagctcaagaaactgcaagaagccagagagagaaagcggttggaagccaagcaacgggaagacatctgggaaggcagagaccagtctacagtttgaacatcactcaatgaaagggataattccatgaatcagaaaatgtttccatagccttcagataagatgatccttccagagctctatgtacatgcagatgtgcatgttaaagagataaagtgatcgagacaaggactgactgggtatagaaggaagacagactcctgtcttcactcctaaatgcagttctttggaatcaccctactgtggtgggcgtagtagggagccatcagctaggaagaaacgtgggagatgtgaattccaagagttgcctggacagggcaagtcatgttagcgtgggtcacacttccaagatatttaaagcaaatacaaaacagaacagaggattcaaaccgcaagtatgggagatttaggccctgcagaggcagaccattccttagtatctcacaaagcagagtaatactggaggcagagtagggggtggttggagagcagttagtacaaagaggcagaacagtgtctggtttacttggcatacacagaatctgcactgccggttccagaactgcaaagttggtgaactacaggagatgtgggtatttagactccaaagtttatactgagctcagtgcctgggaccgctccagctgcactgcagccaggggggataccagcttcattcctcagagtaaaccaaccttgggagctgtgtgccagttccagtgtaagcagtaataccatgttg

SEQ ID NO: 184301 - DNA, 1555 bp, Homo Sapiens
ttggctcagctctgcttaaatgctgcagttttaatgcagttgtcaacaagtagaacctcagtttgctaactgaagtgttttattagtattttactctagtggtgtaattgtaatgtagaacagttgtgtggtagtgtgaaccgtatgaacctaagtagtttggaagaaaaagtagggtttttgtatactagcttttgtatttgaattaattatcattccagctttttatatactatatttcatttatgaagaaattgattttcttttgggagtcacttttaatctgtaattttaaaatacaagtctgaatatttatagttgattcttaactgtgcataaacctagatataccattatcccttttatacctaagaagggcatgctaataattaccactgtcaaagaggcaaaggtgttgatttttgtatatgaagttaagcctcagtggagtctcatttgttagtttttagtggtaactaagggtaaactcagggttccctgagctatatgcacactcagacctctttgctttaccagtggtgtttgtgagttgctcagtagtaaaaactggcccttacctgacagagccctggctttgacctgctcagccctgtgtgttaatcctctagtagccaattaactactctggggtggcaggttccagagaatgcagtagaccttttgccactcatctgtgttttacttgagacatgtaaatatgatagggaaggaactgaatttctccattcatatttataaccattctagttttatcttccttggctttaagagtgtgccatggaaagtgataagaaatgaacttctaggctaagcaaaaagatgctggagatatttgatactctcatttaaactggtgctttatgtacatgagatgtactaaaataagtaatatagaatttttcttgctaggtaaatccagtaagccaataattttaaagattctttatctgcatcattgctgtttgttactataaattaaatgaacctcatggaaaggttgaggtgtatacctttgtgattttctaatgagttttccatggtgctacaaataatccagactaccaggtctggtagatattaaagctgggtactaagaaatgttatttgcatcctctcagttactcctgaatattctgatttcatacgtacccagggagcatgctgttttgtcaatcaatataaaatatttatgaggtctcccccacccccaggaggttatatgattgctcttctctttataataagagaaacaaattcttattgtgaatcttaacatgctttttagctgtggctatgatggattttattttttcctaggtcaagctgtgtaaaagtcatttatgttatttaaatgatgtactgtactgctgtttacatggacgttttgtgcgggtgcttttgaagtgccttgcatcagggattaggagcaattaaattattttttcacgggactgtgtaaagcatgtaactaggtattgctttggtatataaactattgtagctttacaagagattgttttatttgaatggggaa

SEQ ID NO: 184302 - DNA, 1278 bp, Homo Sapiens
ttgggaacatatgccaattatggaataggctatgtatttaatattaatctctgccattaggatatctactcactgtataaacctcagtaaaaatagtgaagacatgcatcatggaatgagaaaatgagaaaggaatgagttgtctaacatcacagtgggatctgttttttgtgaggttcatttctgaacacattaggcatatgagcagatttccagtgaatctatttatgtttattttctgagtttcaacgctgaccttttcttgcattattgtttcattttaatgatagtgttacttgtcccactgttgttttcattgagtttggatttatattttaaatgttcgaatgaaagtatgattgtaaaagggagtgaattggtttaaaaatatatgtatattttaaactttgttgtgtgtaggaaacatgaaggcatgttaattcaatataaatgacctttgatttcatggaatattaaagttggtttaaagtccaatagttaaaccttagcaaaaatagctttttacttcatcagttgctaagatttaatactttggattcatcaaagtgtgacatgggcttgtttgacttctgtaagtggcatttaagttccacattcttattacttgaggtactttatactaacataagacagtgagagttagaggtattacaagttgctagtttataatgtcttactaatgcagaaacaaggaaaaaagcaaaattggcctgaatattctcttggggaaagagggcaccaaagaaaagggtaagtgcatctgagggccaaaagagatgtataagccttttagcccattccccatgctgggcctgctcacagagccacaggaagatcattcagaaactaggaaaggaggcccccacagctgatcctgccacagcacacctgactcactcggctctgttagtgtaaccttttaaatgtagcaacacaaaccctttccctcttgtcagttcactcatcctttggtttctttttaatcacctgtgtctgggcacagacaatcacaataaatgcagccctttattactgttaaggatcatactgttggtttggagttggaagggtactactctgtgattcaggtgtgttgtacccatatttataattagctttattatcttcctaaatcaaggaaaggaaatcatccccagaccatttatgctgagctttggaatactattttaaactggattgtacttaaataatgaagctctgcatagaggaactagtcagaagtgggaaaacactgtc

SEQ ID NO: 184303 - DNA, 1677 bp, Homo Sapiens
  misc_feature (1260)..(1285): n is a, c, g, or t
ctttgtacaaaaaagttggggaaacatgaagtgcatgttaattcaatataaatgacctttgatttcatggaatattaaagttggtttaaagtccaatagttaaaccttagcaaaaatagctttttactttatcagttgctaagatttaatactttggattcatcaaagtgtgacatgggcttgtttgacttctgtaagtggcatttaagttccacattcttattacttgaggtactttatactaacataagacagtgagagttagaggtattacaagttgctagtttataatgtcttactaatgcagaaacaaggaaaaaagcaaaattggcctgaatattctcttggggaaagagggcaccaaagaaaagggtaagtgcatctgagggccaaaagagatgtataagccttttagcccattccccatgctgggcctgctcacagagccacaggaagatcattcagaaactaggaaaggaggcccccacagctgatcctgccacagcacacctgactcactcggctctgttagtgtaaccttttaaatgtagcaacacaaaccctttccctcttgtcagttcactcatcctttggtttctttttaatcacctgtgtctgggcacagacaatcacaataaatgcagccctttattactgttaaggatcatactgttggtttggagttggaagggtactactctgtgattcaggtgtgttgtacccatatttataattaggctttattatcttcctaaatcaaggaaaggaaatcatccccagaccatttatgctgagctttggaatactattttaaactggattgtacttaaataatgaagctctgcatagaggaactagtcagaagtggggaaaacactgtctaatttttatcagtctggtataaagtattgatctaagagaactctccctgtgccccttggtctttattctcaattaagaaaaacagtcacatgtcacgacaaaccaatcaatctttatgagatattcctgtatccataccccagcttgtttgcaatttataaacctccccttcaaaactaaggagttgcagaaaaaaatggatttcacagagccttgtgtccctaaagttctgtcccagtcagcagtctttatagtccaaacagattataaaaaatgttttccatttgaactttacagtttgcaaaagtgcttttatacattttctaatttcagaaacaggataatttgttaagtgggtttcagtttgctaatagggannnnnnnnnnnnnnnnnnnnnnnnnncagcatctcttgaagaatcttgctacagccaaatggcatctcactttttaaagacgtttgcaattattagttgattcacagtacagaacaaggtataaaggaaaaaaccctgctaggtagtgttataattgctagattaaaaatagactagaacaggttcattttaagatttacttggaagagcaaagaaggaaaaattatatttttaaagaaagagaatattcaggctttatttctggtatgaagtttatattttttaaaaaaatcctatattatcacaccagagattttagattcttttctggttagaaacattgctggtagttggattatatttttattgtattcatttatcttacgggaacattgtaaagaaacaaaaaggtccagat

SEQ ID NO: 184304 - DNA, 1484 bp, Homo Sapiens
ttggctttgaagagaagatcaaggctgcaggtgggatcgagctatttgttggaggcatcggccctgatggacacattgccttcaacgagccaggctccagtctggtgtccaggacccgtgtgaagacgctggccatggataccatcctggccaatgctaggttcttcgatggagaactcaccaaggtgcccaccatggccttgacggtgggggtgggcactgtcatggatgctagagaggtgatgatccttatcacaggtgctcacaaggcatttgctctgtacaaggccatcgaggagggagtgaaccacatgtggaccgtgtctgccttccagcagcatccccgcaccgtgtttgtgtgtgacgaggatgccaccttggagctgaaagtgaagactgtcaagtatttcaaaggtttaatgcttgttcataacaagttggtggaccccttgtacagtatcaaagagaaagaaactgagaaaagccaatcttcgaagaaaccatacagcgattagcctgtgctgggacctagtgtcaagtacccatagggaaaggcaggtctttctggaaattgtctttagaagaaagaattgtatttctttaatctagtatggttactccagataagtgggtgaacttattgttcttggccatgaggctgggagcctagtcacggagtttagctatagggagaatgtttgtaacttaatcagaaaaaaaatatctgcaaaatgtactccatcattttgatgtctgccaaacccaggttgggagttttaaactttttgttctgcttcagccatggttcacacatatgacacactcccgtcaggaatttctctccttacacgcactgattttcaagtgggagggaattaggggcttatgtatattggataccacctcttgagagtccttcttgcacaggcctgccccttggttgagaaccattgttccaagtgaaggcacaaactctcaatatctaaaataagtgcaaggaagcagtctctttggtcagtaacaagtgcaatggaaagaaaacgatcccttccttcttccactttcacagcttttctctgaactaggagaacctgggggtggatttgggtgggtggggccaaagaggaggcttctattgataaatccagagcctcaaggggcccagccacgtcaaacttctctccctcagggactctccagcaccaaaaggcagaaggtggaagccgtttttcccccagagccctgtgtttttgtgaaaggcctcactgtggctcctctgttttacatactcattagtaagtgggaggtccactggggcaacagacactgccacaatttcagtgttgtgttcagccaaggggacagtctggacaggcagcttaagtgtgagtttagtcacaactcctgagtgtcccgctctcctgcttacctaagaagtgagtgccaggaaaatacaccaaaatgcttctagtattgtttcccca

SEQ ID NO: 184305 - DNA, 2336 bp, Homo Sapiens
  misc_feature (175)..(206): n is a, c, g, or t
ttggcatacatttaataacatagggtgacttgtgtttttaggtatttaaataataaaatttcaagggatagtttttattcaatgtatataagacaggtagtgcctgatttactactttatataaaatagtacctccttcagttactgtttctgatttaatgtacggaactttatnnnnnnnnnnnnnnnnnnnnnnnnnnnnnnnnttaaagcagtccaaatttggaccttagcaatcatgtcttttgtataggtacttaatgttaatacatattacactacagtttacttttcagaatactaaagactttataactgcatgaacttggatttttttaatcactcatatggtagaattttataaacacatacatgataccatccaaattcttgcttttaataacaaaggtacaatattttgttttagtatgaaaatctggtagatcctattacacttctgtttatattaaatccacaatattttattacatttttaacttgtataaattttaggtcaaatccttcaagccaacctatactaaaaattagttccataatcacaaatggctcttttgtgtaattgtttaatttcacctgaatatcataatgcttaaagccatatggagttggaaattatttccaaagcatatttattccattgttttagtctggctatttacagtataaaaaaagcatttttattaaaatactgtgtagttctttgagatagttgcttatgcatatagtaagtattacattcttagagtagagcagagtttttagttagtattaatttattttcctccattcatgtacttttccttatatttccaaaactgttactgagaatgggtcaagatcagtgagaaatctttacagttgacaggaacctggaccccttaccccaactttatgagtaatgcttggaataaaaactcttaaggcaactcactgatttacttctagcaatagcatgatgttacaggaatattacctctgtttaagcaaggtaatgtgtaaaatcagtctcggctgtcagaataacttctaaaaggtatttttataagcagttcaagttactgaaaaccttttaaacctttctgaagttcgttagtataaattacttttctaggattattaataaaagccacataggtggcaagttgtagttttatatggctctgtagagtggtgaaccttctagaggaatatatgatttattcacagttcctcaaggcctggggatgatgatcagttatacctatttttgtgcaattacatcatgttgtacattagaaatggagagtttaatagctctttaactgctgtcctcattaggtaatgataaatatttcccttaaataattgactattttgctgtgttttaaaaatgattgaaatttatcttgccatatctcataatttcatgcacaagttgactgagctaatcttgagaatatattcgtaaaataggagcacatttagttgaggtatacaaggtaggactctagacaaaaccttctattttagctttagtgaatttcaaaagtaatgggtcttggagtatagatttttattagtagcttgaaagagcttaatcatatgcagtaagtatttttattaccaataaatttaaaattttttaagaaaaatatttttatcctagggccaagtgttgcctgccaccaatcagtaagttagtctataacaaattttaccctaacagttttaccacctagtaacagtcatttctgaaaatatgttggatagaaagtcactctttggcaaaagtgttagaatttgcttttgtgccatctattccttttatggcatctatcttgaaagtaatcttgtattggagattgaaagatgctgtaatttagaaattaacatgatatcttaaattacctttatgaaatatagttttgtataatagcatagattttccttcaaaaaatgaacatttatatatctacaaaaatatggagaagagtaatttgaaagcctactttctgaagaaaatggtgggattttttttatcatgattaaatatcaaaaaattgccctatgaaaactttaaatctctaaaacatttgaaatactaccatatttgtgatttattgagaataaaaatccattttgaaatgtaaaatttttatgatctgattcagttttaagaaaacatgaatgaactagaagatattaaaaacatttgacattggtaagaaatattgatactgatattgatttttatataggtatttatttcagaattgatattttgagaaaaatacatgtgagtcattttttctgtttctcttttctcttaacgatta

SEQ ID NO: 184306 - DNA, 2589 bp, Homo Sapiens
  misc_feature (113)..(144): n is a, c, g, or t
  misc_feature (1551)..(1599): n is a, c, g, or t
  misc_feature (1969)..(1977): n is a, c, g, or t
ttgggatagtttttattcaatgtatataagacaggtagtgcctgatttactactttatataaaatagtacctccttcagttactgtttctgatttaatgtacggaactttatnnnnnnnnnnnnnnnnnnnnnnnnnnnnnnnnttaaagcagtccaaatttggaccttagcaatcatgtcttttgtataggtacttaatgttaatacatattacactacagtttacttttcagaatactaaagactttataactgcatgaacttggatttttttaatcactcatatggtagaattttataaacacatacatgataccatccaaattcttgcttttaataacaaaggtacaatattttgttttagtatgaaaatctggtagatcctattacacttctgtttatattaaatccacaatattttattacatttttaacttgtataaattttaggtcaaatccttcaagccaacctatactaaaaattagttccataatcacaaatggctcttttgtgtaattgtttaatttcacctgaatatcataatgcttaaagccatatggagttggaaattatttccaaagcatatttattccattgttttagtctggctatttacagtataaaaaaagcatttttattaaaatactgtgtagttctttgagatagttgcttatgcatatagtaagtattacattcttagagtagagcagagtttttagttagtattaatttattttcctccattcatgtacttttccttatatttccaaaactgttactgagaatgggtcaagatcagtgagaaatctttacagttgacaggaacctggaccccttaccccaactttatgagtaatgcttggaataaaaactcttaaggcaactcactgatttacttctagcaatagcatgatgttacaggaatattacctctgtttaagcaaggtaatgtgtaaaatcagtctcggctgtcagaataacttctaaaaggtatttttataagcagttcaagttactgaaaaccttttaaacctttctgaagttcgttagtataaattacttttctaggattattaataaaagccacataggtggcaagttgtagttttatatggctctgtagagtggtgaaccttctagaggaatatatgatttattcacagttcctcaaggcctggggatgatgatcagttatacctatttttgtgcaattacatcatgttgtacattagaaatggagagtttaatagctctttaactgctgtcctcattaggtaatgataaatatttcccttaaataattgactattttgctgtgttttaaaaatgattgaaatttatcttgccatatctcataatttcatgcacaagttgactgagctaatcttgagaatatattcgtaaaataggagcacatttagttgaggtatacaaggtaggactctagacaaaaccttctattttagctttagtgaatttcaaaagtaatgggtcttggagtatagatttttattagtagcttgaaagagcttaatcatatgcagtaagnnnnnnnnnnnnnnnnnnnnnnnnnnnnnnnnnnnnnnnnnnnnnnnnncctagggccaagtgttgcctgccaccaatcagtaagttagtctataacaaattttaccctaacagttttaccacctagtaacagtcatttctgaaaatatgttggatagaaagtcactctttggcaaaagtgttagaatttgcttttgtgccatctattccttttatggcatctatcttgaaagtaatcttgtattggagattgaaagatgctgtaatttagaaattaacatgatatcttaaattacctttatgaaatatagttttgtataatagcatagattttccttcaaaaaatgaacatttatatatctacaaaaatatggagaagagtaatttgaaagcctactttctgaagaaaatggtgggannnnnnnnnatcatgattaaatatcaaaaaattgccctatgaaaactttaaatctctaaaacatttgaaatactaccatatttgtgatttattgagaataaaaatccattttgaaatgtaaaatttttatgatctgattcagttttaagaaaacatgaatgaactagaagatattaaaaacatttgacattggtaagaaatattgatactgatattgatttttatataggtatttatttcagaattgatattttgagaaaaatacatgtgagtcattttttctgtttctcttttctcttaacgattatcactgtaattctgaatctgaaaggtaaaacaattagtcaaaatattattgccatcattctacctgtgttatgaaactacttattcatagttaattctcattaacacttacatttccataaagaaaactcaagtattaataaaagagactttactggcttaagagggctgtgaaagatttttgatagtgaatcatgaccctaagggagagatttgtgtgataaaagtattgtatataatagatcagcgatttttgtaaagcaaacagaatttgtaagttggcagatcttcctaagttgcaaaatgtaatgatga

SEQ ID NO: 184307 - DNA, 1446 bp, Homo Sapiens
  misc_feature (542)..(590): n is a, c, g, or t
  misc_feature (958)..(966): n is a, c, g, or t
ttgggttactgaaaaccttttaaacctttctgaagttcgttagtataaattacttttctaggattattaataaaagccacataggtggcaagttgtagttttatatggctctgtagagtggtgaaccttctagaggaatatatgatttattcacagttcctcaaggcctggggatgatgatcagttatacctatttttgtgcaattacatcatgttgtacattagaaatggagagtttaatagctctttaactgctgtcctcattaggtaatgataaatatttcccttaaataattgactattttgctgtgttttaaaaatgattgaaatttatcttgccatatctcataatttcatgcacaagttgactgagctaatcttgagaatatattcgtaaaataggagcacatttagttgaggtatacaaggtaggactctagacaaaaccttctattttagctttagtgaatttcaaaagtaatgggtcttggagtatagatttttattagtagcttgaaagagcttaatcatatgcagtaagnnnnnnnnnnnnnnnnnnnnnnnnnnnnnnnnnnnnnnnnnnnnnnnnncctagggccaagtgttgcctgccaccaatcagtaagttagtctataacaaattttaccctaacagttttaccacctagtaacagtcatttctgaaaatatgttggatagaaagtcactctttggcaaaagtgttagaatttgcttttgtgccatctattccttttatggcatctatcttgaaagtaatcttgtattggagattgaaagatgctgtaatttagaaattaacatgatatcttaaattacctttatgaaatatagttttgtataatagcatagattttccttcaaaatgaacatttatatatctacaaaaatatggagaagagtaatttgaaagcctactttctgaagaaaatggtgggannnnnnnnnatcatgattaaatatcaaaaaattgccctatgaaaactttaaatctctaaaacatttgaaatactaccatatttgtgatttattgagaataaaaatccattttgaaatgtaaaatttttatgatctgattcagttttaagaaaacatgaatgaactagaagatattaaaaacatttgacattggtaagaaatattgatactgatattgatttttatataggtatttatttcagaattgatattttgagaaaaatacatgtgagtcattttttctgtttctcttttctcttaacgattatcactgtaattctgaatctgaaaggtaaaacaattagtcaaaatattattgccatcattctacctgtgttatgaaactacttattcatagttaattctcattaacacttacatttccataaagaaaactcaagtattaataaaagagactttactggcttaagagggctgtgaaagattttt

SEQ ID NO: 184308 - DNA, 3058 bp, Homo Sapiens
  misc_feature (2868)..(2899): n is a, c, g, or t
ctttgtacaaaaaagttggatcaagtggcagaaatcgtatctaaatacgaccccaatgtttacagcatcaagtataataaccaattagcaactcggactgcacaagctatttttgatgacagctatttgggttattctgtggctgtcggagatttcaatggtgatggcatagatgactttgtttcaggagttccaagagcagcaaggactttgggaatggtttatatttatgatgggaagaacatgtcctccttatacaattttactggcgagcagatggctgcatatttcggattttctgtagctgccactgacattaatggagatgattatgcagatgtgtttattggagcacctctcttcatggatcgtggctctgatggcaaactccaagaggtggggcaggtctcagtgtctctacagagagcttcaggagacttccagacgacaaagctgaatggatttgaggtctttgcacggtttggcagtgccatagctcctttgggagatctggaccaggatggtttcaatgatattgcaattgctgctccatatgggggtgaagataaaaaaggaattgtttatatcttcaatggaagatcaacaggcttgaacgcagtcccatctcaaatccttgaagggcagtgggctgctcgaagcatgccaccaagctttggctattcaatgaaaggagccacagatatagacaaaaatggatatccagacttaattgtaggagcttttggtgtagatcgagctatcttatacagggccagaccagttatcactgtaaatgctggtcttgaagtgtaccctagcattttaaatcaagacaataaaacctgctcactgcctggaacagctctcaaagtttcctgttttaatgttaggttctgcttaaaggcagatggcaaaggagtacttcccaggaaacttaatttccaggtggaacttcttttggataaactcaagcaaaagggagcaattcgacgagcactgtttctctacagcaggtccccaagtcactccaagaacatgactatttcaagggggggactgatgcagtgtgaggaattgatagcgtatctgcgggatgaatctgaatttagagacaaactcactccaattactatttttatggaatatcggttggattatagaacagctgctgatacaacaggcttgcaacccattcttaaccagttcacgcctgctaacattagtcgacaggctcacattctacttgactgtggtgaagacaatgtctgtaaacccaagctggaagtttctgtagatagtgatcaaaagaagatctatattggggatgacaaccctctgacattgattgttaaggctcagaatcaaggagaaggtgcctacgaagctgagctcatcgtttccattccactgcaggctgatttcatcggggttgtccgaaacaatgaagccttagcaagactttcctgtgcatttaagacagaaaaccaaactcgccaggtggtatgtgaccttggaaacccaatgaaggctggaactcaactcttagctggtcttcgtttcagtgtgcaccagcagtcagagatggatacttctgtgaaatttgacttacaaatccaaagctcaaatctatttgacaaagtaagcccagttgtatctcacaaagttgatcttgctgttttagctgcagttgagataagaggagtctcgagtcctgatcatatctttcttccgattccaaactgggagcacaaggagaaccctgagactgaagaagatgttgggccagttgttcagcacatctatgagctgagaaacaatggtccaagttcattcagcaaggcaatgctccatcttcagtggccttacaaatataataataacactctgttgtatatccttcattatgatattgatggaccaatgaactgcacttcagatatggagatcaaccctttgagaattaagatctcatctttgcaaacaactgaaaagaatgacacggttgccgggcaaggtgagcgggaccatctcatcactaagcgggatcttgccctcagtgaaggagatattcacactttgggttgtggagttgctcagtgcttgaagattgtctgccaagttgggagattagacagaggaaagagtgcaatcttgtacgtaaagtcattactgtggactgagacttttatgaataaagaaaatcagaatcattcctattctctgaagtcgtctgcttcatttaatgtcatagagtttccttataagaatcttccaattgaggatatcaccaactccacattggttaccactaatgtcacctggggcattcagccagcgcccatgcctgtgcctgtgtgggtgatcattttagcagttctagcaggattgttgctactggctgttttggtatttgtaatgtacaggatgggcttttttaaacgggtccggccacctcaagaagaacaagaaagggagcagcttcaacctcatgaaaatggtgaaggaaactcagaaacttaactgcagtttttaagttatgctacatcttgacccactagaattagcaactttattatagatttaaactttcttcatgaggagtaaaaatccaaggctttactgctgatagtgctaattggcattaaccacaaaatgagaattatatttgtcaaccttctccttataaataagttcagacatacatttaataacatagggtgacttgtgtttttaggtatttaaataataaaatttcaagggatagtttttattcaatgtatataagacaggtagtgcctgatttactactttatataaaatagtacctccttcagttactgtttctgatttaatgtacggaactttatnnnnnnnnnnnnnnnnnnnnnnnnnnnnnnnnttaaagcagtccaaatttgggaccttagcaatcatgtcttttgtataggtacttaatgttaatacatattacactacagtttacttttcagaatactaaagactttataactgcatgaacttggatttttttaatcactcatatggtagaattttataa

SEQ ID NO: 184309 - DNA, 1625 bp, Homo Sapiens
ttggaaattttttaagaaaaatatttttatcctagggccaagtgttgcctgccaccaatcagtaagttagtctataacaaattttaccctaacagttttaccacctagtaacagtcatttctgaaaatatgttggatagaaagtcactctttggcaaaagtgttagaatttgcttttgtgccatctattccttttatggcatctatcttgaaagtaatcttgtattggagattgaaagatgctgtaatttagaaattaacatgatatcttaaattacctttatgaaatatagttttgtataatagcatagattttccttcaaaaaatgaacatttatatatctacaaaaatatggagaagagtaatttgaaagcctactttctgaagaaaatggtgggatttttttatcatgattaaatatcaaaaaattgccctatgaaaactttaaatctctaaaacatttgaaatactaccatatttgtgatttattgagaataaaaatccattttgaaatgtaaaatttttatgatctgattcagttttaagaaaacatgaatgaactagaagatattaaaaacatttgacattggtaagaaatattgatactgatattgatttttatataggtatttatttcagaattgatattttgagaaaaatacatgtgagtcattttttctgtttctcttttctcttaacgattatcactgtaattctgaatctgaaaggtaaaacaattagtcaaaatattattgccatcattctacctgtgttatgaaactacttattcatagttaattctcattaacacttacatttccataaagaaaactcaagtattaataaaagagactttactggcttaagagggctgtgaaagatttttgatagtgaatcatgaccctaagggagagatttgtgtgataaaagtattgtatataatagatcagcgatttttgtaaggcaaacagaatttgtaagttggcagatcttcctaagttgcaaaatgtaatgatgagcttggtggagaagaatgagtcgttcttggaatacctatgtgcagccactacccatctcaatgtcaccttgtttgcattcttggatagcttgtatatgtagtagtttgatgaataatttaaagaaaaacacctaaaatttgaaaaatgattgtaggatcaaaaaaggcagatgaaattacttaatactcagtgttttggagagtattccttttagtttgttggttggctggtttgaacgatagaaatatgcagcatgcaatatatgcttatatttcattttaatttctgatatataatgaacttcttgggagaggtactgaatctttgatgttttttgtcattgttctcaagtgcaatataacaatgtaaccaaatctagataatttcaaagttgtcattaatttagtaagcctaatataaacaaatatttgtattatttttgttagcaggaaagagtgattaagtgaggttatttacccctaaatggtccattctgcattgtatttcaagctggaaatgaattattctttaccagttttgaaacacttttgaaatatcctaagtaaacttggaagctgtgtagtatatcaaattaatttgctacct

SEQ ID NO: 184310 - DNA, 1215 bp, Homo Sapiens
  misc_feature (1002)..(1033): n is a, c, g, or t
ttggatcataatgaaggatatacaacagaatgttattattatattgatggaccaatgaactgcacttcagatatggagatcaaccctttgagaattaagatctcatctttgcaaacaactgaaaagaatgacacggttgccgggcaaggtgagcgggaccatctcatcactaagcgggatcttgccctcagtgaaggagatattcacactttgggttgtggagttgctcagtgcttgaagattgtctgccaagttgggagattagacagaggaaagagtgcaatcttgtacgtaaagtcattactgtggactgagacttttatgaataaagaaaatcagaatcattcctattctctgaagtcgtctgcttcatttaatgtcatagagtttccttataagaatcttccaattgaggatatcaccaactccacattggttaccactaatgtcacctggggcattcagccagcgcccatgcctgtgcctgtgtgggtgatcattttagcagttctagcaggattgttgctactggctgttttggtatttgtaatgtacaggatgggcttttttaaacgggtccggccacctcaagaagaacaagaaagggagcagcttcaacctcatgaaaatggtgaaggaaactcagaaacttaactgcagtttttaagttatgctacatcttgacccactagaattagcaactttattatagatttaaactttcttcatgaggagtaaaaatccaaggctttactgctgatagtgctaattggcattaaccacaaaatgagaattatatttgtcaaccttctccttataaataagttcagacatacatttaataacatagggtgacttgtgtttttaggtatttaaataataaaatttcaagggatagtttttattcaatgtatataagacaggtagtgcctgatttactactttatataaaatagtacctccttcagttactgtttctgatttaatgtacggaactttatnnnnnnnnnnnnnnnnnnnnnnnnnnnnnnnnttaaagcagtccaaatttggaccttagcaatcatgtcttttgtataggtacttaatgttaatacatattacactacagtttacttttcagaatactaaagactttataactgcatgaacttggattttttttaatcactcatatggtagaattttaaaaacacatacatgataccatccaaa

SEQ ID NO: 184311 - DNA, 1098 bp, Homo Sapiens
  misc_feature (308)..(352): n is a, c, g, or t
  misc_feature (368)..(398): n is a, c, g, or t
ttggcaacacaggaagtgaggatacttctggcgagcgccggttgctgtttcttctcaggctcagggaagtgtctgcacatcaccgaacgatgagagaggactacagcgacaaagtgaaagccagccactggagtcgcagcccgcctcggccgccgcgggagcggttcgagttgggagacggccggaagccagtaaaagaagagaaaatggaagaaagggacctgctgtccgacttacaggacatcagcgacagcgagaggaagaccagctcggccgagtcctcgtcagcagaatcaggctcaggttcnnnnnnnnnnnnnnnnnnnnnnnnnnnnnnnnnnnnnnnnnnnnncaccagtgaagaatcnnnnnnnnnnnnnnnnnnnnnnnnnnnnnnnaccggcagcaactctgaggaggcatcagagcagtctgccgaagaagtaagtgaggaagaaatgagtgaagatgaagaacgagaaaatgaaaaccacctcttggttgttccagagtcacggttcgaccgagattccggggagagtgaagaagcagaggaagaagtgggtgagggaacgccgcagagcagcgccctgacagagggcgactatgtgcccgactcccctgccctgttgcccatcgagctcaagcaggagctgcccaagtacctgccggccctgcagggctgccggagcgtcgaggagttccagtgcctgaacaggatcgaggagggcacctatggagtggtctacagagcaaaagacaagaaaacagatgaaattgtggctctaaagcggctgaagatggagaaggagaaggagggcttcccgatcacgtccctgagggagatcaacaccatcctcaaggctcagcatcccaacattgtcaccgttagagtgagcatggccccaccacgcctggccccgggtggaaggcttttccgacagggccccgtgctgtcctgaggccgggtgcttcctacactctcctgcacttagtggagcccttcacagaccacacagaagagattgtggtgggcagcaacatggacaagatctacatcgtgatgaactatgtggagcacgaactcaagagcctgat

SEQ ID NO: 184312 - DNA, 1156 bp, Homo Sapiens
  misc_feature (287)..(359): n is a, c, g, or t
ttgggagaaagagaggagccgactcggcagggactgggggaccgggccgagagtgcgagcgagcgagggagggagtgagggagcgtgcgagccagaaggggaaaggcggccactcgtgcctgagcgaccgcagaggggagtgggagcagtggggtaaaggagcggggggcgggaataagaaaggccgagagaaggcggacagaggctagtggtggtggtggtggtagggggagaaggaggagctggaggagggcaggggctgagggagtgagtgaagcggacgcgcnnnnnnnnnnnnnnnnnnnnnnnnnnnnnnnnnnnnnnnnnnnnnnnnnnnnnnnnnnnnnnnnnnnnnnnnntcggaggcgagtggaactggatcgggtttgctgccagcggcgtgagcttcggccgccattttacaacagctccactcgcgccggacacagggagcagcgagcacgcgtttcccgcaacccgataccatcggacaggatttctccgcctcagcccaacggggagatctctggaaacatggctacagaacatgttaatggaaatggtactgaagagcccatggatactacttctgcagttatccattcagaaaattttcagacattgcttgatgctggtttaccacagaaagttgctgaaaaactagatgaaatttacgttgcagggctagttgcacatagtgatttagatgaaagagctattgaagctttaaaagaattcaatgaagacggtgcattggcagttcttcaacagtttaaagacagtgatctctctcatgttcagaacaaaagtgcctttttatgtggagtcatgaagacttacaggcagagagaaaaacaagggaccaaagtagcagattctagtaaaggaccagatgaggcaaaaattaaggcactcttggaaagaacaggctacacacttgatgtgaccactggacagaggaagtatggaggaccacctccagattccgtttattcaggtcagcagccttctgttggcactgagatatttgtgggaaagatcccaagagatctatttgaggatgaacttgttccattatttgagaaagctggacctatatgggatcttcgtctaatgatggatccactccactggtctcaatagaggtatgcgtttg

SEQ ID NO: 184313 - DNA, 2732 bp, Homo Sapiens
  misc_feature (323)..(366): n is a, c, g, or t
ttgggggagagagaaagagaggagccgactcggcagggactgggggaccgggccgagagtgcgagcgagcgagggagggagtgagggagcgtgcgagccagaaggggaaaggcggccactcgtgcctgagcgaccgcagaggggagtgggagcagtggggtaaaggagcggggggcgggaataagaaaggccgagagaaggcggacagaggctagtggtggtggtggtggtagggggagaaggaggagctggaggagggcaggggctgagggagtgagtgaagcggacgcgcgagggaggggagggaagggtttgttttggannnnnnnnnnnnnnnnnnnnnnnnnnnnnnnnnnnnnnnnnnnntcggaggcgagtggaactggatcgggtttgctgccagcggcgtgagcttcggccgccattttacaacagctccactcgcgccggacacagggagcagcgagcacgcgtttcccgcaacccgataccatcggacaggatttctccgcctcagcccaacggggagggctagttgcacatagtgatttagatgaaagagctattgaagctttaaaagaattcaatgaagacggtgcattggcagttcttcaacagtttaaagacagtgatctctctcatgttcagaacaaaagtgcctttttatgtggagtcatgaagacttacaggcagagagaaaaacaagggaccaaagtagcagattctagtaaaggaccagatgaggcaaaaattaaggcactcttggaaagaacaggctacacacttgatgtgaccactggacagaggaagtatggaggaccacctccagattccgtttattcaggtcagcagccttctgttggcactgagatatttgtgggaaagatcccaagagatctatttgaggatgaacttgttccattatttgagaaagctggacctatatgggatcttcgtctaatgatggatccactcactggtctcaatagaggttatgcgtttgtcactttttgtacaaaagaagcagctcaggaggctgttaaactgtataataatcatgaaattcgttctggaaaacatattggtgtctgcatctcagttgccaacaataggctttttgtgggctctattcctaagagtaaaaccaaggaacagattcttgaagaatttagcaaagtaacagagggtcttacagacgtcattttataccaccaaccggatgacaagaaaaaaaacagaggcttttgctttcttgaatatgaagatcacaaaacagctgcccaggcaaggcgtaggttaatgagtggtaaagtcaaggtctgggggaatgttggaactgttgaatgggctgatcctatagaagatcctgatcctgaggttatggcaaaggtaaaagtgctgtttgtacgcaaccttgccaatactgtaacagaagagattttagaaaaggcatttagtcagtttgggaaactggaacgagtgaagaagttaaaagattatgcgttcattcattttgatgagcgagatggtgctgtcaaggctatggaagaaatgaatggcaaagacttggagggagaaaatattgaaattgtttttgccaagccaccagatcagaaaaggaaagaaagaaaagctcagaggcaagcagcaaaaaatcaaatgtatgacgattactactattatggtccacctcatatgccccctccaacaagaggtcgagggcgtggaggtagaggtggttatggatatcctccagattattatggatatgaagattattatgattattatggttatgattaccataactatcgtggtggatatgaagatccatactatggttatgaagattttcaagttggagctagaggaaggggtggtagaggagcaaggggtgctgctccatccagaggtcgtggggctgctcctccccgcggtagagccggttattcacagagaggaggtcctggatcagcaagaggcgttcgaggtgcgagaggaggtgcccaacaacaaagaggccgcgggagggaaaaggggtcgaggccggtcctgacctgttacaatgaagactgacttgctatgtgggattacaccagaagcttgcagtggagtaatggtaaggaaatcaagcaaccttaaatatgtcggctgtataggagcatattctattgcagaagaccttcctatgaagatcatggaatcaaatacgggacattgaactaatacttggactttgatatgaatttctttaacaattttctctgcagtgcaagttattaaactaaagctactctattttcaaaatgtgttccaacagaaatccttcataactcctagcatggtatcttaataaagaataaagttcttttaaaaatctgctctaagtagatttttccccttttttaaattaaggatcccaacagtggtattttgaaatattctcttgaatttgtgcatttaaattttattgcagtggtatagatgaatgccactgatggtatccttaaattttatttctgctcaccaaggttaatcatgattgtctatatcttttttatagtgatcacttttgaattgtgttcagatatgcagtttcaggtgtaatcatcagagctggttagtcacgcattccagatagtggttcttttcagaatctttttaaaagggttggttaactacctcagtagcagaggattgaactataccctgtctgtactgtacatagaaaa

SEQ ID NO: 184314 - DNA, 1303 bp, Homo Sapiens
gttggctaaacagcaggaagtccaattcaaaggtgagaaaaatactggatcaaaggtgttgaagacagtagccaagactaattaattcccttcagcttgagctttctggggcagataaaaagatttccagaattttacttttctgaatagatcttattttggatgaaaaattatgttgtgttttcagcttactacctgcccaaggatgatgagtattaccagttctgctatgtggatgaggatggtgtggtccggggagcaagtattcctttccaattccgtccagaaaatgaggaagacatcctggttgttaccactcagggagaggtggaagagattgagcagcacaacaaggagctttgcaaagaaaaccaggagctgaaggacagctgtatcagcctccagaagcagaactcagacatgcaggctgagctccaaaagaagcaggaggagctagaaaccctacagagcatcaataagaagttggaactgaaagtgaaagaacagaaggactattgggagacagagctgcttcaactgaaagaacaaaaccagaagatgtcctcagaaaatgagaagatgggaatcagagtggatcagcttcaggcccagctgtcaactcaagagaaagaaatggagaagcttgttcagggagatcaagataagacagagcagttagagcagctgaaaaaggaaaatgaccacctctttctcagtttaactgaacagaggaaggaccagaagaagctcgagcagacagtggagcaaatgaagcagaatgaaactactgcaatgaagaaacaacaggaattaatggatgaaaactttgacctgtcaaaaagactgagtgagaacgaaattatatgtaatgctctgcagagacagaaagagagattggaaggagaaaatgatcttttgaagagggagaacagcagattgctcagttacatgggtctggattttaattctttgccgtatcaagtacctacttcagatgaaggaggcgcaagacaaaatccaggacttgcctatggaaacccatattctggtatccaagaaagttcttcccccagcccgctctccatcaagaaatgccctatctgcaaagcagatgatatttgtgatcacaccttggagcaacagcagatgcagcccctttgtttcaattgtccaatttgtgacaagatcttcccagctacagagaagcagatctttgaagaccacgtgttctgccactctctctgagtatcccaacctcttggatgtatacagagattttatagaatagaacctatagcttcta

SEQ ID NO: 184315 - DNA, 2500 bp, Homo Sapiens
  misc_feature (2324)..(2343): n is a, c, g, or t
ttggctctgccctgttgctgtcgcgccgctgctggttgctgtccctggacccctaccatggaggagaccatcaaagatccccccacatcagctgtcttgctggatcactgtcatttctctcaggtcatctttaacagtgtggagaagttctacatccctggaggggacgtcacatgtcattataccttcacccagcatttcatccctcgtcgaaaggattggattggcatctttagagtggggtggaagacaacccgtgagtattacaccttcatgtgggttactttgcccattgacctaaacaacaaatcagctaaacagcaggaagtccaattcaaagcttactacctgcccaaggatgatgagtattaccagttctgctatgtggatgaggatggtgtggtccggggagcaagtattcctttccaattccgtccagaaaatgaggaagacatcctggttgttaccactcagggagaggtggaagagattgagcagcacaacaaggagctttgcaaagaaaaccaggagctgaaggacagctgtatcagcctccagaagcagaactcagacatgcaggctgagctccaaaagaagcaggaggagctagaaaccctacagagcatcaataagaagttggaactgaaagtgaaagaacagaaggactattgggagacagagctgcttcaactgaaagaacaaaaccagaagatgtcctcagaaaatgagaagatgggaatcagagtggatcagcttcaggcccagctgtcaactcaagagaaagaaatggagaagcttgttcagggagatcaagataagacagagcagttagagcagctgaaaaaggaaaatgaccacctctttctcagtttaactgaacagaggaaggaccagaagaagctcgagcagacagtggagcaaatgaagcagaatgaaactactgcaatgaagaaacaacaggaattaatggatgaaaactttgacctgtcaaaaagactgagtgagaacgaaattatatgtaatgctctgcagagacagaaagagagattggaaggagaaaatgatgtatccaagaaagttcttcccccagcccgctctccatcaagaaatgccctatctgcaaagcagatgatatttgtgatcacaccttggagcaacagcagatgcagcccctttgtttcaattgtccaatttgtgacaagatcttcccagctacagagaagcagatctttgaagaccacgtgttctgccactctctctgagtatcccaacctcttggatgtatacagagattttatagaatagaacctatagcttctaccatgagttatatgagtcaagatcctgcctaacctgaaattattagggatttactcagccctgctgccgctaacagtggagttatgtcactgatctgaaggtcactgttaagggcttctgctgccatccttgtgggttgctacctttaagtcgcataactctagctgtatcatcctctcacctgtcattcttctgagggtctcagtacaagggccctgggatggagccaacctgggtattcacaacaggcctgacttgatactaagtgattagttttccaagttgtcccactgccattcaaagtcagcccttgagtgtatttgttctcagtcctaaccctggggccagagattggtccgaggttgagaattccttcctcctcatccttggtgttgctttctccaaatgattgttttagactagccaaaaatgccgtggcaaagagctcagaaatccaatttggataccaaaggtttctcatgttaatttctcagcccccaaagaagcatcttactcctgaaccttagacaggaagtattgtttcagtcacagaaagcttttctgggtacctctggttagcactttctactctctgatatttcctatgtacatagcttttattgttgtaaatcctttcttaatggttaaataggattgttagcaactatgggtttgcagttttctgagtaggtgagttttgaatatgggtaaatcagaataatgagacaacttgttaatctctttaatactaaaaataaattactcttctatttcagggacttaggtaatttaaaataaaccttcaatttatggtcttctgttttgaagctcatgggaaaattgtgatcaaaagggctatgggaagggcagaccccgccaatgatttctcttcacctgtcttaagattaaataaaaaagagtgtcctggcagttatcttgaggtggggaaggaggtgatgaaacattagtttgtgaaatccaaggccctggcttgctttctttcnnnnnnnnnnnnnnnnnnnngaaacagtctctctctgtcacccaggctggcgtgcaatggcgcagttgactcactaacagcctctgcctccaaggttcaagcgatttctcatgccttatcctcccaagttgctgggattacaggtgtgtgcccgcaatgcccaactaaatttttgtg

SEQ ID NO: 184316 - DNA, 1932 bp, Homo Sapiens
  misc_feature (1530)..(1539): n is a, c, g, or t
taataataataataaattcaaggcacttgtatcagtgggtttgcagtatcaagggcaaagaacattttttatttctttgagaaattccttccacccaaaacccataaattcttctcctctcatagtagatctttattgtcaaacctaacaactgtaagttacctaagtggaattacttgtagaattgtgaatcatttgttcactctacaaataagtgaagaaataaactaaatgctttccacttaaagttgtctagtactattaactgcagttaaaacagaagcaaataaacttatctgtcatattcaatattgtcatttccataatgaagctttcttttccttttcaactgatgctggatgaaaaattcattatttaaaacatcccattaacaatttttccagatcaattttatttaaaaaataagttgacagaaagaagcaaaagcaacttactaatatgtcaaacaaaacacaagtaccaaacctaattcagcacaggtaacataatataaatcaacaaaaattcgattaaatatttcacactagataaaaagtagggtgttctatttcccctacaaaatatggaagctgacttttcaattacattgttttacatgctctaatcacaagtactaccatgtgactattcactgtgtgcttaggtaactatggttatattttcagaaggcttgaagcaaaatactagtgactcactattcagatgtacagagtcaacctgaggtacactgcctgcaactatcttaatatagttaagaaattacgtataaaagtgaaatgagaaccactgaaactaatctatcagatatatgacatcaccatcaaacaattcttcagctccaaaagagcaaagcatctgagagttagtctaagaatgcatgtactttaacaacacatgtataacagaaaataaagacaacggaaaagctcccttctaatgtagtgtacttttacaacacatatataacagaaaataaagacaatggagaaatgctctcttctaatgtagtaatttagagtactgaaaatgcaatttttgcagcactttaacaagtgagaattatgaaaatctgttcactgaacaggaatataaggaaaaactaaacatgtatcccaacttattaaaatgacacatctataggctacatctatcctgaatctctctataaggccaaattaacttttcacaattttctcttaataaatgattaaaaatatgaaaatacttaaaggaacatagcatttagactgtgaaactgtgttgtaaattttattatagttgtcattttttcttgatgttgaagactgcatcacagtttcataaataacattgcttgtgttttataatatatctgtatgcagaggtacgtttaacaacatctgcatgtatccccagaaattgttgctaattttagaacacatatttttattctgataatgatttaatttttttacttagtacttcagtagaaaacatgtgaatagattgtatgccccatatcagtatttnnnnnnnnnncctgaacaacattcttttaaatgtccatttaacaaaatatatgttaacggttattgttttatcatgattaaattggtatcaaattaataggcataagtgaaaaaactaatcacttactagtcatttagaaaatgcagtaacatcatgcattatgtattactaagaaagttctcacttaacataagcagtagatgaggagaacagtatcatgaaaattctaaatatatctttatgtatatccttaaaaatcactttcctttatataatttccattttaatttaaatgccacatatcttcagctaacatttaaattagtttttattgtaaaacttcagttgttatacatcataaaataccttcagaaacttgcttgaaggtcggaattattccaa

SEQ ID NO: 184317 - DNA, 889 bp, Homo Sapiens
ttggtgctcgagctcctccaggatgtctgggatgtctggttatatctgatttctgagctctgggcatggaggtctgtctgcagaggcccgggcctgggcacaaagggagagaggcctccattgtcccgcaggggccaaaatgcagaccgtgcatccccggtgacctcggggaccgttctgtgatcatcaggattttcttggactctggggtccttgtcctgctcaggcatccctgccctgctctccttgagggccctcaacactatcttccctggacacaagtctggggacagccgggtgttgaggagcccaaaggggtgactacctgctcctgggccccacagagtccttgtgctgagtgtagtggctgagctgggggatgccctggaattcggagcacacagcactggcttactgtggtacctgtgcagtgaaattgaagagagaatcaccaggatggaacacaggtcttgcaggatcacggaaaaccttcttagagttgtcttgacaccactgatgtcgagtgtccgggtgtttgtaggatggcctgccactcagtccaggggcaggagcaacggggagatcccacaagcaaagtgaactgggcgatgggctgaaggggctccaggcaactgagccctactcgcaggtcctcggccttggcccaaacaggaatgaggggcacagagtgcccgggtaaccgctcctgggagcagtggggaactgtcggatacttgaactctcgagagctgggctctgagcgtcctcgtccagctgccaacttggccaaagctaagccagcagattgttctgttgccgggcgacgcgacttctaaacctgagggagtgggcacgtgagcacataatgggcaccagtgacagagcgacc

SEQ ID NO: 184318 - DNA, 914 bp, Homo Sapiens
ttggcttcttcctttcgcggggtcctccgtagttctggcacgagccaggcgtactgacaggtggaccagcggactggtggagatggcgacgctctctctgaccgtgaattcaggagaccctccgctaggagctttgctggcagtagaacacgtgaaagacgatgtcagcatttccgttgaagaagggaaagagaatattcttcatgtttctgaaaatgtgatattcacagatgtgaattctatacttcgctacttggctagagttgcaactacagctgggttatatggctctaatctgatggaacatactgagattgatcactggttggagttcagtgctacaaaattatcttcatgtgattcctttacttctacaattaatgaactcaatcattgcctgtctctgagaacatacttagttggaaactccttgagtttagcagatttatgtgtttgggccaccctaaaaggaaatgctgcctggcaagaacagttgaaacagaagaaagctccagttcatgtaaaacgttggtttggctttcttgaagcccagcaggccttccagtcagtaggtaccaagtgggatgtttcaacaaccaaagctcgagtggcacctgagaaaaagcaagatgttgggaaatttgttgagcttccaggtgcggagatgggaaaggttaccgtcagatttcctccagaggccagtggttacttacacattgggcatgcaaaagctgctcttctgaaccagcactaccaggttaactttaaagggaaactgatcatgagatttgatgacacaaatcctgaaaaagaaaaggaagattttgagaaggttatcttggaagatgttgcaatgttgcatatcaaaccagatcaatttacttatacttcggatcattttgaaaactataatg

SEQ ID NO: 184319 - DNA, 4244 bp, Homo Sapiens
  misc_feature (2382)..(2441): n is a, c, g, or t
aactttgtacaaaaaagttggctcgagtggcccctgagaaaaagcaagatgttgggaaatttgttgagcttccaggtgcggagatgggaaaggttaccgtcagatttcctccagaggccagtggttacttacacattgggcatgcaaaagctgctcttctgaaccagcactaccaggttaactttaaagggaaactgatcatgagatttgatgacacaaatcctgaaaaagaaaaggaagattttgagaaggttatcttggaagatgttgcaatgttgcatatcaaaccagatcaatttacttatacttcggatcattttgaaactataatgaagtatgcagagaagctaattcaagaagggaaggcttatgtggatgatactcctgctgaacagatgaaagcagaacgtgagcagaggatagaatctaaacatagaaaaaaccctattgagaagaatctacaaatgtgggaagaaatgaaaaaagggagccagtttggtcagtcctgttgtttgcgagcaaaaattgacatgagtagtaacaatggatgcatgagagatccaaccctttatcgctgcaaaattcaaccacatccaagaactggaaataaatacaatgtttatccaacatatgattttgcctgccccatagttgacagcatcgaaggtgttacacatgccctgagaacaacagaataccatgacagagatgagcagttttactggattattgaagctttaggcataagaaaaccatatatttgggaatatagtcggctaaatctcaacaacacagtgctatccaaaagaaaactcacatggtttgtcaatgaaggactagtagatggatgggatgacccaagatttcctacggttcgtggtgtactgagaagagggatgacagttgaaggactgaaacagtttattgctgctcagggctcctcacgttcagtcgtgaacatggagtgggacaaaatctgggcgtttaacaaaaaggttattgacccagtggctccacgatatgttgcattactgaagaaagaagtgatcccagtgaatgtacctgaagctcaggaggagatgaaagaagtagccaaacacccaaagaatcctgaggttggcttgaagcctgtgtggtatagtcccaaagttttcattgaaggtgctgatgcagagactttttcggagggtgagatggttacatttataaattggggcaacctcaacattacaaaaatacacaaaaatgcagatggaaaaatcatatctcttgatgcaaagttgaatttggaaaacaaagactacaagaaaaccactaaggtcacttggcttgcagagactacacatgctcttcctattccagtaatctgtgtcacttatgagcacttgatcacaaagccagtgctaggaaaagacgaggactttaagcagtatgtcaacaagaacagtaagcatgaagagctaatgctaggggatccctgccttaaggatttgaaaaaaggagatattatacaactccagagaagaggattcttcatatgtgatcaaccttatgaacctgttagcccatatagttgcaaggaagccccgtgtgttttgatatacattcctgatgggcacacaaaggaaatgccaacatcagggtcaaaggaaaagaccaaagtagaagccacaaaaaatgagacctctgctccttttaaggaaagaccaacaccttctctgaataataattgtactacatctgaggattccttggtcctttacaatagagtggctgttcaaggagatgtggttcgtgaattaaaagccaagaaagcaccaaaggaagatgtagatgcagctgtaaaacagcttttgtctttgaaagctgaatataaggagaaaactggccaggaatataaacctggaaaccctcctgctgaaataggacagaatatttcttctaattcctcagcaagtattctggaaagtaaatctctgtatgatgaagttgctgcacaaggggaggtggttcgtaagctaaaagctgaaaaatcccctaaggctaaaataaatgaagctgtagaatgcttactgtccctgaaggctcagtataaagaaaaaactgggaaggagtacatacctggtcagcccccattatctcaaagttcggattcaagcccaaccagaaattctgaacctgctggtttagaaacaccagaagcgaaagtactttttgacaaagtagcttctcaaggggaagtagttcggaaacttaaaactgaaaaagcccctaaggatcaagtagatatagctgttcaagaactccttcagctaaaggcacagtacaagtctttgataggagtagagtataagcctgtgtcggccactggagctgaggacnnnnnnnnnnnnnnnnnnnnnnnnnnnnnnnnnnnnnnnnnnnnnnnnnnnnnnnnnnnncaaaatgatggccaaaggaaagacccttctaaaaaccaaggaggtgggctctcatcaagtggagcaggagaagggcaggggcctaagaaacagaccaggttgggtcttgaggcaaaaaaagaagaaaatcttgctgattggtattctcaggtcatcacaaagtcagaaatgattgaataccatgacataagtggctgttatattcttcgtccctgggcctatgccatttgggaagccatcaaggacttttttgatgctgagatcaagaaacttggtgttgaaaactgctacttccccatgtttgtgtctcaaagtgcattagagaaagagaagactcatgttgctgactttgccccagaggttgcttgggttacaagatctggcaaaaccgagctggcagaaccaattgccattcgtcctactagtgaaacagtaatgtatcctgcatatgcaaaatgggtacaatcacacagagacctgcccatcaagctcaatcagtggtgcaatgtggtgcgttgggaattcaagcatcctcagcctttcctacgtactcgtgaatttctttggcaggaagggcacagtgcttttgctaccatggaagaggcagcggaagaggtcttgcagatacttgacttatatgctcaggtatatgaagaactcctggcaattcctgttgttaaaggaagaaagacggaaaaggaaaaatttgcaggaggagactatacaactacaatagaagcatttatatctgctagtggaagagctatccagggaggaacatcacatcatttagggcagaatttttccaaaatgtttgaaatcgtttttgaagatccaaagataccaggagagaagcaatttgcctatcaaaactcctggggcctgacaactcgaactattggtgttatgaccatggttcatggggacaacatgggtttagtattaccaccccgtgtagcatgtgttcaggtggtgattattccttgtggcattaccaatgcactttctgaagaagacaaagaagcgctgattgcaaaatgcaatgattatcgaaggcgattactcagtgttaacatccgcgttagagctgatttacgagataattattctccaggttggaaattcaatcactgggagctcaagggagttcccattagacttgaagttgggccacgtgatatgaagagctgtcagtttgtagccgtcagacgagatactggagaaaagctgacagttgctgaaaatgaggcagagactaaacttcaagctattttggaagacatccaggtcacccttttcacaagggcttctgaagaccttaagactcatatggttgtggctaatacaatggaagactttcagaagatactagattctggaaagattgttcagattccattctgtggggaaattgactgtgaggactggatcaaaaagaccactgccagggatcaagatcttgaacctggtgctccatccatgggagctaaaagcctttgcatccccttcaaaccactctgtgaactgcagcctggagccaaatgtgtctgtggcaagaaccctgccaagtactacaccttatttggtcgcagctactgagggatgaacgaaagccccctcttcaactcctctcactttttaaagcattgatattagtatcttctcagatacagaccgttttatgattttttaaaaagtaaaagttctaaaatgaagtcacacaggacaattattcttatgcctaagttaacagtggataaaagacttttctgtaaacaactccagtaataaatatcatgaact

SEQ ID NO: 184320 - DNA, 1692 bp, Homo Sapiens
ttggctaggacagccaaggacggcctcgtggggtaacatgggatctaagacaggaggaggtttcaagaaactgcgcagatctgaagcagcagcaccccaggccgcacaagcagcacacaccggggccctctgtcagctgctgtgtttaatgaacgaggaggaggtggtgtggcttggtgggggacaccaggaggaaatgagatcgaagggttggagcatgggtctgtggaccgtgggaaccctggaagcactcggaaggatggggcctggtggaggaggactgggaaagccgggaagctgggtcaaggtgtggggtgtagaggcgccctcagatgtccacacggtccattggcctccggggtcctctgttcctgttctccctcaagccatgggagcttggcaagtgagctgggcctccacttccttatctatgacatagggagggtgcaggccccctgaggaggtgggactccgggctggcggagggggaatgtagggcagatggtcccaacaggccagaggccactggtgtcaggcatcagcagcttcctcctcagagtccaggtctgccgctgccttcgtgcccacggtcttcactccctgcgccgggaccaacaatgccctggctcctgagggctgcttttgacctgtgtggggagcagccccaacttggggtggggtcttacaggcttctggacctgccttttcctgacaattcaggtcagagtctcaagtcccctgggaggggccccaagcagctgtgaggcctgggtgctcggagcccactgaccgctagccttgtgcttgtccccagcggcaagcctgcacgagctgtgtgctgccagagtgtcagaggtccttcaaaacagagtgcacaggacggaggaagtgaagcatgtggacttctatgctttctcctactattacgaccttgcagctggtgtgggcctcatagatgcggagaagggaggcagcctggtggtgggggacttcgagatcgcagccaagtacgtgtgtcggaccctggagacacagccgcagagcagccccttctcatgcatggacctcacctacgtcagcctgctactccaggagttcggctttcccaggagcaaagtgctgaagctcactcggaaaattgacaatgttgagaccagctgggctctgggggccatttttcattacatcgactccctgaacagacagaagagtccagcctcatagtggccgagccatccctgtccccgtcagcagtgtctgtgtgtctgcataaaccctcctgtcctggacgtgacttcatcctgaggagccacagcacaggccgtgctggcactttctgcacactggctctgggacttgcagaaggcctggtgctgccctggcatcagcctcttccagtcacatctggccagagggctgtctggacctgggccctgctcaatgccacctgtctgcctgggctccaagtgggcaggaccaggacagaaccacagggcacacactgagggggcagtgtggctccctgcctgtcccatccccatgcccccgtccgcggggctgtggctgctgctgtgcatgtccctgcgatgggagtcttgtctcccagcctgtcagtttcctccccagggcagagctctcttcctgcgagagtctgggaaggcggtgcaaggctgtcctgtctgctctggggaa

SEQ ID NO: 184321 - DNA, 966 bp, Homo Sapiens
ggagggtttatgcagacacacagacactgctgacggggacagggatggctcggccactatgaggctggactcttctgtctgttcagggagtcgatgtaatgaaaaatggcccccagagcccagctggtctcaacattgtcaattttccgagtgagcttcagcactttgctcctgggaaagccgaactcctggagtagcaggctgacgtaggtgaggtccatgcatgagaaggggctgctctgcggctgtgtctccagggtccgacacacgtacttggctgcgatctcgaagtcccccaccaccaggctgcctcccttctccgcatctatgaggcccacaccagctgcaaggtcgtaatagtaggagaaagcatagaagtccacatgcttcacttcctccgtcctgtgcactctgttttgaaggacctctgacactctggcagcacacagctcgtgcaggcttgccgctgctttctgccctgaaaccctgtacgtgacttctgcgtgttcccactctcctttgaaactgggagacaagcaagggctgaccaactcctttccatccttagcaggctgcccctccacgccgcccaggatcgccaggcgtgccgacatcagcccgagcccgaggtagctgtaggaatagagcttgtaggtcctgttaaacatccgcagtgccgtcaggtagccgggtggggaggcctgcagggtgccctccacgcgtggcaggaaggcgatctgagtggatcctccgcccaagtccagcatgcccacgctgctccctcctggagttttcaagctgcctgtcaggaagttgatggtgatccacgccgaaacgccttcatctgttccgttcatgatggaaacacagtcatcccctacaaggaaaggcgatgctttaaatacttctttcaccttctgcagtaacttctgggccttttctccaacttttttgtacaaagttggc

SEQ ID NO: 184322 - DNA, 1640 bp, Homo Sapiens
gaggaggatccagtgtgacagtcatcaacgtcagaagcaccatagtgatgactgagataagaaacaaatattgtataattctggaaagaaatgtaaaacatggaagatatttcctcacagaaatggaaaaggatttcaactgcagttcttcttcagaagtcttttcaaatattgaaaaggaagttacacaagctataaaaaatgccattgttgtcacaacagagggcattaggagttcatccttcaatagaagaggtagcatactaaatgttgacacaagtaaaaaccaagtagacataaaaggaatttcacttaaaactaagcagactggtagtgacaccaagagaatggatttttcatgtacttggaaagaaaataaaaagaatgatagcgcacagctaaccagtgtaaatttgaatcctttggaagagggctgaagtattaattttatgcatgcaggaagcaggctcaaaaacgtaaaacaaaagctcattattaattggatgtgacgtggcaaaatatccttaatcttcagaaagacattgaagctgcaccaaatattggctactttatcctcaaataatccacgatcaaccgggaagagtcttcttagaacctgcagggtttgttccctttctgtaaagaatggcagccagcagagaacgaaggaagccacaacaatacaagctagcttaactagcaacacaaacccctttcctttgaggccttttttaaaacacttgccaagtaaaaagcaaaaaaatggcaaggcgtggtaaagttccatctgtttataatttatagctaagcaaaatgccagtgaccctaggaggtcgcagtcacaagatattccaagaacaccccacaaagcaaagccaagactcacagaattatattgaaaatgtccatagtctataagaataaggcctggatacagcaagatgcataatgcattagcaatctttttcttagttgagatttcttttaagcaacaacagtacaaaaccactgcaggtatgtaaatcagcagatcagcaattaaaactgttgtacgcatgaagagcttatgtgcctgactctcatatccacgtgatgtatggagagcaatccagtctggatttataaactttgccacatatgcacataggagactatgataagctgtaagaggtgggtaatccaatccccaatactgtaaattgttatcactgctgttaaaataccattgtttgaccggtaaattaaaagttatttcttgccagtgtctctgagcttcataatcaccaaacataggcggtttaccagcacctgaataagaattaagagacactgtccatcgtactgttagtcctattaaaaccactactgtcatcaagtaccatttctccatagttcttcaaatttagggaggggaagaaaacacagcaccagtgccagagtacttttaaaacgtggtcaatcacttcttttcttgttcagagaaatgttatcacttcttgaaatgttatcgattcttcgcaattaggagtttgagagaattttaatgatgcttggtttccaaatagtcaaaacttgattatgtctatgtagaagtatccccgccgcccgccggccgctgggattcgcgcctgccgtgccaa

SEQ ID NO: 184323 - DNA, 1659 bp, Homo Sapiens
  misc_feature (1336)..(1383): n is a, c, g, or t
ttggcagatcgagaccactttggccgtacattctataatcaggcaattatgtcttctaaaaatattgcacagatcgcagtggtcatgggctcctgcaccgcaggaggagcctatgtgcctgccatggctgatgaaaacatcattgtacgcaagcagggtaccattttcttggcaggaccccccttggttaaagcggcaactggggaagaagtatctgctgaggatcttggaggtgctgatcttcattgcagaaagtctggagtaagtgaccactgggctttggatgatcatcatgcccttcacttaactaggaaggttgtgaggaatctaaattatcagaagaaattggatgtcaccattgaaccttctgaagagcctttatttcctgctgatgaattgtatggaatagttggtgctaaccttaagaggagctttgatgtccgagaggtcattgctagaatcgtggatggaagcagattcactgagttcaaagccttttatggagacacattagttacaggatttgctcgaatatttgggtacccagtaggtatcgttggaaacaacggagttctcttttctgaatctgcaaaaaagggtactcactttgtccagttatgctgccaaagaaatattcctctgctgttccttcaaaacattactggatttatggttggtagagagtatgaagctgaaggaattgccaaggatggtgccaagatggtggccgctgtggcctgtgcccaagtgcctaagataaccctcatcattgggggctcctatggagccggaaactatgggatgtgtggcagagcgtatagcccaagatttctctacatttggccaaatgctcgtatctcagtgatgggaggagagcaggcagccaatgtgttggccacgataacaaaggaccaaagagcccgggaaggaaagcagttctccagtgctgatgaagcggctttaaaagagcccatcattaagaagtttgaagaggaaggaaacccttactattccagcgcaagggtatgggatgatgggatcattgatccagcagacaccagactggtcttgggtctcagttttagtgcagccctcaacgcaccaatagagaagactgacttcggtatcttcaggatgtaactggaataaaggatgttttctgttggacatgtactgaaaattaacacatgtagtagccttaaaattttagacttctcgaacatgaggctgttacagtaatttttttaacactgtgcattgtacttttctaccttaaaaaaatcagtgaggatatttatttaatgaacatcaattccttttaaattttcttagagannnnnnnnnnnnnnnnnnnnnnnnnnnnnnnnnnnnnnnnnnnnnnnnttatggttatcctttctgacccacaaagtatgaaaagttctgtaatctgtaaactcagttctgtaatctgtattattgagatgattaatataaagttgtattttcactgaaatgattgttttgctggttatgcttggtgatattttagcgggcttatttttgaaaggcatctgttacttcagtggcataaagtgccctcacactgctgtgcagccatcaccaccattcatctccagaatttgttctcagtcccaaactgaaactataccattcaaa

SEQ ID NO: 184324 - DNA, 1433 bp, Homo Sapiens
  misc_feature (306)..(337): n is a, c, g, or t
  misc_feature (1153)..(1192): n is a, c, g, or t
ttgggtgtttttgaaatattaaaccctggatcagtcctttgatcagtataattttttaaagttactttgtcagaggcacaaaagggtttaaactgattcataataaatatctgtacttcttcgatcttcaccttttgtgctgtgattcttcagtttctaaaccagcactgtctgggtccctacaatgtatcaggaagagctgagaatggtaaggagactcttctaagtcttcatctcagagaccctgagttcccactcagacccactcagccaaatctcatggaagaccaaggagggcagcactgnnnnnnnnnnnnnnnnnnnnnnnnnnnnnnnngacactgtccaaaggttttccatcctgtcctggaatcagagttggaagctgaggagcttcagcctcttttatggtttaatggccacctgttctctcctgtgaaaggctttgcaaagtcacattaagtttgcatgacctgttatccctggggccctatttcatagaggctggccctattagtgatttccaaaaacaatatggaagtgccttttgatgtcttacaataagagaagaagccaatggaaatgaaagagattggcaaaggggaaggatgatgccatgtagatcctgtttgacatttttatggctgtatttgtaaacttaaacacaccagtgtctgttcttgatgcagttgctatttaggatgagttaagtgcctggggagtccctcaaaaggttaaagggattcccatcattggaatcttatcaccagataggcaagtttatgaccaaacaagagagtactggctttatcctctaacctcatattttctcccacttggcaagtcctttgtggcatttattcatcagtcagggtgtccgattggtcctagaacttccaaaggctgcttgtcatagaagccattgcatctataaagcaacggctcctgttaaatggtatctcctttctgaggctcctactaaaagtcatttgttacctaaacttatgtgcttaacaggcaatgcttctcagaccacaaagcagaaagaagaagaaaagctcctgactaaatcagggctgggcttagacagagttgatctgtagaatatctttaaaggagagatgtcaactttctgcactattcccagcctctnnnnnnnnnnnnnnnnnnnnnnnnnnnnnnnnnnnnnnnnacttcaccccacaatcttgaaaaacttcctttctcttctgtgaacatcattggccagatccattttcagtggtctggatttctttttattttcttttcaacttgaaagaaactggacattaggccactatgtgttgttactgccactagtgttcaagtgcctcttgttttcccagagatttcctgggtctgccagaggctcagacaggctcactcaagctctttaactgaaagcaacaagc

SEQ ID NO: 184325 - DNA, 1893 bp, Homo Sapiens
  misc_feature (1574)..(1626): n is a, c, g, or t
ttggatcttcacacaacaacacaaatggctggtacgtcttcaaataccatctcagcaggctgggagccaaatgaagaaaatgaagatgaaagagacagacacctcagtttttctggatcaggcattgatgatgatgaagattttatctccagcaccatttcaaccacaccacgggcttttgaccacacaaaacagaaccaggactggacccagtggaacccaagccattcaaatccggaagtgctacttcagacaaccacaaggatgactgcagatgtagacagaaatggcaccactgcttatgaaggaaactggaacccagaagcacaccctcccctcattcaccatgagcatcatgaggaagaagagaccccacattctacaagcacaatccaggcaactcctagtagtacaacggaagaaacagctacccagaaggaacagtggtttggcaacagatggcatgagggatatcgccaaacacccagagaagactcccattcgacaacagggacagctgcagcctcagctcataccagccatccaatgcaaggaaggacaacaccaagcccagaggacagttcctggactgatttcttcaacccaatctcacaccccatgggacgaggtcatcaagcaggaagaaggatggatatggactccagtcatagtacaacgcttcagcctactgcaaatccaaacacaggtttggtggaagatttggacaggacaggacctctttcaatgacaacgcagcagagtaattctcagagcttctctacatcacatgaaggcttggaagaagataaagaccatccaacaacttctactctgacatcaagcaataggaatgatgtcacaggtggaagaagagacccaaatcattctgaaggctcaactactttactggaaggttatacctctcattacccacacacgaaggaaagcaggaccttcatcccagtgacctcagctaagactgggtcctttggagttactgcagttactgttggagattccaactctaatgtcaatcgttccttatcaggagaccaagacacattccaccccagtggggggtcccataccactcatggatctgaatcagatggacactcacatgggagtcaagaaggtggagcaaacacaacctctggtcctataaggacaccccaaattccagaatggctgatcatcttggcatccctcttggccttggctttgattcttgcagtttgcattgcagtcaacagtcgaagaaggtgtgggcagaagaaaaagctagtgatcaacagtggcaatggagctgtggaggacagaaagccaagtggactcaacggagaggccagcaagtctcaggaaatggtgcatttggtgaacaaggagtcgtcagaaactccagaccagtttatgacagctgatgagacaaggaacctgcagaatgtggacatgaagattggggtgtaacacctacaccattatcttggaaagaaacaaccgttggaaacataaccattacagggagctgggacacttaacagatgcaatgtgctactgattgtttcattgcgaannnnnnnnnnnnnnnnnnnnnnnnnnnnnnnnnnnnnnnnnnnnnnnnnnnnnaaagtcaggtccaatttgtaaaaacagcattgctttctgaaattagggcccaattaataatcagcaagaatttgatcgttccagttcccacttggaggcctttcatccctcgggtgtgctatggatggcttctaacaaaaactacacatatgtattcctgatcgccaacctttcccccaccagctaagacatttcccagggttaatagggcctggtccctggaggaaatttgaatgggtccattttgcccttccatagcctaatccc

SEQ ID NO: 184326 - DNA, 2717 bp, Homo Sapiens
  misc_feature (900)..(950): n is a, c, g, or t
  misc_feature (1660)..(1692): n is a, c, g, or t
  misc_feature (2508)..(2547): n is a, c, g, or t
ttggaatgtctagtctcaacctcatacctgcaaagatatcacaatatttttgttagcatgttccttaccacagttcttggatttctaccaaaacaaagtttctacaaaacttcctgtggtcatccttcttagcctttgctgccccagtttccttaattcttattaaagttctagctcatttatcagtggattaagcaatgaacggtaattaacattgtggacccattcaaggctgttttgccatcattttttggaataccttaaaaagactaaactttgtgataggctgtataagaatgcaaaggtaaagaaatgcagatgggagtgtaagtgaaaacatgcagtactgaccttcctgattgctcattacaggagaccaagacacattccaccccagtggggggtcccataccactcatggatctgaatcagatggacactcacatgggagtcaagaaggtggagcaaacacaacctctggtcctataaggacaccccaaattccagaatggctgatcatcttggcatccctcttggccttggctttgattcttgcagtttgcattgcagtcaacagtcgaagaaggtgtgggcagaagaaaaagctagtgatcaacagtggcaatggagctgtggaggacagaaagccaagtggactcaacggagaggccagcaagtctcaggaaatggtgcatttggtgaacaaggagtcgtcagaaactccagaccagtttatgacagctgatgagacaaggaacctgcagaatgtggacatgaagattggggtgtaacacctacaccattatcttggaaagaaacaaccgttggaaacataaccattacagggagctgggacacttaacagatgcaatgtgctactgattgtttcattgcgaatcnnnnnnnnnnnnnnnnnnnnnnnnnnnnnnnnnnnnnnnnnnnnnnnnnnnaaagtcaggtccaatttgtaaaaacagcattgctttctgaaattagggcccaattaataatcagcaagaatttgatcgttccagttcccacttggaggcctttcatccctcgggtgtgctatggatggcttctaacaaaaactacacatatgtattcctgatcgccaacctttcccccaccagctaaggacatttcccagggttaatagggcctggtccctgggaggaaatttgaatgggtccattttgcccttccatagcctaatccctgggcattgttttccactgaggttgggggttggggtgtactagttacacatcttcaacagaccccctctagaaatttttcagatgcttctgggagacacccaaagggtgagctatttatctgtagtaaactatttatctgtgtttttgaaatattaaaccctggatcagtcctttgatcagtataattttttaaagttactttgtcagaggcacaaaagggtttaaactgattcataataaatatctgtacttcttcgatcttcaccttttgtgctgtgattcttcagtttctaaaccagcactgtctgggtccctacaatgtatcaggaagagctgagaatggtaaggagactcttctaagtcttcatctcagagaccctgagttcccactcagacccactcagccaaatctcatggaagaccaaggagggcagcactgnnnnnnnnnnnnnnnnnnnnnnnnnnnnnnnnngacactgtccaaaggttttccatcctgtcctggaatcagagttggaagctgaggagcttcagcctcttttatggtttaatggccacctgttctctcctgtgaaaggctttgcaaagtcacattaagtttgcatgacctgttatccctggggccctatttcatagaggctggccctattagtgatttccaaaaacaatatggaagtgccttttgatgtcttacaataagagaagaagccaatggaaatgaaagagattggcaaaggggaaggatgatgccatgtagatcctgtttgacatttttatggctgtatttgtaaacttaaacacaccagtgtctgttcttgatgcagttgctatttaggatgagttaagtgcctggggagtccctcaaaaggttaaagggattcccatcattggaatcttatcaccagataggcaagtttatgaccaaacaagagagtactggctttatcctctaacctcatattttctcccacttggcaagtcctttgtggcatttattcatcagtcagggtgtccgattggtcctagaacttccaaaggctgcttgtcatagaagccattgcatctataaagcaacggctcctgttaaatggtatctcctttctgaggctcctactaaaagtcatttgttacctaaacttatgtgcttaacaggcaatgcttctcagaccacaaagcagaaagaagaagaaaagctcctgactaaatcagggctgggcttagacagagttgatctgtagaatatctttaaaggagagatgtcaactttctgcactattcccagcctctnnnnnnnnnnnnnnnnnnnnnnnnnnnnnnnnnnnnnnnnacttcaccccacaatcttgaaaaacttcctttctcttctgtgaacatcattggccagatccattttcagtggtctggatttctttttattttcttttcaacttgaaagaaactggacattagtccactatgtgttgttactgccactagtgttcaagtgcctcttgtttt

SEQ ID NO: 184327 - DNA, 1189 bp, Homo Sapiens
  misc_feature (193)..(225): n is a, c, g, or t
  misc_feature (1036)..(1080): n is a, c, g, or t
tttgtacaaaaaagttggcttttgtgctgtcgattcttcagtttctaaaccagcactgtctgggtccctacaatgtatcaggaagagctgagaatggtaaggagactcttctaagtcttcatctcagagaccctgagttcccactcagacccactcagccaaatctcatggaagaccaaggagggcagcactnnnnnnnnnnnnnnnnnnnnnnnnnnnnnnnnngacactgtccaaaggttttccatcctgtcctggaatcagagttggaagctgaggagcttcagcctcttttatggtttaatggccacctgttctctcctgtgaaaggctttgcaaagtcacattaagtttgcatgacctgttatccctggggccctatttcatagaggctggccctattagtgatttccaaaaacaatatggaagtgccttttgatgtcttacaataagagaagaagccaatggaaatgaaagagattggcaaaggggaaggatgatgccatgtagatcctgtttgacatttttatggctgtatttgtaaacttaaacacaccagtgtctgttcttgatgcagttgctatttaggatgagttaagtgcctggggagtccctcaaaaggttaaagggattcccatcattggaatcttatcaccagataggcaagtttatgaccaaacaagagagtactggctttatcctctaacctcatattttctcccacttggcaagtcctttgtggcatttattcatcagtcagggtgtccgattggtcctagaacttccaaaggctgcttgtcatagaagccattgcatctataaagcaacggctcctgttaaatggtatctcctttctgaggctcctactaaaagtcatttgttacctaaacttatgtgcttaacaggcaatgcttctcagaccacaaagcagaaagaagaagaaaagctcctgactaaatcagggctgggcttagacagagttgatctgtagaatatctttaaaggagagatgtcaactttctgcactattcccagnnnnnnnnnnnnnnnnnnnnnnnnnnnnnnnnnnnnnnnnnnnnnacttcaccccacaatcttgaaaaacttccctttctcttctgtgaacatcattggccagatccattttcagtggtctggatttcctttttattttcttttcaacttgaaa

SEQ ID NO: 184328 - DNA, 2157 bp, Homo Sapiens
aattgatgagcaatgctttcctttaaaagtagccaactttgtacaaaaaagttggatcagagacatgtggtacaaccttggtcaacacaagataaagttcattccagaaatggtgggcccaatattagaaatgacattaattcccgagacggagctgcgcaaagccaccatccccatcttctttgatatgatgcagtgtgaattccattcgacccgaagcttccaaatgtttgaaaatgagatcatcaccaagctggatcatgaagtcgaaggaggcagaggagacgaacagtacaaagtgttatttgataaaatccttctggaacactgcaggaagcacaaatacctcgccaaaacaggagaaacttttgtaaaactcgttgtgcgcttaatggaaaggcttttggattatagaaccatcatgcacgacgagaacaaagaaaaccgcatgagctgcaccgtcaatgtgctgaatttctacaaagaaattgaaagagaagaaatgtatataaggtatttgtacaagctctgtgacctgcacaaggagtgtgataactacaccgaagcggcttacaccttgcttctccatgcaaagcttcttaagtggtcggaggatgtgtgtgtggcccacctcacccagcgggacgggtaccaggccaccacgcagggacagctgaaggagcagctctaccaggaaatcatccactacttcgacaaaggcaagatgtgggaggaggccattgccttgggcaaggagctagccgagcagtatgagaacgaaatgtttgattatgagcaactcagcgaattgctgaaaaaacaggctcagttttatgaaaacatcgtcaaagtgatcaggcccaagcctgactattttgctgttggctactacggacaagggttccccacattcctgcggggaaaagttttcatttaccgagggaaagagtatgagcgccgggaagattttgaggctcggctcttaactcagtttccaaacgccgagaaaatgaagacaacatctccaccaggcgacgatattaaaaactctcctggccagtatattcagtgcttcacagtgaagcccaaactcgatctgcctcctaagtttcacaggccagtgtcagagcagattgtaagtttttacagggtgaacgaggtccagcgatttgaatattctcggccaatccggaagggagagaaaaacccagacaatgaatttgcgaatatgtggatcgagagaaccatatatacaactgcatataaattacctggaattttaaggtggtttgaggtcaagtctgttttcatggtggaaatcagccccctggagaatgccatcgagaccatgcagctgacgaacgacaagatcaacagcatggtgcagcagcacctggatgaccccagcctgcccatcaacccgctctccatgctcctgaacggcatcgtggacccagctgtcatggggggcttcgcaaactacgaaaaggccttctttacagaccggtacctgcaggagcaccctgaggcccatgaaaagatcgagaagctcaaggacctgattgcttggcagattccttttctggccgaagggatcagaatccatggagacaaagtcacggaggcactgaggccgttccacgagaggatggaggcctgtttcaaacagctgaaggaaaaggtggagaaagagtacggcgtccgaatcatgccctcaagtctggatgatagaagaggcagccgcccccggtccatggtgcggtccttcacgatgccttcctcatcccgccctctgtctgtggcctctgtctcttccctctcatcggacagcaccccttccagaccaggctccgacgggtttgccctggagcctctcctgccaaagaaaatgcactccaggtcccaggacaagctggacaaggatgacctggagaaggagaagaaggacaagaagaaggaaaaaaggaacagcaaacatcaagagatatttgagaaagaatttaaacccaccgacatttccctgcagcagtctgagctgtgatcctttcggaaacgataagtcccctgcggccccagagaccgaagagccaggtgatgaacgtcattggaagcgaaaggcgcttctcggtgtcccctcgtcaccgtcctcccagcaaa

SEQ ID NO: 184329 - DNA, 4267 bp, Homo Sapiens
  misc_feature (526)..(614): n is a, c, g, or t
ttggatctcgcagtcctctctattcctggggacactatgacaactatacaaatgtctgtagaagaatcaacccccatctcccgtgaaactggggagccatatcgcctctctccagaacccactcctctcgccgaacccatactggaagtagaagtgacacttagcaaaccggttccagaatctgagttttcttccagtcctctccaggctcccacccctttggcatctcacacagtggaaattcatgagcctaatggcatggtcccatctgaagatctggaaccagaggtggagtcaagcccagagcttgctcctcccccagcttgcccctccgaatcccctgtgcccattgctccaactgcccaacctgaggaactgctcaacggagccccctcgccaccagctgtggacttaagcccagtcagtgagccagaggagcaggccaaggaggtgacagcatcagtggcgccccccaccatcccctctgctactccagctacggctccttcagctacttccccagctnnnnnnnnnnnnnnnnnnnnnnnnnnnnnnnnnnnnnnnnnnnnnnnnnnnnnnnnnnnnnnnnnnnnnnnnnnnnnnnnnnnnnnnnnactgctccccccagagagtacccctattccagccaacttgtctcagaatttggaggcagcagcagccactcaagtggcagtatctgtgccaaagaggagacggaaaattaaggagctaaataagaaggaggctgttggagaccttctggatgccttcaaggaggcgaacccggcagtaccagaggtggaaaatcagcctcctgcaggcagcaatccaggcccagagtctgagggcagtggtgtgcccccacgtcctgaggaagcagatgagacctgggactcaaaggaagacaaaattcacaatgctgagaacatccagcccggggaacagaagtatgaatataagtcagatcagtggaagcctctaaacctagaggagaaaaaacgttacgaccgtgagttcctgcttggttttcagttcatctttgccagtatgcagaagccagagggattgccacatatcagtgacgtggtgctggacaaggccaataaaacaccactgcggccactggatcccactagactacaaggcataaattgtggcccagacttcactccatcctttgccaaccttggccggacaacccttagcacccgtgggcccccaaggggtgggccaggtggggagctgccccgtgggccggctggcctgggaccccggcgctctcagcagggaccccgaaaagaaccacgcaagatcattgccacagtgttaatgaccgaagatataaaactgaacaaagcagagaaagcctggaaacccagcagcaagcggacggcggctgataaggatcgaggggaagaagatgctgatggcagcaaaacccaggacctattccgcagggtgcgctccatcctgaataaactgacaccccagatgttccagcagctgatgaagcaagtgacgcagctggccatcgacaccgaggaacgcctcaaaggggtcattgacctcatttttgagaaggccatttcagagcccaacttctctgtggcctatgccaacatgtgccgctgcctcatggcgctgaaagtgcccactacggaaaagccaacagtgactgtgaacttccgaaagctgttgttgaatcgatgtcagaaggagtttgagaaagacaaagatgatgatgaggtttttgagaagaagcaaaaagagatggatgaagctgctacggcagaggaacgaggacgcctgaaggaagagctggaagaggctcgggacatagcccggcggcgctctttagggaatatcaagtttattggagagttgttcaaactgaagatgttaacagaggcaataatgcatgactgtgtggtcaaactgcttaagaaccatgatgaagagtcccttgagtgcctttgtcgtctgctcaccaccattggcaaagacctggactttgaaaaagccaagccccgaatggatcagtatttcaaccagatggaaaaaatcattaaagaaaagaagacgtcatcccgcatccgctttatgctgcaggacgtgctggatctgcgagggagcaattgggtgccacgccgaggggatcagggtcccaagaccattgaccagatccataaggaggctgagatggaagaacatcgagagcacatcaaagtgcagcagctcatggccaagggcagtgacaagcgtcggggcggtcctccaggccctcccatcagccgtggacttccccttgtggatgatggtggctggaacacagttcccatcagcaaaggtagccgccccattgacacctcacgactcaccaagatcaccaagcctggctccatcgattctaacaaccagctctttgcacctggagggcgactgagctggggcaagggcagcagcggaggctcaggagccaagccctcagacgcagcatcagaagctgctcgcccagctactagtactttgaatcgcttctcagcccttcaacaagcggtacccacagaaagcacagataatagacgtgtggtgcagaggagtagcttgagccgagaacgaggcgagaaagctggagaccgaggagaccgcctagagcggagtgaacggggaggggaccgtggggaccggcttgatcgtgcgcggacacctgctaccaagcggagcttcagcaaggaagtggaggagcggagtagagaacggccctcccagcctgaggggctgcgcaaggcagctagcctcacggaggatcgggaccgtgggcgggatgccgtgaagcgagaagctgccctacccccagtgagccccctgaaggcggctctctctgaggaggagttagagaagaaatccaaggctatcattgaggaatatctccatctcaatgacatgaaagaggcagtccagtgcgtgcaggagctggcctcaccctccttgctcttcatctttgtacggcatggtgtcgagtctacgctggagcgcagtgccattgctcgtgagcatatggggcagctgctgcaccagctgctctgtgctgggcatctgtctactgctcagtactaccaagggttgtatgaaatcttggaattggctgaggacatggaaattgacatcccccatgtgtggctctacctagcggaactggtaacacccattctgcaggaaggtggggtgcccatgggggagctgttcagggagattacaaagcctctgagaccgttgggcaaagctgcttccctgttgctggagatcctgggcctcctgtgcaaaagcatgggtcctaaaaaggtggggacgctgtggcgagaagccgggcttagctggaaggaatttctacctgaaggccaggacattggtgcattcgtcgctgaacagaaggtggagtataccctgggagaggagtcggaagcccctggccagagggcactcccctccgaggagctgaacaggcagctggagaagctgctgaaggagggcagcagtaaccagcgggtgttcgactggatagaggccaacctgagtgagcagcagatagtatccaacacgttagttcgagccctcatgacggctgtctgctattctgcaattatttttgagactcccctccgagtggacgttgcagtgctgaaagcgcgagcgaagctgctgcagaaatacctgtgtgacgagcagaaggagctacaggcgctctacgccctccaggcccttgtagtgaccttagaacagcctcccaacctgctgcggatgttctttgacgcactgtatgacgaggacgtggtgaaggaggatgccttctacagttgggagagtagcaaggaccccgctgagcagcagggcaagggtgtggcccttaaatctgtcacagccttcttcaagtggctccgtgaagcagaggaggagtctgaccacaactgagggctggtggggccggggacctggagccccatggacacacagatggcccggctagccgcctggactgcaggggggcggcagcagcggcggtggcagtgggtgcctgtagtgtgatgtgtctgaactaataaagtggctgaagaggcaggatggcttggggctgcctgggcccccctccaggatgccgccaggtgtccctctcctccccctggggcacagagatatattatatataaagtcttgaaatttggtgtgtcttggggtggggaggggcaacaaacgcctgcccctggggtcc

SEQ ID NO: 184330 - DNA, 3367 bp, Homo Sapiens
ttggcgacggtgcggctggcggacccgggctggcttgtggggaaacgaaactgagggaggaggcggcggctctggcagcggcggcgacagtgtcggcctgaccccccctccgctccccggcagctcgctctctcccctcagcttaacgatgaagaggagaactgacccagaatgcactgcccccatcaagaaacagaaaaaaagagttgcagagcttgccctgagcctcagctccacgtccgatgatgaacctccctcctctgtcagtcatggagcaaaagcatctactacaagccttagtgggtctgatagtgagaccgaggggaaacaacacagctctgactcttttgacgatgcattcaaagcagactctcttgtggaaggaacttcttctcgctattccatgtataatagcgtctcccagaagcttatggccaagatgggcttcagggaaggtgaaggattgggtaaatacagccagggtcggaaggacatcgttgaggcttccagtcagaaaggtcgaagaggcttgggtctgacactccggggctttgaccaggagctgaacgtggactggcgagatgagccagagcccagtgcttgtgagcaggtgtcatggtttccagaatgtaccactgaaattcctgacactcaggaaatgagcgattggatggtggtgggaaagagaaagatgattattgaagatgaaacagagttttgtggggaagagctgcttcacagtgtgttgcagtgtaagagcgtgtttgatgtcttggatggggaagagatgcggcgagctcggactcgggccaatccctatgagatgatccgaggagtcttctttctaaacagggcagcaatgaagatggctaacatggattttgtatttgatcgcatgttcacaaatccgcgggactcttatgggaagccactggtgaaggaccgggaagctgagcttctgtactttgctgatgtctgcgcaggcccaggtggcttctcagagtatgtgctgtggaggaagaagtggcatgcaaagggctttggaatgactttgaagggccctaatgacttcaagctggaggacttctactctgcttccagtgaactcttcgaaccctactatggtgagggtgggattgatggagatggagatatcacccgcccagagaacatctctgcttttcggaattgtcctggataacacagatcgcaagggtgtccattttctgatggctgatgggggtttctcggtggaggggcaggagaacctgcaggagatcctcagcaagcagctgcttctgtgtcagttcctcatggcgctgtccattgtccggacaggaggccacttcatctgtaaaacctttgacctgttcacaccgtttagtgtggggcttgtctacctgctgtactgctgctttgaacgagtttgtctcttcaagcctattaccagccgtcctgccaactcagagaggtatgtggtgtgcaagggcctgaaggtgggcatagatgatgttcgggattacctcttcgcagtgaatattaaactcaatcagctgcggaacacggattccgacgtcaacttggtggtccccctggaggtgatcaagggagaccatgaatttactgactacatgatacggtccaatgagagccactgtagtctgcagatcaaagctctggcgaaaatccatgcctttgttcaagacacgacactgagtgagcctcgacaggcagagatacggaaggagtgcctccgactctgggggatcccagaccaggctcgtgtggctccttcttcctccgaccctaaatcgaagttctttgagctaatccagggcactgagattgacatcttcagctacaagcccacactgctcacctctaaaaccctggagaagatccgccctgtgtttgactaccgctgcatggtatctggcagtgagcagaagttcctcatcggcctggggaaatcccagatctacacatgggatggccgccagtcagaccgctggatcaagctagacctgaagacagagctgccccgggacactctgctatctgtggaaattgtgcatgagctgaaaggggaggggaaggcccagaggaagatcagtgccatccacatcctcgatgtccttgtgctgaatggcaccgacgttcgggagcagcactttaaccagcgaattcagcttgccgagaaatttgtgaaagccgtttccaagcctagtcggcccgacatgaatcccatcacggtgaaggaggtgtacagactggaagagatggagaagatttttgtcaggttggagatgaagatcatcaagggctccagtggcaccccaaagctcagctacacagggcgtgatgaccggcactttgtacccatgggcctctacatcgtcaggacagtgaatgagccctggactatgggattcagcaaaagcttcaagaagaagttcttctacaacaagaaaaccaaggactctacttttgacctccctgcagactccattgccccatttcacatttgctactatggccggctcttctgggagtggggggatggcattcgtgtgcatgactcccagaagccccaggaccaggacaagctgtccaaggaggacgtcctctccttcatccagatgcacagggcctaagagcctcagaatgtgccacccctgcagaatgccctgtcattcctgagatggggccacctggggcccacagtggtggcttcttccccctcttgaaaagggactggggagcattgcacctggcatgaggagtgggtggcctcctctccatcccctgaagagctcaggcagggccctgcagagaacactcatgttccttctgggacacctgcctgggaactttcccctgccaggactcagcctgaaggaagctgctcctgaggcaggtatgaggtcagtgcctagggcacgtgggactgatggaggacatatcagagtggcagagctgtgggctctgctgttctctcctgcatcctgtagactcacttttctgagttccatgcactgccctgagggtagccatgcccttgctttgcccaactttttattgggccatccctgagtgggtggagacctgctgtcatgagctggccaggagaacctgctataaaaaaatcaaggttttgtttctttgaacttactctgttttgatgccaaattggagaccattttcttgtctccttcccccactcatcctggccttccctggagttcttcctagcccagagctctgacagtccagcagggtgggaagggagggagtttgggcaacctctcatccctgataccacattgagatcctgggagccctcttttcgtactgagtatggagttgt

SEQ ID NO: 184331 - DNA, 1269 bp, Homo Sapiens
  misc_feature (310)..(366): n is a, c, g, or t
  misc_feature (865)..(875): n is a, c, g, or t
ttggctaagagattattttgaacagtatggaaaaattgaagtgattgaaatcatgactgaccgaggcagtggcaagaaaaggggctttgcctttgtaacctttgacgaccatgactccgtggataagattgtcattcagaaataccatactgtgaatggccacaactgtgaagttagaaaagccctgtcaaagcaagagatggctagtgcttcatccagccaaagaggtcgaagtggttctggaaactttggtggtggtcgtggaggtggtttcggtgggaatgacaacttcggtcgtggaggaaacttnnnnnnnnnnnnnnnnnnnnnnnnnnnnnnnnnnnnnnnnnnnnnnnnnnnnnnnnnggatggctataatggatttggtaatgatggaagcaattttggaggtggtggaagctacaatgattttgggaattacaacaatcagtcttcaaattttggacccatgaagggaggaaattttggaggcagaagctctggcccctatggcggtggaggccaatactttgcaaaaccacgaaaccaaggtggctatggcggttccagcagcagcagtagctatggcagtggcagaagattttaattaggaaacaaagcttagcaggagaggagagccagagaagtgacagggaagctacaggttacaacagatttgtgaactcagccaagcacagtggtggcagggcctagctgctacaaagaagacatgttttagacaaatactcatgtgtatgggcaaaaaactcgaggactgtatttgtgactaattgtataacaggttattttagtttctgttctgtggaaagtgtaaagcattccaacaaagggttttaatgtagannnnnnnnnnngcaccccatgctgttgattgctaaatgtaacagtctgatcgtgacgctgaataaatgtcttttttttaatgtgctgtgtaaagttagtctactcttaagccatcttggtaaatttccccaacagtgtgaagttagaattccttcagggtgatgccaggttctatttggaatttatatacaacctgcttgggtggagaagccattgtcttcggaaaccttggtgtagttgaactgatagttactgttgtgacctgaagttcaccattaaaagggattacccaagcaaaatcatggaatggttataaaagtgattgttggcacatcctatgcaatatatctaaattgaataatggtaccagataaaattatagatgggaatgaagcttgtgtatcc

SEQ ID NO: 184332 - DNA, 1210 bp, Homo Sapiens
  misc_feature (212)..(262): n is a, c, g, or t
  misc_feature (765)..(774): n is a, c, g, or t
ctttgtacaaaaaagttggcgtggataagattgtcattcagaaataccatactgtgaatggccacaactgtgaagttagaaaagccctgtcaaagcaagagatggctagtgcttcatccagccaaagaggtcgaagtggttctggaaactttggtggtggtcgtggaggtggtttcggtgggaatgacaacttcggtcgtggaggaaacttnnnnnnnnnnnnnnnnnnnnnnnnnnnnnnnnnnnnnnnnnnnnnnnnnnncagtggggatggctataatggatttggtaatgatggaagcaattttggaggtggtggaagctacaatgattttgggaattacaacaatcagtcttcaaattttggacccatgaagggaggaaattttggaggcagaagctctggcccctatggcggtggaggccaatactttgcaaaaccacgaaaccaaggtggctatggcggttccagcagcagcagtagctatggcagtggcagaagattttaattatgaaacaaagcttagcaggagaggagagccagacaagtgacagggaagctacaggttacaacagatttgtgaactcagccaagcacagtggtggcagggcctagctgctacaaagaagacatgttttagacaaatactcatgtgtatgggcaaaaaactcgaggactgtatttgtgactaattgtataacaggtttttagtttctgttctgtggaaagtgtaaagcattccaacaaagggttttaatgtagannnnnnnnnngcaccccatgctgttgattgctaaatgtaacagtctgatcgtgacgctgaataaatgtcttttttttaatgtgctgtgtaaagttagtctactcttaagccatcttggtaaatttccccaacagtgtgaagttagaattccttcagggtgatgccaggttctatttggaatttatatacaacctgcttgggtggagaagccattgtcttcggaaaccttggtgtagttgaactgatagttactgttgtgacctgaagttcaccattaaaagggattacccaagcaaaatcatggaatggttataaaagtgattgttggcacatcctatgcaatatatctaaattgaataatggtaccagataaaattatagatgggaatgaagcttgtgtatccattatcatgtgtaatcaataaacgatttaattctcttgaatg

SEQ ID NO: 184333 - DNA, 1551 bp, Homo Sapiens
  misc_feature (86)..(95): n is a, c, g, or t
  misc_feature (923)..(973): n is a, c, g, or t
aggacacatttcccttaattggatatctttcccttaaatttctattagtagttgttttcatctgcccacatgtaattgaagatttnnnnnnnnnnttctgatacctgcagtattactaatactgcttaatttcttgaaatgtggaattgctgctgttaatgtcaagcaaaacgcagtatttatggcaaattgtaaagtaatttgaatttagtgctacctcaaaattaactttttaaatactatgttagattcttaacagttaaaggtctaatacatgcatgaggaatggttacttatgaaaggaaaaagaatttgtaagagttatcacctcagtttggaagaaattgaaaaaatgtaaggctgaagaaaacttacggaggtcacaaaagtgatgttttcaagaggaagagaaactgggagggagatacacagtggaaatgcaaaatgaatcaagtatagtggtagccctgagagcttagggactcaaatggaaactgtgtgaagggaaactcacttgaaaaaaaagcatgaaccagctaggccctgccaccactgtgtttggccgagttcacaaatctgttttaacctgtcgcttccctgtcacttctctggctttcctctcctgctaagcttttgtttcctggcagtaattaaaatcttctgtcagtgccacagctactactgctactggaactgccttaaccactactgctactggaactgccttagccaccttggtttcgtggtttggcaaagtattggcctccaccaccatagggcccagagcttctgcctccaaagtttcctcccttcatgggtccaaatttgaagactgattgttgtcattgcaaaatcattgtagcttccaccacctccaaaattgcttccatcattaccaaatccattatagccatccccactgnnnnnnnnnnnnnnnnnnnnnnnnnnnnnnnnnnnnnnnnnnnnnnnnnnnaagtttcctccacgaccgaagttgtcattcccaccgaaaccacctccacgaccaccaccaaagtttccagacccacttcgacctctttggctggatgaagcactagccatctcttgctttgacagggcttttctaacttcacagttgtggccattcacagtatggtatttctgaatgacaatcttatccacggagtcatggtcgtcaaaggttacaaaggcaaagccccttttcttgccactgcctcggtcagtcatgatttcaatcacttcaatttttccatactgttcaaaataatctcttaggtgatgttcttcagtgtcttctttaatgccaccaacaaatatctttttcacagttaagtgggcacctggtctttgagaatcttctctggagacagctctctttggttccacaactcttccatccaccttgtgtggccttgcattcatagctgcatccacctcctccacagtggcatatgtgacaaacccaaagcccctggagcgcttggtgtttggatctctcattaccacacagtccgtgagcgttccccattgctcaaaatggctccccaa

SEQ ID NO: 184334 - DNA, 1015 bp, Homo Sapiens
ttggagatgacctcccctggtttggtgtcttcccacagcctgtcctgggggaacagagaggccctgcggtggctacgggcagtgtgaaggagaagggacacgagggggcagcgggcactgtgactgccaagccggctacgggggtgaggcctgtggccagtgtggccttggctactttgaggcagaacgcaacgccagccatctggtatgttcggcttgttttggcccctgtgcccgatgctcaggacctgaggaatcaaactgtttgcaatgcaagaagggctgggccctgcatcacctcaagtgtgtagacattgatgagtgtggcacagagggagccaactgtggagctgaccaattctgcgtgaacactgagggctcctatgagtgccgagactgtgccaaggcctgcctaggctgcatgggggcagggccaggtcgctgtaagaagtgtagccctggctatcagcaggtgggctccaagtgtctcgatgtggatgagtgtgagacagaggtgtgtccgggagagaacaagcagtgtgaaaacaccgagggcggttatcgctgcatctgtgccgagggctacaagcagatggaaggcatctgtgtgaaggagcagatcccagagtcagcaggcttcttctcagagatgacagaagacgagttggtggtgctgcagcagatgttctttggcatcatcatctgtgcactggccacgctggctgctaagggcgacttggtgttcaccgccatcttcattggggctgtggcggccatgactggctactgggttgtcagagcgcagtgaccgtgtgctggagggcttcatcaagggcagataatcgcggccaccacctgtaggacctcctcccacccacgctgcccccagagcttgggctgccctcctgctggacactcaggacagcttggtttatttttgagagtggggtaagcacccctacctgccttacagagcaacccaggtacccaggcccgggcagacaagcccctgggg

SEQ ID NO: 184335 - DNA, 949 bp, Homo Sapiens
ttggccagaggcaaagcgtgagcgggatcagtgtgtgcggaacgcaagcagccgagagcggagaggcgccgctgtagttaactcctccctgcccgccgcgccgaccctccccaggaacccccagggagccagcatgaagcgagctcaccccgagtacagctcctcggacagcgagctggacgagaccatcgaggtggagaaggagagtgcggacgagaatggaaacttgagttcggctctaggttccatgtccccaactacatcttcccagattttggccagaaaaagacggagaggaataattgagaagcgccgacgagaccggatcaataacagtttgtctgagctgagaaggctggtacccagtgcttttgagaagcagggatctgctaagctagaaaaagccgagatcctgcagatgaccgtggatcacctgaaaatgctgcatacggcaggagggaaaggttactttgacgcgcacgcccttgctatggactatcggagtttgggatttcgggaatgcctggcagaagttgcgcgttatctgagcatcattgaaggactagatgcctctgacccgcttcgagttcgactggtttcgcatctcaacaactacgcttcccagcgggaagccgcgagcggcgcccacgcgggcctcggacacattccctgggggaccgtcttcggacatcacccgcacatcgcgcacccgctgttgctgccccagaacggccacgggaacgcgggcaccacggcctcacccacggaaccgcaccaccagggcaggctgggctcggcacatccggaggcgcctgctttgcgagcgccccctagcggcagcctcggaccggtgctccctgtggtcacctccgcctccaaactgtcgccgcctctgctctctcagtggcctccctgtcggccttccccttctctttcggctccttccact

SEQ ID NO: 184336 - DNA, 1676 bp, Homo Sapiens
ttggatcagagcaaacgtggcccagcacccatgagaccctcctgaccacgtggaagattgtggcgttcacggcaaccagtgtgctgctggtgctgctgctcgtcatcctggccaggatgttccagaccaagttcaaggcccactttccccccagggggcctccccggagttccagcagtgaccctgactttgtggtggtagacggcgtgcccgtcatgctcccgtcctatgacgaagctgtgagtggcggcttgagtgccttaggccccgggtacatggcctctgtgggccagggctgccccttacccgtggacgaccagagccccccagcataccccggctcaggggacacggacacaggcccaggggagtcagaaacctgtgacagcgtctcaggctcttctgagctgctccaaagtctgtattcacctcccaggtgccaagagagcacccaccctgcttcggacaaccctgacataattgccagcacggcagaggaggtggcatccaccagcccaggcatcgacattgcagatgagattcctctaatggaagaagatccctaatatgggtcaagatccagatgactctcctgctccttcggggaaaggaccttgtatcttggagtgaggtcacagaaggatagagcctgggggcaaaatgtctaacttgtctacatggggaccacagttcacattatgcatctcaggctccacagtgaggctgacaaactgcaatggcagtgcttttaaatgagatttgaggattcaccaagacccatggggaaccggggcagcagggaagccctcgcgtggtcttggatgaggggtgttaaatgtgtatcgtgctgtggaacatgggacaattccacgcacatcccaccgaatcatcacgcatcccattgactggcaagtactccccgccccctctgaaagcatgtcacatcatgtaaatttgcttctaacatctgcttcaaactgtctctggactccaaatttggatgggtcagcctctgcagaaagtttgtgttgagatgctggaagaacagcagagcctcctgcaccctcagcaagggaccagctcccaaaggaaaggtccttgtgtgacatttggagaatcttccttcatccagacaactctactcgaagcaagacgaaagcaggatgtggcagttgcagtgagaaaggaaaggaaagatgggcagactctgctttctggaaatttcttcacaaagtagagctcatgaactctgtgctgtcttctggtaacatatcatcagtgtttgtattcatggtgtggcacatggatccatggcattgggtaaatctggtggtttttacacatggtcagaatgtgttcaaatacatctcatgatggagacagtaaccaaggtaatgttttgtttcagcattttaaaaagactccacttaacatttatctcagaatcatgagcctctctctagttgacaattgtcattgttcccccagccccaaattgaaccatacatttattttccaaaacagaaattgtttctgtaaacatatccgaccttcaaaagaagtgtgaggttgggatttttcccccttttatttgtcctaagattccaggaggctggcctcccagcccagatagctcaggcaactcacctgcctatcattcctgcattcctactttg

SEQ ID NO: 184337 - DNA, 1291 bp, Homo Sapiens
ttggctacgatgccaatgatgtgggtttccagaggaacatcactgtcaaactttatcaggcagaacaagaggaggccctcttcattgctcgcttcagtcctccaagctgtggtgtgcaggtgaacaagctgtggtacaagcccgtggaacaattcatcttaccagagagctttgaaggtacaatcgtgtgggagagccaagacctccacggccttgtgtcaagaaatctccacaaagtgacagtgaatgatggagggggagttctcagagtcattacagctggggagggtgcattgcctcatgaattcttggaaggtgtggagggagttgcaggtggttttatatatactattcaggaaggtgatgctctcttacacaaccttcattctcgccctcaaagacttattgatcatataaggaatctccatgaggaagatgccttactgaaggaggaaagcagcatctatgatgatattgtttttgtggatgttgtcgacacttatcgtaatgttcctgcaaaattattgaacttctatagatggactgtggaaacaacgagcttcaatttgttgctgaagacagatgatgactgttacatagacctcgaagctgtatttaataggattgtccaaaagaatctggatgggcctaatttttggtggggaaatttcagactgaattgggcagttgaccgaaccggaaagtggcaggagttggagtacccgagccccgcttaccctgcctttgcatgtgggtcaggatatgtgatctccaaggacatcgtcaagtggctggcaagcaactcggggaggttaaagacctatcagggtgaagatgtaagcatgggcatctggatggctgccataggacctaaaagataccaggacagtctgtggctgtgtgagaagacctgtgagacaggaatgctgtcttctcctcagtattctccgtgggaactgacggaactgtggaaactgaaggaacggtgcggtgatccttgtcgatgtcaagcaagataacagggacttgaattagcagagtctaaaatcagggcaggcaaacgataatctgagtgcaagtctgaggagtcccagggtttagcagtagactgtatggtctttcaagagagttccagactggcactttcacccagaaccaatgcggtgtttcttaatgtttgcacaaatttccttaaaaatcaacttgtactgtagcataagaaaagtttttatttatctattggaagattatcagaaaaataccaagttattttataaaagaaaaaatattt

SEQ ID NO: 184338 - DNA, 1491 bp, Homo Sapiens
ttgtacaaaaaagttggaatcaatctacttcaaaagacatttcagatttaacaaatacttacatgtctactcttacctatttgcaatgtgtacattttgtatttaattttctatttgataaagttacataaaaagtacatttatctattctctttgttttctcactctttttaagcagctgttgtatgctttctgttattctgtctaccctttaatccctacttgcataggaagcagttgaatataatttttgaagttagcattatcttctaaatttagaaataatattttaaaagtgattttatcttggaaagataacttaagagtaatttaatttttcagaacttttgagcatgctgttctagctgcaggaacagatttccgttctgacagactgtgggaaatgtatataaactgggaaaatgagcagggaaacctgagagaagttacagctatatatgatcgtattcttggtattccaacacagctgtatagtcatcattttcagagatttaaagaacatgtacagaataatttgcctagagatcttttaactggtgaacagtttattcagttgcgaagggaattagcttctgtaaatggtcatagtggtgatgatggtcctcctggtgatgatctaccatcgggaattgaagacataaccgatcctgcaaagctaattacagaaatagaaaacatgagacatagaatcattgagattcatcaagaaatgtttaattataatgagcatgaagttagtaaaaggtggacatttgaagaaggtattaaaagaccttactttcatgtgaaacctttggaaaaggcacaactaaaaaactggaaagaatacttagaatttgaaattgaaaatgggactcatgaacgagttgtggttctctttgaaagatgtgtcatatcatgtgccctctatgaggagttttggattaagtatgccaagtacatggaaaaccatagcattgaaggagtgaggcatgtcttcagcagagcttgtactatacatctcccaaagaaacccatggtgcatatgctttgggcagcttttgaggaacagcagggtaatattaatgaagccaggaatatcttgaaaacatttgaagaatgtgttctaggattggcaatggttcgtttacgaagagtaagtttagaacgacggcatggaaatctggaagaagctgaacatttgcttcaggatgccattaagaatgccaaatcaaataatgaatcttcattttatgctgtcaaactagcccggcatcttttcaaaatacagaaaaaccttcccaaatcaagaaaggtgcttttggaagcaatcgaaagagacaaagagaacacaaagttatacctcaatttacttgaaatggaatatagtggtgacctcaaacaaaatgaagaaatatcctaaattgttttgacaagctgtacatgggttcattacctattaaaatgagaattacattttctcagagaaaa

SEQ ID NO: 184339 - DNA, 1590 bp, Homo Sapiens
ttggcaaggacaatggtaagtgagtcagtgtagtcagcaggcttggaacttggagctcaaagaagagtgctgggagcagggagtccccagggtggggctcactgtgccttctcacttaactttgctgtagccgtatccttgcattttaagggccaattcccagttccttgatgaattgaactggaagctggaagaggcccagtcatgcactgaaacaaatctacatttatagaagaactttttccatgtcgtcttaatcttgattggtaacataatcagggttctgagaatcttccttaactctgggtctgtggatgcctttggggtggggaggtccttgaatcctctgataactgtgtgtacatgtacaccggaatgtttctggaaggaatccatagctttcttcagattccaaagtgacacatagttagggtgaccaaccatcctggtttgtctggaactctactggttttagcatttaaagtcctatgtatcaggaaactcttcagtccaagggaaactgggatggtttgtcaccctgacagtaacttccaaagggttaagcagcagtgtgacctgggatgtatgcatttatttttgtcttcaacttgggctgcttgcttgtttcccttcccagatgctggtggtgttcaagtcagcccccatcttgaagcgggccctaaaggtgaaacaagccatgatgcagctctatgtgctgaagctgctcaaggtacagaccaaatacttgggggcggcagtggcgaaagagcaacatgaagaccatgtctgccatctaccagaaggtgcggcatcggctgaacgacgactgggcatacggcaatgatcttgatgcccggccttgggacttccaggcagaggagtgtgcccttcgtgccaacattgaacgcttcaacgcccggcgctatgaccgggcccacagcaaccctgacttcctgccagtggacaactgcctgcagagtgtcctgggccaacgggtggacctccctgaggactttcagatgaactatgacctctggttagaaagggaggtcttctccaagcccatttcctgggaagagctgctgcagtgaggctgttggttaggggactgaaatggagagaaaagatgatctgaaggtacctgtgggactgtcctagttcattgctgcagtgctcccatcccccaccaggtggcagcacagccccactgtgtcttccgcagtctgtcctgggcttgggtgagcccagcttgacctccccttggttcccagggtcctgctccgaagcagtcatctctgcctgagatccattcttcctttacttcccccaccctcctctcttggatatggttggttttggctcatttcacaatcagcccaaggctgggaaagctggaatgggatgggaacccctccgccgtgcatctgaatttcacgggtcatgctgatgcctctcgagacatacaaatccttgctttgtcagcttgcaaaggaggagagtttcgattagggccagggccagaaagtcggtatcttggttgtgctctggggtgggggtggggtgtttctgatgttattccagcctcctgct

SEQ ID NO: 184340 - DNA, 1007 bp, Homo Sapiens
ttggctgcttcgaaaacatcctgctccacctccatcaaattatgaaattcttgttaaggcagccaggtcaaggaatttggaaattaagactgatacagccaagtctttggctgagtctttggatcaggccgaatctcctacttttccatatctaaacactctgttgagaatattagccactcgctgtatgatgcaagctgtgtacttctgttctggaatggataatgattttcatcactatggcttagcgtctccaatatacacacattttacttcacccattagaagatacgcagatgtcattgttcatcggcttttggctgtggctattggggctgactgtacttatccagagttgacagacaaacacaagcttgcagatatatgtaaaaatctaaatttccggcacaaaatggctcaatatgcccaacgtgcatcagtggcttttcatacccagttattcttcaaaagcaaaggaatagtaagtgaagaagcctatattttatttgtaagaaagaatgccattgtggtattaattccaaagtatggtttagaagggacagtcttttttgaagaaaaggacaaaccaaacccacagcttatttatgatgatgagataccctcacttaaaatagaagatacagtgttccatgtatttgataaagttaaagtgaaaatcatgttagactcatctaatcttcaacatcagaagatccgaatgtccctggtagaaccacagataccaggaataagcattcctactgatacttcaaacatggaccttaatggaccaaagaaaaagaagatgaagcttggaaaatagctatattcaacaaaaatcttcaaagactggtttcttttttaaaagaaaaaacttgaaagaacacttctaagcctaagtgtgtgatacagtttgttacttttaagtacattttaataatttcagacatctgcatttttattgaacagttgactgtatctgacccatcatactactatacttctgg

SEQ ID NO: 184341 - DNA, 1461 bp, Homo Sapiens
gcttttttataatggccaactttgtacaaaaaagttggcttctgttctggaatggataatgattttcatcactatggcttagcgtctccaatatacacacattttacttcacccattagaagatacgcagatgtcattgttcatcggcttttggctgtggctattggggctgactgtacttatccagagttgacagacaaacacaagcttgcagatatatgtaaaaatctaaatttccggcacaaaatggctcaatatgcccaacgtgcatcagtggcttttcatacccagttattcttcaaaagcaaaggaatagtaagtgaagaagcctatattttatttgtaagaaagaatgccattgtggtattaattccaaagtatggtttagaagggacagtcttttttgaagaaaaggacaaaccaaacccacagcttatttatgatgatgagataccctcacttaaaatagaagatacagtgttccatgtatttgataaagttaaagtgaaaatcatgttagactcatctaatcttcaacatcagaagatccgaatgtccctggtagaaccacagataccaggaataagcattcctactgatacttcaaacatggaccttaatggaccaaagaaaaagaagatgaagcttggaaaatagctatattcaacaaaaatcttcaaagactggtttcttttttaaaagaaaaaacttgaaagaacacttctaagcctaagtgtgtgatacagtttgttacttttaagtacattttaataatttcagacatctgcatttttattgaacagttgactgtatctgacccatcatactactatacttctgggttgaacagaattatttatgcagaataattcaattgaatatccatcacttaaatacagtgacaggacagcaacttcagggatctgtaaagatcatttaaatggagtgctcatctcattgaggagcagattaattttgcgtaagtactttgattatttaatatttgtaagaaaaaactttcattttcctacagaggaaaatagaacaattttagaagcaaggaacaatctcttttctaagtcttggaagctgtcagtgttgaggatgtaatctcctttgccatctttaattcacctaacttacactaggtgttctcttactgtctttaaaagcttcctgtattttattagtggtccttgaaaaactgtgaatgtttgggaattggtagaaaggcaaaaagtaggatattttgacctgactggaaagatggttgtgtttttattgccaggtaataagtgtgatcattgttgaacttcagctccagtgtctctccagaataagacattggcattcaaatgtctatatcttgttacttacaaaataaaaaacagataattagtggcttttaaattgtaattatatcagtgtatatacacgaggggaactgtataaagacatact

SEQ ID NO: 184342 - DNA, 2042 bp, Homo Sapiens
ttggtggagaccaataaaatgctaagagaagagaaggagagactagaacaggatctacagcaaatgcaagcaaaggtgaggaaactggagttagatattttacccttacaagaagcaaatgctgagctgagtgagaaaagcggtatgttgcaggcagagaagaagctcttagaagaggatgtcaaacgttggaaagcacgtaaccagcatctagtaagtcaacagaaagatccagatacagaagaatatcggaagctcctttctgaaaaggaagttcatactaagcgtattcaacaattgacagaagaaattggtagacttaaagctgaaattgcaagatcaaatgcatctttgactaacaaccagaacttaattcagagtctgaaggaagatctaaataaagtaagaactgaaaaggaaaccatccagaaggacttagatgccaaaataattgatatccaagaaaaagtcaaaactattactcaagttaagaaaattggacgtaggtacaagactcaatatgaagaacttaaagcacaacaggataaggttatggagacatcggctcagtcctctggagaccatcaggagcagcatgtttcagtccaggaaatgcaggaactcaaagaaacgctcaaccaagctgaaacaaaatcaaaatcacttgaaagtcaagtagagaatctgcagaagacattatctgaaaaagagacagaagcaagaaatctccaggaacagactgtgcaacttcagtctgaactttcacgacttcgtcaggatcttcaagatagaaccacacaggaggagcagctccgacaacagataactgaaaaggaagaaaaaaccagaaaggctattgtagcagcaaagtcaaaaattgcacacttagctggtgtaaaagatcagctaactaaagaaaatgaggagcttaaacaaaggaatggagccttagatcagcagaaagatgaattggatgttcgcattactgcgctaaagtcccaatatgaaggtcgaattagtcgcttggaaagagaactcagggagcatcaagagagacaccttgagcagagagatgagcctcaagaaccttctaataaggtccctgaacagcagagacagatcacattgaaaacaactccagcttctggtgaaagaggaattgccagcacatcagacccaccaacagccaatatcaagccaactcctgttgtgtctactccaagtaaagtgacagctgcagctatggctggaaataagtcaacacccagggctagtatccgcccaatggttacacctgcaactgttacaaatcccactactaccccaacagctacagtgatgcccactacacaagtggaatcacaggaagctatgcagtcagaagggcctgtggaacatgttccagtttttggaagcacaagtggatccgttcgttctactagtcctaatgtccagccttctatctctcaacctattttaactgttcagcaacaaacacaggctacagcttttgtgcaacccactcaacagagtcatcctcagattgagcctgccaatcaagagttatcttcaaacatagtagaggttgttcagagttcaccagttgagcggccttctacttccacagcagtatttggcacagtttcggctacccccagttcttctttgccaaagcgtacacgtgaagaggaagaggatagcaccatagaagcatcagaccaagtctctgatgatacagtggaaatgcctcttccaaagaagttgaaaagtgtcacacctgtaggaactgaggaagaagttatggcagaagaaagtactgatggagaggtagagactcaggtatacaaccaggattctcaagattccattggagaaggagttacccagggagattatacacctatggaagacagtgaagaaacctctcagtctctacaaatagatcttgggccacttcaatcagatcagcagacgacaacttcatcccaggatggtcaaggcaaaggagatgatgtcattgtaattgacagtgatgatgaaga

SEQ ID NO: 184343 - DNA, 2408 bp, Homo Sapiens
  misc_feature (304)..(399): n is a, c, g, or t
aaaagttggcccctcccaacccagttgaaaagtgtcccacctgtaggaactgaggaagaagttatggcagaagaaagtactgatggagaggtagagactccggtatacaacccggattctcaagattccattggagaaggagttacccagggagattatacccctatggaagacagtgaagaaacctctcagtctctacaaatagatcttgggccacttcaatcagatcagcagacgacaacttcatcccaggatggtcaaggcaaaggagatgatgtcattgtaattgacagtgatgatgaannnnnnnnnnnnnnnnnnnnnnnnnnnnnnnnnnnnnnnnnnnnnnnnnnnnnnnnnnnnnnnnnnnnnnnnnnnnnnnnnnnnnnnnnnnnnnnngagggtgaagatagtaatgaaggaactggtagtgccgatggcaatgatggttatgaagctgatgatgctgagggtggtgatgggactgatccaggtacagaaacagaagaaagtatgggtggaggtgaaggtaatcacagagctgctgattctcaaaacagtggtgaaggaaatacaggtgctgcagaatcttctttttctcaggaggtttctagagaacaacagccatcatcagcatctgaaagacaggcccctcgagcacctcagtcaccgagacgcccaccacatccacttcccccaagactgaccattcatgccccacctcaggagttgggaccaccagttcagagaattcagatgacccgaaggcagtctgtaggacgtggccttcagttgactccaggaataggtggcatgcaacagcatttttttgatgatgaagacagaacagttccaagtactccaactcttgtggtgccacatcgtactgatggatttgctgaagcaattcattcgccgcaggttgctggtgtccctagattccggtttgggccacctgaagatatgccacaaacaagttctagtcactctgatcttggccagcttgcttctcaaggaggtttaggaatgtatgaaacacccctgttcctagctcatgaagaagagtcaggtggccgaagtgttcccactactccactacaagtagcagccccagtgactgtatttactgagagcaccacctctgatgcttcggaacatgcctctcaatctgttccaatggtgactacatccactggcactttatctacaacaaatgaaacagcaacaggtgatgatggagatgaagtatttgtggaggcagaatctgaaggtattagttcagaagcaggcctagaaattgatagccagcaggaagaagagccggttcaagcatctgatgagtcagatctcccctccaccagccaggatcctccttctagctcatctgtagatactagtagtagtcaaccaaagcctttcagacgagtaagacttcagacaacattgagacaaggtgtccgtggtcgtcagtttaacagacagagaggtgtgagccatgcaatgggagggagaggaggaataaacagaggaaatattaattaaatggtctgtaaacaataacaactgtgaataagattatcaaatctgttttagtgtaatgattgtcaagtttaaaaacatttttatatataaactggtatactcatgtcaatattctttaattaataaaatgtttttcagtgtcaaaatttattattcatttcttcattagttgactcctcctttgctcatcagtctaaggacagttgtaccagactttggataaggtctgcccagaacgagtagtaattgctcttgctgttctactaggcacatcaatgttatagtattgatctttagaaaaggcatagtaatcatagccgtcaggttttctgatgttgggcagtgatatagctgaggtaaccacatttggaagtcctctccacagtatactcactttaacttcattatgaaggacacctttgtcttgataagccagtctggcaggtgaatattgaattctgatggtgtgtgtttgagaaggtcctatagcacgttcaaagcgacgtctcctaacctgtgtcgtttctccatacactggataatttagagcaggccttcttccagggcacttctgtacaggttcctgtttataaatatactgctgaatgctgccacctctcttgaaaaaatacacagattcaggccagttcttatatttagctgttgaaagcgctgccactatttgtccagttagtcctccaaatcctttgaaaattggtttggggtaccctgcatcttttatatcattggtaaaacgccagtactgagaatccttaaagaagaaagtttttccttcacagttgcacctagtaaaaacagtatcaatgggggaaggaataccccaaacttcagtaattctgcgccaa

SEQ ID NO: 184344 - DNA, 1598 bp, Homo Sapiens
tgtacaaaaaagttggagatgatcagccatggaagagagagagaaccgtgcattacctgcccatcctgttcatcgaccagctcagcaaccgcgtgaaggacctgatggtcataaaccgctccaccaccgagctgcccctcaccgtgtcctacgacaaggtctcactggggcggctgcgcttctggatccacatgcaggacgccgtgtactccctgcagcagttcgggttttcagagaaagatgctgatgaggtgaaaggaatttttgtagataccaacttatacttcctggcgctgaccttctttgtcgcagcgttccatcttctctttgatttcctggcctttaaaaatgacatcagtttctggaagaagaagaagagcatgatcggcatgtccaccaaggcagtgctctggcgctgcttcagcaccgtggtcatctttctgttcctgctggacgagcagacgagcctgctggtgctggtcccggcgggtgttggagccgccattgagctgtggaaagtgaagaaggcattgaagatgactattttttggagaggcctgatgcccgaatttcagtttggcacttacagcgaatctgagaggaaaaccgaggagtacgatactcaggccatgaagtacttgtcatacctgctgtaccctctctgtgtcgggggtgctgtctattcactcctgaatatcaaatataagagctggtactcctggttaatcaacagcttcgtcaacggggtctatgcctttggtttcctcttcatgctgccccagctctttgtgaactacaagttgaagtcagtggcacatctgccctggaaggccttcacctacaaggctttcaacaccttcattgatgacgtctttgccttcatcatcaccatgcccacgtctcaccggctggcctgcttccgggacgacgtggtgtttctggtctacctgtaccagcggtggctttatcctgtggataaacgcagagtgaacgagtttggggagtcctacgaggagaaggccacgcgggcgccccacacggactgaaggccgcccgggctgccgccagccaagtgcaacttgaattgtcaatgagtatttttggaagcatttggaggaattcctagacattgcgttttctgtgttgccaaaatcccttcggacatttctcagacatctcccaagttcccatcacgtcagatttggagctggtagcgcttacgatgcccccacgtgtgaacatctgtcttggtcacagagctgggtgctgccggtcaccttgagctgtggtggctcccggcacacgagtgtccggggttcggccatgtcctcacgcgggcaggggtgggagccctcacaggcaagggggctgttggatttccatttcaggtggttttctaagtgctccttatgtgaatttcaacacgtatggaattcattccgcatggactctgggatcaaaggctctttcctcttttgtttgagagttggttgttttaaagcttaatgtatgtttctattttaaaataaatttttctgggctgtggcatttttcttgaactggtataatgaaagtatttcggatatttgagtttaccc

SEQ ID NO: 184345 - DNA, 1185 bp, Homo Sapiens
ttttctagaaaggtggctgccatttttctactttctcccttcctgctcccccaagaaaaaggaaacatggaatccattgagcaatggggaaaggagcaatggggaaaggccttctttggctgccgtccggagcctggctaaagctgctcagaagtccaggcctaggggatgtctttctcgagcctgtgctggtctaggaagcctcttctttaggaatcatttttttgtcccccgtgaacttaccctccccagatgagtcaagcagtctctggtcctgaggtcccatgggttgccagtggcagttcagggacagaggctggaaggagtgaaaatggagaggaataaagggctggggctggtctggtgcaggcagaagagggaatcagagaagcataaaacatggagaaaaagatgagaaggaagtggaaagaagagagtggatatcaacaatggccttaggctcctttcatgcacctgtttatttaacaaaacgtttagggcctatcctgcactgggactcctctagttacgccaggaaaggttgtcaggggagtctgtgatggggaaaagagaggccccattctgggtttggctcttctgagtcatcggctgtggaagtgactgagaagtgagtttctgggtgtttcatccctggggtgagagcaagtccattggattaggagacagcagggacattgtgcctggagatagaggccttgtcatggcaatgacaactgactgctgtcttaattcaaacgagcaagcagttgccatggaaaccatgttacttgtatggtcccggatcccggtgatccgccctcctagatcatatctgacactacgtctcagctgtcagcctccacctctccccagccatccattctagggggactgagaggtggagacaggaagggcagcttgtcctggtgagcagtggcagttgtggggagatgtcttccacatccctgggtttggtgcaggcagatggcaagttattctgttatgtgaagggcacagccagaggccccatgacaaactctctatgtgacaaggggatagagaaccagagtgcttctttctctggtcaaaggggttgatgagtgggaggcctgagtgcttaggcagtttatggccatatagggtgagtcataatttaaacctggctataaaatatatgcaggccaa

SEQ ID NO: 184346 - DNA, 1068 bp, Homo Sapiens
ttggggagtgttgttagcgcgcgccttccggatcgcagctctcgcggcagtcgcctgagacttaaggttattgcttggccgcggcctggtattccggcgattcgtttcttgctcggcttcctggagctgtggtccgtgtgggcttccacctcagacagttgcgctggctcagcggggccggaacatggctgcgtccggtctggatcatctcaaaaatggctacagaagaagattttgtcgaccttccagggcacgtgacattaacacagagcaaggccagaatgttctggaaatcttacaagactgttttgaagaaaaaagtcttgccaatgattttagtacaaattctacaaaatcagtgcctaattcaacacgcaaaataaaagacacttgtattcagtcaccaagcaaagagtgccagaaatcacatccaaagtcagttccagtttcttcaaagaagaaagaagcctctctacagtttgttgtagaaccaagtgaagccacaaacagatcagttcaggcccatgaagttcatcagaaaattctggcaactgatgttagttccaaaaatacacctgactcgaaaaaaatatcaagtagaaacataaatgatcatcacagtgaagctgatgaagaattttacttatccgttggctcaccttctgttcttttggatgcaaaaacatctgtatcacaaaatgttattccatctagtgcccaaaagagagagacttacacttttgaaaattcagtaaatatgctgccttcaagtacagaggtttcagttaaaaccaaaaaaaggttaaactttgatgataaagttatgttaaagaaaatagaaatagataataaagtatcagatgaagaggataaaacatcggaaggacaagaaagaaaaccatcaggatcatctcagaatagaatacgagattcagaatatgaaattcaacgacaagctaaaaaaagtttttcaacattgtttttagaaacagtaaaacgaaaaagtgaatccagtcccattgttaggcatgcggcaactgctccacctcattcgtgtcctcccgatga

SEQ ID NO: 184347 - DNA, 1449 bp, Homo Sapiens
ttggcggccaacatgtaccgggtcggagattatgtctactttgagaattcctccagcaacccatacctaataagaaggatagaagaactcaacaagactgcaagtggcaacgtggaagcaaaagtagtatgcttttatagacgacgtgatatttccaacacacttataatgctcgcagataagcatgctaaagaaattgaggaagaatctgaaacaacagttgaggctgacttgaccgataagcagaaacatcagttgaaacatagggaactctttttgtcacgccagtatgaatctctgcccgcaacacatatcaggggaaagtgcagtgttgcccttctgaatgagacagaatcagtattgtcatatcttgataaggaggataccttcttctactcattggtctatgacccctcattgaaaacactattagctgacaaaggtgaaatcagagtgggacctagatatcaagcagacattccagaaatgctgttagaaggagaatcagatgagagggaacaatcaaaattggaagttaaagtttgggatccaaatagcccacttacggatcgacagattgaccagtttttagttgtagcacgtgctgttgggacattcgccagagccctggattgcagcagttctgtgaggcagcctagtttgcatatgagtgctgctgcagcttcccgagacatcaccttgtttcacgctatggatacattgtatagacacagctatgatttgagcagtgccattagtgtcttagtaccactcggaggacctgttttatgcagagatgaaatggaggaatggtcagcctctgaagctagcttatttgaagaggcactggaaaaatatggcaaagacttcaatgacatacggcaagattttcttccttggaaatcattgactagcatcattgaatattattacatgtggaaaactactgacagatatgtgcaacagaaacgtctaaaagcagcagaagctgagagtaaactgaaacaagtatatatcccaacctacagcaaaccaaatcccaaccaaatatccactagtaatgggaagcctggtgctgtgaatggagctgtggggaccacgttccagcctcagaatcctctcttagggagagcctgtgagagctgctatgctacacagtctcaccagtggtattcttggggcccacctaatatgcagtgtagattatgtgcaatttgttggctttattggaaaaaatatggaggcttgaaaatgcccacccagtcagaagaagagaagttatctcctagcccaactacagagggaccctcgtgttagaagtcacgtgtcccgccaggccatgcagggaatgccagtccgaaacactgggagtccaaagtctgcagtgaagacccgccaagctttcttccttcatactacatatttcacaaaatttgctcgtcaggtctg

SEQ ID NO: 184348 - DNA, 3245 bp, Homo Sapiens
ttgggccaaaacttccagtgtctccaaccctcaggacagtgttggctctccgtgctcccgagtgggtgaggaggagcacgtctacagcttccccaacaagcagaaatcagctgagccttcacccaccgtaatgagcacgtccctgggcagcaacctttctgaactcgaccgcctgctgctggaactgaacgctgtacagcataacccgccaggcttccctgcagatgaggccaactcaagccccccgcttcctggggccctgagccccctctatggtgtcccagagactaacagccccttgggaggcaaagctgggcccctgacgaaagagaagcctaagcggaatgggggccggggcctggaggacgtgcggcccagtgtggagagtctcttggatgaactggagagctccgtgcccagccccgtccctgccatcactgtgaaccagggcgagatgagcagcccgcagcgcgtcacctccacccaacagcagacacgcatctcggcctcctctgccaccagggagctggacgagctgatggcttcgctgtcggatttcaagttcatggcccaggggaagacagggagcagctcaccccctggggggcccccgaagcccgggagccagctggacagcatgctggggagcctgcagtctgacctgaacaagctgggggtcgccacagtcgccaaaggagtctgcggggcctgcaagaagcccatcgccgggcaggttgtgaccgccatggggaagacgtggcaccccgagcacttcgtctgcacccactgccaggaggagatcggatcccggaacttcttcgagcgggatggacagccctactgtgaaaaggactaccacaacctcttctccccgcgctgctactactgcaacggccccatcctggataaagtggtgacagcccttgaccggacgtggcaccctgaacacttcttctgtgcacagtgtggagccttctttggtcccgaagggttccacgagaaggacggcaaggcctactgtcgcaaggactacttcgacatgttcgcacccaagtgtggcggctgcgcccgggccatcctggagaactatatctcagccctcaacacgctgtggcatcctgagtgctttgtgtgccgggaatgcttcacgccattcgtgaacggcagcttcttcgagcacgacgggcagccctactgtgaggtgcactaccacgagcggcgcggctcgctgtgttctggctgccagaagcccatcaccggccgctgcatcaccgccatggccaagaagttccaccccgagcacttcgtctgtgccttctgcctcaagcagctcaacaagggcaccttcaaggagcagaacgacaagccttactgtcagaactgcttcctcaagctcttctgctaggtgccctgcccctgtctctgccccccttccccagccagcatccccaactgcgactgtgacctagagacttcacccgggggtgaaggggtaaacccgactgaaactggaacccttgtcctccgctggtgcgggatggacagagggccatgaggggtccccctgcttgtcttcacccctgccagagcctctgggccccctcctccctcctgtagctctccctaggctgcccactctccatcctccccaggggtagaggctgggggctccaccccagcccatgtacgtccccacgaactggcctggccagcaccccacactggagccatctcttcctcatatttcagcagtgcagccggggggcagggaagggcaggcagggtctgttggggtctctttttatccttattcctcccccgacctaattgtctttgttctgtgattattgggggacacccggctccctccagacaatgccagcataaatccatccatccaaaggcagagaaccaaaggggccatggaaggttctctgtgctcctcctacccttccagtgccctaggcctggcgactgcccctgccttttagacccgccctccccttttatacctgctcttgttctactgagaaaagcctctccagcaataatgttttctagtcacttcctccgtctccgggacggcgtgcctggacactgtaccgactttgatagatttctacactgaggtttgaattcatatcgcctgagttgcttttacttctctatacaaaatgattttgaagagattttaaagacgttcccttttgtattctcttcctcatccaccgccactgggcctgtcactgatggtggctctggtgtgaagtttgctttgtactgagggttggggtggggaagcaatttgtattttattgtttcttagcacaagcaggtgaactgggagcagctctgtgactccccctctttcacttcatagctcaccaggactgttttataaactgctgtatttggaaaccccttctttacttcccaggccagcaagctcttcactgaaactggttgaagggtgttgcacccttttgggcctagaattctgaactttatctgttctgtttctgtgggaggagaaggggaagtatgttttggggggctgcttcctgtctgagtaagccctcaggagcctctgctcccctgtgaacccactgaaccttctgagcccccactgcttctatggggctctctcttctgccttctcaggaaagctggtgtctgattttggccatcaggactctgacgtctctttggtcttgttgatttcctctgggcatatcccttccccagatctgctcctcccctttcacaggtgggatcggcactcagggggtctggaaagaaggtcataagggagcatgataggatttggggcagagggacaggctcctctggggaaaccccccagagctctttaccaaggatgaaagaggagccaggccttgggctcctgatgaggagaaaggggccccaccggggtctaatggtgacagtccaaaccactccactggcctcctggcagaagccgagtgtgctggggtctccgaaaagggtccctcctttttgggggaaggtcagcccagcccctccaaaggtctgatgtctccactttcacccgcaggccttaccgctctgtttatagtgacccaccctagatcttccccaagagggactggggtttctggggtccattctctgagtcagtggttatttgaaaatttgattttgattttattttttctctgtaaacttcaagctggcttttcccattacaattcctgtgatttatg

SEQ ID NO: 184349 - DNA, 1775 bp, Homo Sapiens
tccttgtaccccagcgccaggacgcgggctccttcccgggagatctcggtgtggatgtggtggtagtcgggcgggcactgggagaacatggagtgcagagtttcgggggcccccttcacggccgcgatgtagcagaggtcggtggagcccagcttctcatacgaggcaagcacggacattcgcttcagggcactggcaaaatgaaagcgctggtgaattttcagcccctgagttttaatacttcggggaatactttctcatctttggtcagcgtccagtccacggccgtcagcatggccttctctagagggtcacccacgagggtgccgtcgtccagctgcatgagcgagtggcacgaggccagggcccggtgtgtttctacagggatgctggacactggggtcacctccttcccgtctctcagcccggccacaccgcgcaccaccaggctgtcactggtcaacgtccccgtcttgtcaaagcagcacacctcgaccttgccagcaaaggggatccggaagggctctgtgcagtacatgtagagcttggccagggcgatgagggaggtgttgacggccagggacagctcgatgggcagctcaggaggcacgaccgaggtgaggatcagggtgcactccagaaacagcttgtagcggttccggctggggtccttggtaccttcaatccatacataggcagctgcagcgatggcaaacaccaggaggaagaggatgaagatgaaggtctccaggttgttcgcagtcaccctcttgaccccgaagaggatggtgcgcagcagcttgccctgggatgtgttgaatccggtccgcaggacgtaggccacgcacccgctgtcaaccggcttcaggcccgtggtggctttctgtggggggatgtgctgcaccaccttggtgcccccgaagatgacgtgcagccgggaatcagcctggaggtccagcacccggtctgggctgaggtcttcgatgggctccttcatctgtggcacggactcccccgtgagcatggcctcgtctacgatgcagcggcctcgcagcagaagcacgtcacatggcaccaggttctcctgtggggagcggccgatggagacgatgtcccctggtacgatctcatcactggcaatgggcctccacttgcggcttcggtagacctggatcatgtggggcttgttgcccatcttccggatctccgacatgttccgcatctgctgctgcaccagcgaggcctcgaacgccaccagcatggatagcgtaaagacgctgtagtaccagtactcatccaggcaccagagccccacacagaacacctgaaatacaaagaagggggctgtggctctctccttgaaaagctccgagaagtcaggcaccaccatctcggccttgttgctcccaaatttcttctcagctgctcggatctctgagtcttcctggaagcctctgttgctctgatagtatgagaaggcgtttcccacaggaaaggccacggggagaaactgcttcttctccagggcatcgtaggaatacttgatcttctggaattcgaaggacagcacctcaagcccgtcttcgccctcattgcggtgcagggccacgagctccgtggagccattgttgggggttggcaccaccttcacaaaggtcgctttgctggggtcgtactccggggtgcaggtgagcgcgcaatgcgcgtgcacagaccaatgccccgagaggacagtgagcgcgtgcgcgaggcagatggtggcaagcacgagccaa

SEQ ID NO: 184350 - DNA, 990 bp, Homo Sapiens
ttggctccctcctggtgtttgccatcgctgcagctgcctatgtatggattgaaggtaccaaggaccccagccggaaccgctacaagctgtttctggagtgcaccctgatcctcacctcggtcgtgcctcctgagctgcccatcgagctgtccctggccgtcaacacctccctcatcgccctggccaagctctacatgtactgcacagagcccttccggatcccctttgctggcaaggtcgaggtgtgctgctttgacaagacggggacgttgaccagtgacagcctggtggtgcgcggtgtggccgggctgagagacgggaaggaggtgaccccagtgtccagcatccctgtagaaacacaccgggccctggcctcgtgccactcgctcatgcagctggacgacggcaccctcgtgggtgaccctctagagaaggccatgctgacggccgtggactggacgctgaccaaagtgccctgaagcgaatgtccgtgcttgcctcgtatgagaagctgggctccaccgacctctgctacatcgcggccgtgaagggggcccccgaaactctgcactccatgttctcccagtgcccgcccgactaccaccacatccacaccgagatctcccgggaaggagcccgcgtcctggcgctggggtacaaggagctgggacacctcactcaccagcaggcccgggaggtcaagcgggaggccctggagtgcagcctcaagttcgtcggcttcattgtggtctcctgcccgctcaaggctgactccaaggccgtgatccgggagatccagaatgcgtcccaccgggtggtcatgatcacgggagacaacccgctcactgcatgccacgtggcccaggagctgcacttcattggaaaaggcccacacgctgatcctgcagcctccctccgagaaaggccggcagtgcgagtggcgctccactgacagcagcatcgtgctgccccctggacccggggctcccc

SEQ ID NO: 184351 - DNA, 3637 bp, Homo Sapiens
  misc_feature (478)..(629): n is a, c, g, or t
  misc_feature (631)..(644): n is a, c, g, or t
ttggcgaccgcggcccccctgacatcattcctcatgagggaggaggcacaaacagttctgggccgaccagaaaaaggacgactgggacttgactctgaatcgcaggatttgaagagatttctcctggcttcccaacgaggctggtgggaagcggtcctcctcccatacacgacctcccaccctcgcgaggcgtagaaaccagttctgactgtacagtaaagcgagggccagggctgaggtctggaagctaatgaaagcacagaaagtgtcgaaactggatgagcaggaagcgagtggcctcccctgtcatctgacgttttcccaggatgtaatttgcctgactgaaacagatcaggaccaacagggagagttttcgatttagtgtgaggaaaagagcactaaattgtagcaaaagaccttattgctcaaggcccagtcagaagatttcataaggaagctgtagaaagtcttaagaggnnnnnnnnnnnnnnnnnnnnnnnnnnnnnnnnnnnnnnnnnnnnnnnnnnnnnnnnnnnnnnnnnnnnnnnnnnnnnnnnnnnnnnnnnnnnnnnnnnnnnnnnnnnnnnnnnnnnnnnnnnnnnnnnnnnnnnnnnnnnnnnnnnnnnnnncnnnnnnnnnnnnnncgaagaaaaagtccaaagagggtaaaggctgttctccccttaaaaaacagctaaagacctttgggggcgctgctccttgtaaatgtcaactacttccgcgggaaagacgcgcaggcacttggccttgtgggcgctcacttgccccggaagtactgttgagttagcgcctcgccttccggggcggattgtctgtcgttgcagtagctgtaggaaggggaggccattttccgtttctgggaggagtgaggggcaacgggtcggagaaaaaggaaaaaagaagggctcagcgcctccccgccgggccgtggacagaggggcacagtttcggcaggcgggtgaggtcgctgagggcccgccggagatgttttccttgtcgagcacggtgcaaccccaggttacagttcctctgagtcatctcatcaatgccttccatacaccaaaaaacacttctgtttctctcagtggagtgtcagtttctcaaaaccagcatcgagatgtagttcctgagcatgaggctcccagcagtgagccttcacttaacttaagggaccttggattatctgaactaaaaattggacagattgatcagctggtagaaaatctacttcctggattttgtaaaggcaaaaacatttcttcccattggcatacatcccatgtctctgcacaatccttctttgaaaataaatatggtaacttagatatatttagtacattacgttcctcttgcttgtatcgacatcattcaagagctcttcaaagcatttgttcagatcttcagtactggccagttttcatacagtctcggggttttaaaactttgaaatcaaggacacgacgtctccagtctacctccgagagattagctgaaacacagaatatagcgccatcattcgtgaaggggtttcttttgcgggacagaggatcagatgttgagagtttggacaaactcatgaaaaccaaaaatatacctgaagctcaccaagatgcatttaaaactggttttgcggaaggttttctgaaagctcaagcactcacacaaaaaaccaatgattccctaaggcgaacccgtctgattctcttcgttctgctgctattcggcatttatggacttctaaaaaacccatttttatctgtccgcttccggacaacaacagggcttgattctgcagtagatcctgtccagatgaaaaatgtcacctttgaacatgttaaaggggtggaggaagctaaacaagaattacaggaagttgttgaattcttgaaaaatccacaaaaatttactattcttggaggtaaacttccaaaaggaattcttttagttggacccccagggactggaaagacacttcttgcccgagctgtggcgggagaagctgatgttcctttttattatgcttctggatccgaatttgatgagatgtttgtgggtgtgggagccagccgtatcagaaatctttttagggaagcaaaggcgaatgctccttgtgttatatttattgatgaattagattctgttggtgggaagagaattgaatctccaatgcatccatattcaaggcagaccataaatcaacttcttgctgaaatggatggttttaaacccaatgaaggagttatcataataggagccacaaacttcccagaggcattagataatgccttaatacgtcctggtcgttttgacatgcaagttacagttccaaggccagatgtaaaaggtcgaacagaaattttgaaatggtatctcaataaaataaagtttgatcaatccgttgatccagaaattatagctcgaggtactgttggcttttccggagcagagttggagaatcttgtgaaccaggctgcattaaaagcagctgttgatggaaaagaaatggttaccatgaaggagctggagttttccaaagacaaaattctaatggggcctgaaagaagaagtgtggaaattgataacaaaaacaaaaccatcacagcatatcatgaatctggtcatgccattattgcatattacacaaaagatgcaatgcctatcaacaaagctacaatcatgccacgggggccaacacttggacatgtgtccctgttacctgagaatgacagatggaatgaaactagagcccagctgcttgcacaaatggatgttagtatgggaggaagagtggcagaggagcttatatttggaaccgaccatattacaacaggtgcttccagtgattttgataatgccactaaaatagcaaagcggatggttaccaaatttggaatgagtgaaaagcttggagttatgacctacagtgatacagggaaactaagtccagaaacccaatctgccatcgaacaagaaataagaatccttctaagggactcatatgaacgagcaaaacatatcttgaaaactcatgcaaaggagcataagaatctcgcagaagctttattgacctatgagactttggatgccaaagagattcaaattgttcttgaggggaaaaagttggaagtgagatgataactctcttgatatggatgcttgctggttttattgcaagaatacaagtagcattgcagtagtctacttttacaacgctttcccctcattcttgatgtggtgtaattgaagggtgtgaaatgctttgtcaatcatttgtcacatttatccagtttgggttattctcattatgacacctattgcaaattagcatcccatggcaaatatattttgaaaaaataaagaactatcaggattgaaaacagctcttttgaggaatgtcaattagttattaagttgaaagtaattaatgattttatgtttggttactctactagatttgataaaaattgtgcctttagccttctatatacatcagtggaaacttaagatgcagtaattatgttccagattgaccatgaataaaatattttttaatctaaatgtagagaagttgggattaaaagcagtctcggaaacacagagccaggaatatagcctt

SEQ ID NO: 184352 - DNA, 1244 bp, Homo Sapiens
  misc_feature (804)..(862): n is a, c, g, or t
ttgggtggatggagagactggggagagcttccctgcacaggtgcctagtggggaggaccagacggccctgtccctggaagagtgccttaggctgctggaagccacctgcccctttggggagaatgctgagtttccagcagacatttccagcataacagaagcagtgcctagtgagagtgagccccctgctcttcaaaacaacctcttgtctcctcttctgaccgggacagagtcaccatttgatttggaacagcagtggcaagatctcatgtccatcatggaaatgcaggccatggaagtgaacacatcagcaagtgaaatcctgtacagtgcccctcctggagacccactgagcaccaactacagccttgcccccaacactcccatcaatcagaatgtcagcctgcatcaggcgtccctggggggctgcagccaggacttcttactcttcagccccgaggtggaaagcctgcctgtggccagtagctccacgctgctcccgttggcccccagcaattctaccagcctcaactccaccttcggctccaccaacctgacagggctcttctttccaccccagctcaatggcacagccaatgacacagcaggcccagagctgcctgaccctttggggggtctgttagatgaagctatgttggatgagatcagccttatggacctggccattgaagaaggctttaaccctgtgcaggcctcccagctggaggaggaatttgactctgactcaggcctttccttagactcgagccatagcccttcttccctaagcagctctgaaggcannnnnnnnnnnnnnnnnnnnnnnnnnnnnnnnnnnnnnnnnnnnnnnnnnnnnnnnnnntcctccttttctgaggaaggtgcggttggctacagctctgactctgagaccctggatctggaagaggccgagggtgctgtgggctaccagcctgagtattccaagttctgccgcatgagctaccaggatccagctcagctctcatgcctgccctacctggagcacgtgggccacaaccacacatacaacatggcacccagtgccctggactcagccgacctgccaccacccagtgccctcaagaaaggcagcaaggagaagcacgctgacttcctggacaagcagatgagccgggatgagcaccgagcccgagccatgaagatccctttcaccaatgacaaaatcatcaacctgcctgtggaggagttcaatgaactgctgt

SEQ ID NO: 184353 - DNA, 1320 bp, Homo Sapiens
  misc_feature (855)..(913): n is a, c, g, or t
ttggattgatctgggggctgggcgtgaggtttttgactatagtcaccgccagaaggagcaggatgtggagaaggagctgcgagatggaggcgagcaggacacctgggcaggcgagggcgcggaagctctggcacggaacctgctagtggatggagagactggggagagcttccctgcacagtttccagcagacatttccagcataacagaagcagtgcctagtgagagtgagccccctgcttttcaaaacaacctcttgtctcctcttctgaccgggacagagtcaccatttgatttggaacagcagtggcaagatctcatgtccatcatggaaatgcaggccatggaagtgaacacatcagcaagtgaaatcctgtacagtgcccctcctggagacccactgagcaccaactacagccttgcccccaacactcccatcaatcagaatgtcagcctgcatcaggcgtccctggggggctgcagccaggacttcttactcttcagccccgaggtggaaagcctgcctgtggccagtagctccacgctgctcccgttggcccccagcaattctaccagcctcaactccaccttcggctccaccaacctgacagggctcttctttccaccccagctcaatggcacagccaatgacacagcaggcccagagctgcctgaccctttggggggtctgttagatgaagctatgttggatgagatcagccttatggacctggccattgaagaaggctttaaccctgtgcaggcctcccagctggaggaggaatttgactctgactcaggcctttccttagactcgagccatagcccttcttccctaagcagctctgaaggcannnnnnnnnnnnnnnnnnnnnnnnnnnnnnnnnnnnnnnnnnnnnnnnnnnnnnnnnnntcctccttttctgaggaaggtgcggttggctacagctctgactctgagaccctggatctggaagaggccgagggtgctgtgggctaccagcctgagtattccaagttctgccgcatgagctaccaggatccagctcagctctcatgcctgccctacctggagcacgtgggccacaaccacacatacaacatggcacccagtgccctggactcagccgacctgccaccacccagtgccctcaagaaaggcagcaaggagaagcaggctgacttcctggacaagcagatgagccgggatgagcaccgagcccgagccatgaagatccctttcaccaatgacaaaatcatcaaacctgcctgtggaggagttcaatgaactgctgtccaaataccagttgagtgaagccc

SEQ ID NO: 184354 - DNA, 1520 bp, Homo Sapiens
  misc_feature (1207)..(1270): n is a, c, g, or t
gattttcttcccgctttgatttttttcggagcgggggggaggttccttccttccttccttctatccctccttcctgaaatgagactttctgccaccttcccttcctctcacaggtccattccttcccctctgtcggcctttgctccacatagctcctctacctccagcaactccaccaccacccctgcctcacaggaaaggggtagggtgaggaccctgtccgtctaaatggtctggccacttccactccacccgagtggagctgagccagccagtgcctgcctcttcctgtacactgacccgcagtcatcccatctgagaagatatattggataagaaggcatttaagtccccgctgtaggtccaggtccaggtccaggtccagcccttctccagtttcggtcttggtgggcttcaaacccccttcttccccaggctcactttctccggtcctttggcttcctctcctgccgccgggcctgctggtcggccatcgtgcgggggatgaggaggacactgccgtccccggcgtactggagcgcatactgactgggcgagtagggtcgtccgttctcatctcgcagccgcccaaacacctcctggtacaggctctggaccttctgcttcatctgtcgcagggagcgcaggaactccactttctcccgcagcagccgggctttgtcacgctgcaggtcctccacatcacgctccagattcaggatggtgtccagcttgcgcttgcggcagttctgcgccgccatcttgttcttgccccggcgccggatgtctcggatgaggctcagctgggcttcactcaactggtatttggacagcagttcattgaactcctccacaggcaggttgatgattttgtcattggtgaaagggatcttcatggctcgggctcggtgctcatcccggctcatctgcttgtccaggaagtcagcctgcttctccttgctgcctttcttgagggcactgggtggtggcaggtcggctgagtccagggcactgggtgccatgttgtatgtgtggttgtggcccacgtgctccaggtagggcaggcatgagagctgagctggatcctggtagctcatgcggcagaacttggaatactcaggctggtagcccacagcaccctcggcctcttccagatccagggtctcagagtcagagctgtagccaaccgcaccttcctcagaaaagnnnnnnnnnnnnnnnnnnnnnnnnnnnnnnnnnnnnnnnnnnnnnnnnnnnnnnnnnnnnnnnntgccttcagagctgcttagggaagaagggctatggctcgagtctaaggaaaggcctgagtcagagtcaaattcctcctccagctgggaggcctgcacagggttaaagccttcttcaatggccaggtccataaggctgatctcatccaacatagcttcatctaacagaccccccaaagggtcaggcagctctgggcctgctgtgtcattggctgtgccattgagctggggtggaaagaagagccctgccaa

SEQ ID NO: 184355 - DNA, 2075 bp, Homo Sapiens
  misc_feature (368)..(376): n is a, c, g, or t
  misc_feature (1893)..(1905): n is a, c, g, or t
ttgggataggtctgaaaagactctaagggaggggaacgatgggtgtggccaagactctgacctagccctcaccctgctccccaccctcggccggctttaggtcccagtggtttcttcctccagttaggagccttgatgccggaggggacagtggtaggtggggaggttgagtgcaaagggttcaggctgtaagtcatgttgggttggaatgggggcacaggaaggtggggctgttggggagccacgctaagccgggtgtctgtagcagagccagagaaccgggacactgaagagggtgctgaagggggcgactctcagggatcgagccagggcccccgaaggtgggatcgaccagggtaggagacagnnnnnnnnnggagagcagcgggtgggggcgaaagcagggccgaggagagagcactttggacagaacccggcggggaaagggcggcgccgaggcttgtcaggggcgccccgcagcgtcccaggcgcacctgttgggaagaaaggaaggggcttcccggtgttcgagggaaatccagtccggaggggctgactcggagcttgggactcctggggagccaccgcctcctccccagcggcggtcaaaaccgggcaagcgaaggggcgtgaccctggtgctcaggtttcttcctcctcacctgggcaaggaggggtgggggccacgacttccggttcaaggtcgccgagagcgcccggagggaaccgcctggccttcggggaccaccaattttgtctggaaccaccctcccggcgtatcctactccctgtgccgcgaggccatcgcttcactggaggggtcgatttgtgtgtagtttggtgacaagatttgcattcacctggcccaaaccctttttgtctctttgggtgaccggaaaactccacctcaagttttcttttgtggggctgccccccaagtgtcgtttgttttactgtagggtctccccgcccggcgcccccagtgttttctgagggcggaaatggccaattcgggcctgcagttgctgggcttctccatggccctgctgggctgggtgggtctggtggcctgcaccgccatcccgcagtggcagatgagctcctatgcgggtgacaacatcatcacggcccaggccatgtacaaggggctgtggatggactgcgtcacgcagagcacggggatgatgagctgcaaaatgtacgactcggtgctcgccctgtccgcggccttgcaggccactcgagccctaatggtggtctccctggtgctgggcttcctggccatgtttgtggccacgatgggcatgaagtgcacgcgctgtgggggagacgacaaagtgaagaaggcccgtatagccatgggtggaggcataattttcatcgtggcaggtcttgccgccttggtagcttgctcctggtatggccatcagattgtcacagacttttataaccctttgatccctaccaacattaagtaagtctgggaaccctgcctcctaaggggacaggtctggggtcctggaatagggaggagggcagaggcacgccagggtttctaaccacccccttctcttcacaggtatgagtttggccctgccatctttattggctgggcagggtctgccctagtcatcctgggaggtgcactgctctcctgttcctgtcctgggaatgagagcaaggctgggtaccgtgtaccccgctcttaccctaagtccaactcttccaaggagtatgtgtgacctgggatctccttgccccagcctgacaggctatgggagtgtctagatgcctgaaagggcctggggctgagctcagcctgtgggcagggtgccggacaaaggcctcctggtcactctgtccctgcactccatgtatagtcctcttgggttnnnnnnnnnnnnntgccgttggtgggagaaacaaaaagagggagagtgtgctttttgtacagtaataaaaaataagtattgggaagcaggcttttttcccttcagggcctctgctttcctcccgtccagatccttgcagggagcttggaaccttactgcacctacttcagctcagaacactta

SEQ ID NO: 184356 - DNA, 1607 bp, Homo Sapiens
  misc_feature (1345)..(1354): n is a, c, g, or t
ggcgggtgctgggaaccgagcctcggcttgcggccggcagtttccgtgggtctgtgaagaggtcggcggcccctgcgggcgccagtcagctttaagaaaaagtagagatcacttctgactgtactgaacagcaaaaattaagtgacttgctgccctgcacatcatggcactgccattccgtaaggacttagaaaagtacaaagaccttgatgaagatgagctccttgggaatctgtcagaaacagaactgaaacaactggaaactgttttggatgatcttgaccccgagaatgcccttctgcctgcagggttccggcagaagaaccagacatcaaagtccaccacagggccatttgatagagagcatctcctttcatatctggagaaagaagcattggagcataaagacagggaagactatgtgccctacactggagaaaaaaagggaaaatatttatccccaaacagaaacctgtacagacttttacagaagaaaaagtgtctcttgatccagaattagaagaagctttgacaagtgcttctgatacagaattgtgtgacctcgcagcaattcttgggatgcacaatttgataacgaatacaaagttctgtaatataatgggaagtagtaatggtgttgaccaagaacatttttcaaatgtggtcaaaggtgaaaagattcttccggtatttgatgagccaccaaatccaaccaatgtagaagagagtttgaagagaactaaagaaaacgatgctcatcttgttgaagttaatttgaataatataaagaatatcccaattccaaccctaaaagattttgcaaaggctttggaaaccaacacacatgtgaaatgtttcagtcttgcagccacccggagcaatgaccctgttgctactgcttttgcagaaatgctgaaagtgaacaaaactttgaagagcttaaatgtggagtccaactttatcacgggagttgggattctggcactgattgatgcgttaagagataatgaaaccctggcagagctcaagattgacaatcagaggcagcagttggggacagctgtagaattggaaatggccaagatgcttgaggaaaatacaaatatccttaaatttggatatcagtttacacagcagggaccacgaaccagagcagctaatgctataacaaaaaacaatgacttagtgcgtaagagacgagttgaaggagatcaccagtaagtctgcaaaggtgtaatctttggaagacttcagaagatcaccaagggctcatgttggtgacatcatgtaaaattttcctgggtagaagggaaaagactggaaaaatttttttagtgacatgcannnnnnnnnnagttgttatcaaattgtaaaatcagtaatgtgatattttatattctgaaacatttctactttctgctaaaatcaattttaatttagtttaattgaatgatttatgatgaatcttgggcaaaaaaatacaactgtaaaaaatttcacaggtcatttgtgtagaataatttgaacattgtgaggaccaatcttttttaaatcaaaagggatgttgctggtatcagaattgttattgcttcatttacacataaaaa

SEQ ID NO: 184357 - DNA, 1054 bp, Homo Sapiens
ttggctcataagaaagactgacaggagctacaaagtaaaatcccgtaacagcactgtggaatacacccttaacaagttggagcctggcgggaaataccacatcattgtccaactggggaacatgagcaaagattccagcataaaaattaccacagtttcattatcagcacctgatgccttaaaaatcataacagaaaatgatcatgttcttctgttttggaaaagcctggctttaaaggaaaagcattttaatgaaagcaggggctatgagatacacatgtttgatagtgccatgaatatcacagcttaccttgggaatactactgacaatttctttaaaatttccaacctgaagatgggtcataattacacgttcaccgtccaagcaagatgcctttttggcaaccagatctgtggggagcctgccatcctgctgtacgatgagctggggtctggtgcagatgcatctgcaacgcaggctgccagatctacggatgttgctgctgtggtggtgcccatcttattcctgatactgctgagcctgggggtggggtttgccatcctgtacacgaagcaccggaggctgcagagcagcttcaccgccttcgccaacagccactacagctccaggctggggtccgcaatcttctcctctggggatgacctgggggaagatgatgaagatgcccctatgataactggattttcagatgacgtccccatggtgatagcctgaaagagctttcctcactagaaaccaaatggtgcagcctctgaaggtgaccacataactgtcttcactgtgaccaatcggagtccctgcttgcttgtgaagaaggggcttttgtaccttgttggagatgccacctcagaagttcacactgtgcagaaaaagttttattctctcctggcatacattagaatgtcagatgcttgcatccatgtggaccacgatgggcctctaaaaattggtgggcagggggtttgcttatgagttttctctggaaaccgattttactcctggatgtattgaatgcccccttgagctttatga

SEQ ID NO: 184358 - DNA, 1304 bp, Homo Sapiens
  misc_feature (1146)..(1158): n is a, c, g, or t
ttggcaccattttatctcaggttagtgaagaatcagtgcaggtccctgactcttattttcccagaggccatggagctgagattgagactagccttgtggtttcacactaaagagtttccttgttatgggcaacatgcatgacctaatgtcttgcaaaatccaatagaagtattgcagcttccttctctggctcaagggctgagttaagtgaaaggaaaaacagcacaatggtgaccactgataaaggctttattaggtatatctgaggaagtgggtcacatgaaatgtaaaaagggaatgaggtttttgttgttttttggaagtaaaggcaaacataaatattaccatgatgaattctagtgaaatgaccccttgactttgcttttcttaatacagatatttactgagaggaactatttttataacacaagaaaaatttacaattgattaaaagtatccatgtcttggatacatacgtatctatagagctggcatgtaattcttcctctataaagaataggtataggaaagactgaataaaaatggagggatatccccttggatttcacttgcattgtgcaataagcaaagaagggttgataaaagttcttgatcaaaaagttcaaagaaaccagaattttagacagcaagctaaataaatattgtaaaattgcactatattaggttaagtattatttaggtattataatatgctttgtaaattttatattccaaatattgctcaatatttttcatctattaaattaatttctagtgtaaataagtagcttctatatctgtcttagtctattataattgtaaggagtaaaattaaatgaatagtctgcaggtataaatttgaacaatgcatagatgatcgaaaattacggaaaatcatagggcagagaggtgtgaagattcatcattatgtgaaatttggatctttctcaaatccttgctgaaatttaggatggttctcactgtttttctgtgctgatagtaccctttccaaggtgaccttcagggggattaaccttcctagctcaagcaatgagctaaaaggagccttatgcatgatcttcccacatatcaaaataactaaaaggcactgagtttggcatttttctgcctgctctgctaagaccnnnnnnnnnnnnnactttcattataacatattatacatgacattatacaaaaatgattaaaatatattaaaacaacatcaacaatccaggatatttttctataaaactttttaaaaataattgtatctatatattcaattttacatcctttttcaaagg

SEQ ID NO: 184359 - DNA, 1725 bp, Homo Sapiens
  misc_feature (110)..(140): n is a, c, g, or t
  misc_feature (564)..(575): n is a, c, g, or t
ttggcaaataggtatgttcacaggccagtgtgtaaggccgtctgccctcgctggcgtgctggtatgcagagaaatttcccccaacaaagttgatgttccctgctcccccnnnnnnnnnnnnnnnnnnnnnnnnnnnnnnnttctgtgagggaaacaaaagggtctatggatgtggatatgccccattcttaccttccaggtttgctgaaggagcaaacctcacactggccaagggcagatgcgcatggcctgcctggtgccccggctgtgagcccctcaaggcctccaggccagcctccgtggatgtgcgtgtggaaataggccacgcctgtctcttctcttgctcaagttttctctcacagatgacagccacctaccacataacatgaccagcaaacggactgttcctagtccagagggccttgccatcatgcaagtggaagggcgactgtgacagccactgccacagaggatggcagttggctgtgtccctttgtgagggtcttcaaatccttttccttctgcagggccttgggcctgtaaatatcctcatctttctattcnnnnnnnnnnnnagttgccccctcacctaatttccacctcagttttgaacaaaatcgttctcttcctgaatagatcaaaaccactgatgtgaaagataagccttgaagcagcaattgcccttaaaacatcatccctgccctggatcggcctggagccagtgcccaagtacggtttggtgtgtacatgaaaacaaacgtctctgcagtctctggggcggaggtttcgctggcttttctttctctcaaagaaaaaaacatgcaccattttcaatgtgcttttgcctctcctctctgttcacatgcttttagcagcaagtcccctccaaatctgtcttggttccccttcagaaggtggcgctgcccccgaaaggcacctcagcctgtgagtgctgaggaaccagctcctctggctgattttccagttggactggccattgctctccagaagtgctctgttagcaaacgtgatgtggaaacgatcacagatggtgttttctcgttgttcgccagaatttatacgggggagacaaattcccggtaattaccaagtctgcactcgggtaccaaagctctgaagctctctgaacagttgccatacttgagttgatgaatgtgttattcatggtgtctcatctcatcaatgcatcttgagagacttaatgaaattttagcaacagtatagaatagctctatcgggtggggagtaatcattaaacagatgaaatcggccccagatttacatgtctctttagaatccacagtgtaagcaaactacagttacaaagggatgggggttgtaaaccctctgagactctgcacttttcgcacgtatggcatcgtcaagtgctgtcttattacagcctttgtaaggagaggcaggctcctcctggggtgggctctgcagctgctctatttccaggcatgtgatcgcccccgctctccagattccccagcactctgctgcgtgtaactccactcaattctccactcatccttccttgtgaagcaggatcgttgaagttttaagtatgggcaaaaatctggaaaacttaggatccctctgacaccccaggattaggggacacagcagtggctagggcatcagccacagaactgagcgggaaatgccacttgtattggctgtaaagaaatcctggctttg

SEQ ID NO: 184360 - DNA, 3396 bp, Homo Sapiens
  misc_feature (3312)..(3338): n is a, c, g, or t
ttggcccacagtaaaaaacttaccaaaaaaataaggaacagttgtctgatatgatgatgataaataaacagaagggaggtctcaaggctttgagcaaggagaagagagagaagttggaagcttaccagcacctgttttatttattgcaaaccaatcccacctatctggccaagctcatttttcagatgccccagaacaagtccaccaagttcatggactctgtaatcttcacactctacaactacgcgtccaaccagcgagaggagtacctgctcctgcggctctttaagacagcactccaagaggaaatcaagtcgaaggtagatcagattcaagagattgtgacaggaaatcctacggttattaaaatggttgtaagtttcaaccgtggtgcccgtggccagaatgccctgagacagatcttggccccagtcgtgaaggaaattatggatgacaaatctctcaacatcaaaactgaccctgtggatatttacaaatcttgggttaatcagatggagtctcagacaggagaggcaagcaaactgccctatgatgtgacccctgagcaggcgctagctcatgaagaagtgaagacacggctagacagctccatcaggaacatgcgggctgtgacagacaagtttctctcagccattgtcagctctgtggacaaaatcccttatgggatgcgcttcattgccaaagtgctgaaggactcgttgcatgagaagttccctgatgctggtgaggatgagctgctgaagattattggtaacttgctttattatcgatacatgaatccagccattgttgctcctgatgcctttgacatcattgacctgtcagcaggaggccagcttaccacagaccaacgccgaaatctgggctccattgcaaaaatgcttcagcatgctgcttccaataagatgtttctgggagataatgcccacttaagcatcattaatgaatatctttcccagtcctaccagaaattcagacggtttttccaaactgcttgtgatgtcccagagcttcaggataaatttaatgtggatgagtactctgatttagtaaccctcaccaaaccagtaatctacatttccattggtgaaatcatcaacacccacactctcctgttggatcaccaggatgccattgctccggagcacaatgatccaatccacgaactgctggacgacctcggcgaggtgcccaccatcgagtccctgataggggaaagctctggcaatttaaatgacccaaataaggaggcactggctaagacggaagtgtctctcaccctgaccaacaagttcgacgtgcctggagatgagaatgcagaaatggatgctcgaaccatcttactgaatacaaaacgtttaattgtggatgtcatccggttccagccaggagagaccttgactgaaatcctagaaacaccagccaccagtgaacaggaagcagaacatcagagagccatgcagagacgtgctatccgtgatgccaaaacacctgacaagatgaaaaagtcaaaatctgtaaaggaagacagcaacctcactcttcaagagaagaaagagaagatccagacaggtttaaagaagctaacagagcttggaaccgtggacccaaagaacaaataccaggaactgatcaacgacattgccagggatattcggaatcagcggaggtaccgacagaggagaaaggccgaactagtgaaactgcaacagacatacgctgctctgaactctaaggccaccttttatggggagcaggtggattactataaaagctatatcaaaacctgcttggataacttagccagcaagggcaaagtctccaaaaagcctagggaaatgaaaggaaagaaaagcaaaaagatttctctgaaatatacagcagcaagactacatgaaaaaggagttcttctggaaattgaggacctgcaagtgaatcagtttaaaaatgttatatttgaaatcagtccaacagaagaagttggagacttcgaagtgaaagccaaattcatgggagttcaaatggagacttttatgttacattatcaggacctgctgcagctacagtatgaaggagttgcagtcatgaaattatttgatagagctaaagtaaatgtcaacctcctgatcttccttctcaacaaaaagttctacgggaagtaattgatcgtttgctgccagcccagaaggatgaaggaaagaagcacctcacagctcctttctaggtccttctttcctcattggaagcaaagacctagccaacaacagcacctcaatctgatacactcccgatgccacatttttaactcctctcgctctgatgggacatttgttacccttttttcatagtgaaattgtgtttcaggcttagtctgacctttctggtttcttcattttcttccattacttaggaaagagtggaaactccactaaaatttctctgtgttgttacagtcttagaggttgcagtactatattgtaagctttggtgtttgtttaattagcaatagggatggtaggattcaaatgtgtgtcatttagaagtggaagctattagcaccaatgacataaatacatacaagacacagaactaaaatgtcatgttattaacagttattaggttgtcatttaaaaataaagttcctttatatttctgtcccatcaggaaaactgaaggatatggggaatcattggttatcttccattgtgtttttctttatggacaggagctaatggaagtgacagtcatgttcaaaggaagcatttctagaaaaaaggagataatgtttttaaatttcattatcaaacttgggcaattctgtttgtgtaactccccgactagtggatgggagagtcccattgctaaaattcagctactcagataaattcagaatgggtcaaggcacctgcctgtttttgttggtgcacagagattgacttgattcagagagacaattcactccatccctatggcagaggaatgggttagccctaatgtagaatgtcattgtttttaaaactgttttatatcttaagagtgccttattaaagtatagatgtatgtcttaaaatgtgggtgataggaattttaaagatttatataatgcatcaaaagccttagaataagaaaagctttttttaaattgctttatctgtatatctgaactcttgaaacttatagctaaaacactaggatttatctgcagtgttgcagggagataattctgccttaaattgtctaaaacaaaaacaaaaccagccaacctatgttacacgtgagattaaaaccaannnnnnnnnnnnnnnnnnnnnnnnnnnctcttgctgcccacattgtgcctttattttatgagccccagttttctgggcttagttt

SEQ ID NO: 184361 - DNA, 2225 bp, Homo Sapiens
  misc_feature (1437)..(1456): n is a, c, g, or t
ttgggtcatcggtggccctgatcaacagggcattggaatcaggagatgtgaatacagtgtggaagcaattgagcagttcagttactggtcttaccaatattgaggaagaaaactgtcagaggtatctcgatgagttgatgaaactgaaggctcaggcacatgcagagaataatgaattcattacatggaatgatatccaagcttgcgtggaccatgtgaacctggtggtgcaagaggaacatgagaggattttagccattggtttaattaatgaagccctggatgaaggtgatgcccaaaagactctgcaggccctacagattcctgcagctaaacttgagggagtccttgcagaagtggcccagcattaccaagacacgctgattagagcgaagagagagaaagcccaggaaatccaggatgagtcagctgtgttatggttggatgaaattcaaggtggaatctggcagtccaacaaagacacccaagaagcacagaagtttgccttaggaatctttgccattaatgaggcagtagaaagtggtgatgttggcaaaacactgagtgcccttcgctcccctgatgttggcttgtatggagtcatccctgagtgtggtgaaacttaccacagtgatcttgctgaagccaagaagaaaaaactggcagtaggagataataacagcaagtgggtgaagcactgggtaaaaggtggatattattattaccacaatctggagacccaggaaggaggatgggatgaacctccaaattttgtgcaaaattctatgcagctttctcgggaggagatccagagttctatctctggggtgactgccgcatataaccgagaacagctgtggctggccaatgaaggcctgatcaccaggctgcaggctcgctgccgtggatacttagttcgacaggaattccgatccaggatgaatttcctgaagaaacaaatccctgccatcacctgcattcagtcacagtggagaggatacaagcagaagaaggcatatcaagatcggttagcttacctgcgctcccacaaagatgaagttgtaaagattcagtccctggcaaggatgcaccaagctcgaaagcgctatcgagatcgcctgcagtacttccgggaccatataaatgacattatcaaaatccaggcttttattcgggcaaacaaagctcgggatgactacaagactctcatcaatgctgaggatcctcctatggttgtggtccgaaaatttgtccacctgctggaccaaagtgaccaggattttcaggaggagcttgaccttatgaagatgcgggaagaggttatcaccctcattcgttctaaccagcagctggagaatgacctcaatctcatggatatcaaaattggactgctagtgaaaaataagattacgttgcaggatgtggtttcccacagtnnnnnnnnnnnnnnnnnnnntaaggaacagttgtctgatatgatgatgataaataaacagaagggaggtctcaaggctttgagcaaggagaagagagagaagttggaagcttaccagcacctgttttatttattgcaaaccaatcccacctatctggccaagctcatttttcagatgccccagaacaagtccaccaagttcatggactctgtaatcttcacactctacaactacgcgtccaaccagcgagaggagtacctgctcctgcggctctttaagacagcactccaagaggaaatcaagtcgaaggtagatcagattcaagagattgtgacaggaaatcctacggttattaaaatggttgtaagtttcaaccgtggtgcccgtggccagaatgccctgagacagatcttggccccagtcgtgaaggaaattatggatgacaaatctctcaacatcaaaactgaccctgtggatatttacaaatcttgggttaatcagatggagtctcagacaggagaggcaagcaaactgccctatgatgtgacccctgagcaggcgctagctcatgaagaagtgaagacacggctagacagctccatcaggaacatgcgggctgtgacagacaagtttctctcagccattgtcagctctgtggacaaaatcccttatgggatgcgcttcattgccaaagtgctgaaggactcgttgcatgagaagttccctgatgctggtgaggatgagctgctgaagattattggtaacttgctttattatcgatacatgaat

SEQ ID NO: 184362 - DNA, 1072 bp, Homo Sapiens
  misc_feature (823)..(838): n is a, c, g, or t
  misc_feature (966)..(992): n is a, c, g, or t
tttatttcatacagagatacaaaggcaactatgtgcagcaacaatctgatgggcagtccaaactcttgggaggaagtaaattcatggtaaatgtcatgatggctggtcgaggagaaggtcaaaggaggagagagaggagacagagaatgctacagctaataaataacagtaatgagaactgtgtggtttcaacgccatgagtttgttggggcatcctctgtgctactaaagccacaattctatatcatcatcatcaacattcttgaagcgcattttacactattctgcattagcaattgtgttgagggaactataaaccttaaaattactgacacattttattaaaggagctgtaaactctgctcattattgcctgtcttggatgtggcctttgggattcatagcctcttttaaggaaacagggttgacacactttggttggtcccagtttttgaggcaatgctagttgtaatagcatcatcttttaatctgaggaaaatgtttctttaaaaaacctgtcttccaaaatacaacaaaaaacaaggtctgggtagtggcgaatccttccatggcactccatgcctccctgtgggctgtaaccatgcacctgagtaaagagtctcataaaaatacttctccaatgcatttataatagggacacactacatagtttgttattcattaaagcagtttattggcttaatgtacatcagtgaatttttaaatgctaaaaatttatgataaaagaatactgaatcaaaacatcaaagaaagaaaatagaggctcagcagcatgatttcaatatattttcctggaaaaagnnnnnnnnnnnnnnnnaaagtgtatgactttttatccaagaacaaaagctttctaaatgcaatgtttagacttgaccatttttttaaagtaagcccagaaaattgggggtgctgaaataaaggcgcattgtgggcagcaagagnnnnnnnnnnnnnnnnnnnnnnnnnnntgggtttgaatctcaagggtaacataggttggatcattttgttttcgtttgagacacctaaaggcagaatgatatcccaa

SEQ ID NO: 184363 - DNA, 857 bp, Homo Sapiens
  misc_feature (189)..(215): n is a, c, g, or t
  misc_feature (274)..(283): n is a, c, g, or t
  misc_feature (344)..(356): n is a, c, g, or t
ttggatcaaaagccttataataagaaaagctttttttaaattgctttatctgtatatctgaactcttgaaacttatagctaaaacactaggatttatctgcagtgttgcagggagataattctgccttaaattgtctaaaacaaaaacaaaaccagccaacctatgttacacgtgagattaaaaccaannnnnnnnnnnnnnnnnnnnnnnnnnnctcttgctgcccacattgtgcctttattttatgagccccagttttctgggcttagtttnnnnnnnnnntcaagtctaaacattgcatttagaaagcttttgttcttggataaaaagtcatacactttgnnnnnnnnnnnnnctttttccaggaaaatatattgaaatcatgctgctgagcctctattttctttctttgatgttttgattcagtattcttttatcataaatttttagcatttaaaaattcactgatgtacattaagccaataaactgctttaatgaataacaaactatgtagtgtgtccctattataaatgcattggagaagtatttttatgagactctttactcaggtgcatggttacagcccacagggaggcatggagtgccatggaaggattcgccactacccagaccttgttttttgttgtattttggaagacaggttttttaaagaaacattttcctcaaattaaaagatgatgctattacaactagcattgcctcaaaaactgggaccaaccaaagtgtgtcaaccctgtttcctttaaaagaggctatgaatcccaaaggcccatccaagacaggcaataatgagcagagtttacagctcctttaataaaatgtgtcagtaatttt

SEQ ID NO: 184364 - DNA, 1387 bp, Homo Sapiens
  misc_feature (528)..(540): n is a, c, g, or t
gtgggtagcacatatggttcctttgaggttatgagaaggaaatacagtacggtttggcctgcaatgctaatggtctcacaagcagtcaaggtattttgctacagtggttgtgcttcaacttctgttgcctggtgtgtctggtgatatgaaatgttgtcacaaatgagctgctttggcttcgatctacgttataaaggatctaatgacattcatgtcttttaaattattgattacactgcccattcagctctgtgtggctttctttaaaatcatcaggtgtgtatcagctggatgactggcagaaaaccaaaggaaacatctcttgtatctattggatttttaaaaagcacctctaaaaaaaatagctcaaatttataaatctaaagaaaaacaagtgagtttccctttttgtttacatagtttgttcatttctccatatattactgcattaaaaataaataaacatctatatttttttaattagcaactatagcaaaatacccaaagtgttacagactgctaacaggnnnnnnnnnnnnngctcacattatttttgtgcatttagtgccatatgctgatatcttgaacatttaggtttcttttaatatattttaaaatgaagttatataaaaaatacagtaaccacggttgcctttgtgctcaaatctttggccataccagagtctaaattatccctccctgtgagggtcaacattcaaagtctaagacagggaggaaagaaacaagagttattattatttttcctctttaaaattagtccttgacttttcaaatgcttctgcagactggctgtgctaggatttgagcctgggcccaagtctgtgaagggttaatagagctgaatctgcagcctcattctgagagcctccccaagctcccctaggaggtagtcatcctcattgctctcttccagtttcttaagctccttcttcttgtagagagggatgctagtgatttccagtgtgtatgtgccgggcatgagcttcttcttggccgtgtgcaagtagctgagcccattcctttggtggatgcggaagacgctgtcatcgttcccttgagagatgacataacggatgtggttgttgaggggctggatggcgggccttagttccaggatgtgctccttagagccgaggtgggagaggttgaacttcatgttgacggggctgtccatgtcgacactctctaggctgatctgttcaacctggaggaagaacaggaaatgatttgggacaagcttctacagcacaagcagaggactagaaagagatcagctgcaggggctttggtcacgaggacaggctgtggcttcccactcccgctttctgcactctccttaccagcagtggctgtgaaagaggcccaa

SEQ ID NO: 184365 - DNA, 2298 bp, Homo Sapiens
ttgggatgaagatcccaacatttgtctttttggttcctgtactaatactccagggggcttccagtgcctctgcccccctggctttgtactatctgataatggacggagatgctttgatactcgccagagcttctgcttcacaaattttgaaaatggaaagtgttctgtacccaaagctttcaacaccacaaaagcaaaatgctgctgtagtaagatgccaggagagggctggggggacccctgtgagctgtgccccaaagacgatgaagttgcatttcaggatttgtgtccatatggccatggaactgtccctagtcttcatgatacacgtgaagatgtcaatgagtgtcttgagagcccaggcatttgttcaaatggtcaatgtatcaacaccgacggatcttttcgctgtgaatgtccaatgggctacaaccttgactacactggagtacgctgtgtggatactgatgagtgttcaatcggcaatccgtgtggaaatggtacatgcaccaatgttattgggagttttgaatgcaattgcaatgaaggctttgagccagggcccatgatgaattgtgaagatatcaacgaatgtgcccagaacccactgctgtgtgctttccgctgcatgaacacttttgggtcctatgaatgcacgtgcccgattggctatgccctcagggaagatcaaaagatgtgcaaagatctggatgaatgtgctgaagggttacacgactgtgaatctaggggcatgatgtgtaagaatctaatcggcaccttcatgtgcatctgccctcctggaatggcccgaaggcccgatggagaaggctgtgtagatgaaaatgaatgcaggaccaagccaggaatctgtgaaaatggacgttgtgttaacattattggaagctatagatgtgagtgtaatgaaggattccagtcaagttcttcaggcactgaatgccttgacaatcgacagggtctctgctttgcagaggtactgcagacaatatgtcaaatggcatccagcagtcgcaatctcgtcactaagtcagaatgctgctgtgatggtgggcgaggctggggccaccagtgcgagctttgcccacttcctggaactgcccagtacaaaaagatatgtcctcatggcccaggatatacaactgatggaagagatattgatgaatgtaaggtaatgccaaacctctgcaccaatggtcagtgcatcaataccatgggctcattccgatgcttctgcaaggttggctacaccacagacatcagtggaacctcttgtatagaccttgatgaatgctcccagtccccgaaaccatgcaactacatctgcaagaacactgaggggagttatcagtgttcatgtccgagggggtatgtcctgcaagaggatggaaagacatgcaaagaccttgatgaatgtcaaacaaagcagcataactgccagttcctctgtgtcaacaccctgggggggtttacctgtaaatgtccacctggtttcacacagcatcacactgcttgtatcgacaacaacgaatgtgggtctcaaccttcgctttgtggagcaaagggaatctgtcaaaacactccaggcagtttcagctgtgaatgccaaagagggttctctcttgatgccaccggactgaactgtgaagatgttgatgaatgtgatgggaaccacaggtgccaacacggctgccagaacatcctgggtggctacagatgtggctgcccccaaggctacatccagcactaccagtggaatcagtgtgtcgatgagaatgaatgctccaatcccaatgcctgtggctctgcttcctgctacaacaccctggggagttacaagtgcgcctgcccctcggggttctccttcgaccagttctccagtgcctgccacgacgtgaatgagtgctcgtcctccaagaacccctgcaattacggctgctctaacacggaggggggctacctctgtggctgcccccctgggtattacagagtgggacaaggccactgtgtctcaggaatgggatttaacaaggggcagtacctgtcactggatacagaggtcgatgagaaaatgctctgtccccagaagcatgctacgagtgcaaaatcaacggctattctaagaaagacagcaggcagaagagaaagtattcatgaacctgatcccactgctgttgaacagatcagcctagagagtgtcgacatggacagccccgtcaacatgaagttcaacctctcccacctcggctctaaggagcacatcctggaactaaggcccgccat

SEQ ID NO: 184366 - DNA, 1392 bp, Homo Sapiens
  misc_feature (120)..(128): n is a, c, g, or t
  misc_feature (889)..(897): n is a, c, g, or t
ttggatttgcgcattgatgtagtcagtgagaatcctggacagacacacttccatactattcagaagagtagctgggatgctttcatcagacattcacccaaagtgaacttagtgatgtannnnnnnnnatatgaagaagaatttgaccccttctttcgctatgaaatacctgccacccatctgtactttgggagatcagtaagcaaagatgtgcttggccgtgtgggaatgacatgccctagactggttgaactagtagtgtgtgcaaatggattacggccacttgatgaagagttaattcgcattgcagaacgttgcaaaaatttgtcagctattggactaggggaatgtgaagtctcatgtagtgcctttgttgagtttgtgaagatgtgtggtggccgcctatctcaattatccattatggaagaagtactaattcctgaccaaaagtatagtttggagcagattcactgggaagtgtccaagcatcttggtagggtgtggtttcccgacatgatgcccacttggtaaaaactgcatgatgaatagcaccttaatttcaagcaaatgtattataattaaagttttatttgctgtagttctgatataattctactattttgtggcacagaaatttgatatcttcagtcagtatatgtaaagattgtttatcggaagacccatgaatgagttttggtcagaaaattccacttgtttccttagtgtaatagcagtcatatctccgaattttttttaatgtggttcggatgtgaaataaccagttatacgtattaaacagtttacagtctaaaggaaacaaaacctatatgttataatatccaagaagtactaataggttttctgaaatgttatattctctatgcatttnnnnnnnnntgtaaacttgacattttagggtcttcagttacacatacacctgttataaggtgtttaatatagctcaggaaagtgagcattttgtgagaaaaatgaatatatcatatctaatggaaaagattggatgaatgttctcaaatgttacaaagctgtttaaagaaaaaggtatatataagtaatcagaacacttagaagactgatagatgtcacacagtggtattatagaaggataatacagagccaagatcaaattaaaagacaataaatggaacagaagggaggcagtgtttagctttgtataaacttttaggcttgctctgtaatctgctaaaccatatacattcttttgtgatatgttattatgtatgtggcacttgaagcactgtatgtaaagtaaggaatgctttactaagttctcctgggttttatctttgtttaaactagctttaaagtattaaccataattgaaattgaaaagcttacctattttaaaaa

SEQ ID NO: 184367 - DNA, 1320 bp, Homo Sapiens
  misc_feature (188)..(249): n is a, c, g, or t
  misc_feature (1212)..(1221): n is a, c, g, or t
ttggctcgctgtttgtggcccaggtgcaggaagcttacgcggtggcagccgctcgctgaggtagtctctcgcggcgccggggatccctgaacacagacagcgcgggactgagaaggaaagcttctttctgggcagccagagccgcaaaggtggagccgcgttggcgccctccgcgggaccagcgcctnnnnnnnnnnnnnnnnnnnnnnnnnnnnnnnnnnnnnnnnnnnnnnnnnnnnnnnnnnnnnncctcatgtgagagccgcgggacctgcagccgccgccgtccccggagcacggggtggtgtgtgggggaagccgcccccggcagcaggatgaaacgaggaggaagagatagtgaccgtaattcatcagaagaaggaactgcagagaaatccaagaaactgaggactacaaatgagcattctcagacttgtgattggggtaatctccttcaggacattattctccaagtatttaaatatttgcctcttcttgaccgggctcatgcttcacaagtttgccgcaactggaaccaggtatttcacatgcctgacttgtggagatgttttgaatttgaactgaatcagccagctacatcttatttgaaagctacccatccagagctgatcaaacagattattaaaagacattcaaaccatctacaatatgtcagcttcaaggtggacagcagcaaggaatcagctgaagcagcttgtgatatactatcgcaacttgtgaattgctctttaaaaacacttggacttatttcaactgctcgaccaagctttatggatttaccaaagtctcactttatctctgcactgacagttgtgttcgtaaactccaaatccctgtcttcgcttaagatagatgatactccagtagatgatccatctctcaaagtactagtggccaacaatagtgatacactcaagctgttgaaaatgagcagctgtcctcatgtctctccagcaggtatcctttgtgtggctgatcagtgtcacggcttaagagaactagccctgaactaccacttattgagtgatgagttgttacttgcattgtcttctgaaaaacatgttcgattagaacatttgcgcattgatgtagtcagtgagaatcctggacagacacacttccatactattcagaagagtagctgggatgctttcatcagacattcacccaaaagtgaacttagtgatgtannnnnnnnnnatatgaagaagaatttgaccccttctttcgctatgaaatacctgccacccatctgtacttctggagatcagtaagcaagatgtgcttggccgtgtggga

SEQ ID NO: 184368 - DNA, 1491 bp, Homo Sapiens
ctttaaaaaagccaactttgtacaaaaaagttggggtgtttaatatagctcaggaaagtgagcattttgtgagaaaaatgaatatatcatatctaatggaaaagattggatgaatgttctcaaatgttacaaagctgtttaaagaaaaaggtatatataagtaatcagaacacttagaagactgatagatgtcacacagtggtattatagaaggataatacagagccaagatcaaattaaaagacaataaatggaacagaagggaggcagtgtttagctttgtataaacttttaggtttgctctgtaatctgctaaaccatatacattcttttgtgatatgttattatgtatgtggcacttgaggcactgtatgtaaagtaaggaatgctttactagttctccttggttttatctttgtttaaactagctttaaagtattaaacaataattgaaatgaaaagcttacctattttaaaaagccaaatttaaataaatatagaactttaaaatgtttatcagttgtttccatgaaagaatattagtttccagtaaattttagtgatggctcactcacttttctattttggaattacatagttatgtaagtaaaatttttaaaaatcataaagggagcaccattgtacagtctagcataaacagcaaattttaaagaggacatatttaagttcataatcatatttttcagtaaatattgctcagtgaactggaaaactttaatagaaaaatgtctgcagttttgtgattgttaatttggttaaaccgatattttatattatttaagttaggtaacattttatattactttcatatgaataaaagtaatccatgcattgtagagtctataaaatgttgagtttttttagatgatataaactttgattctgggcactagtgctagtagatattactaccctcctgagggaaatcagaaatgatttaaccccagtggaatacattaattcttaaagcggctcttttcagtagtgtgacttttagaaagtgtctcagtagttaaggaagctaacagtcttagatctacttttaaaacggatggccttcttaagaataaagcaaaaggtgattttctacataatttttgctttccaaaagtgatgatatgctctcctacagcaacatatgagaagaaaaaaggcttatctagattcgaaaattaacagcaattatagtaatatatcccctccttctaaatagtaaaaagctctgattgtacaagaattacctgtgctagtcaagttgttgtttttccttgaacaactttggaaaaatggatttgacagtacataatcagttctactaaccaaagcttgtatttggaaatttactttttgtacaaattgaattatataatgcttaaaatactttgtcactttataagcaaaatgcatatacttaatttgtttatactgtaaagtatatgttaaatgcttttatcaccttgagaataaaaa

SEQ ID NO: 184369 - DNA, 1465 bp, Homo Sapiens
  misc_feature (1262)..(1270): n is a, c, g, or t
acaaattgatgagcaatgcttttccttattaatgccaactttgtacaaaaaagttggcgctgtttgtggcccaggtgcaggaagcttacgcggtggcagccgctcgctgaggtagtctctcgcggcgccggggatccctgaacacagacagcgcgggactgagaaggaaagcttctttctgggcagccagagccgcaaaggtggagccgcgttggcgccctccgcgggaccagcgcctcggatgcgggcggagcgcggggggccgcggctgcgggagcgcgaagcggggggccaggggcgcctcatgtgagagccgcgggacctgcagccgccgccgtccccggagcacggggtggtgtgtgggggaagccgcccccggcagcaggatgaaacgaggaggaagagatagtgaccgtaattcatcagaagaaggaactgcagagaaatccaagaaactgaggactacaaatgagcattctcagacttgtgattggggtaatctccttcaggacattattctccaagtatttaaatatttgcctcttcttgaccgggctcatgcttcacaagtttgccgcaactggaaccaggtatttcacatgcctgacttgtggagatgttttgaatttgaactgaatcagccagctacatcttatttgaaagctacccatccagagctgatcaaacagattattaaaagacattcaaaccatctacaatatgtcagcttcaaggtggacagcagcaaggaatcagctgaagcagcttgtgatatactatcgcaacttgtgaattgctctttaaaaacacttggacttatttcaactgctcgaccaagctttatggatttaccaaagtctcactttatctctgcactgacagttgtgttcgtaaactccaaatccctgtcttcgcttaagatagatgatactccagtagatgatccatctctcaaagtactagtggccaacaatagtgatacactcaagctgttgaaaatgagcagctgtcctcatgtctctccagcaggtatcctttgtgtggctgatcagtgtcacggcttaagagaactagccctgaactaccacttattgagtgatgagttgttacttgcattgtcttctgaaaaacatgttcgattagaacatttgcgcattgatgtagtcagtgagaatcctggacagacacacttccatactattcagaagagtagctgggatgctttcatcagacattcacccaaagtgaacttagtgatgtannnnnnnnnatatgaagaagaatttgaccccttctttcgctatgaaatacctgccacccatctgtactttgggagatcagtaagcaaagatgtgcttggccgtgtgggaatgacatgccctagactggttgaactagtagtgtgtgcaaatggattacggccacttgatgaagagttaattcggcattgcagaacgttgcaaaa

SEQ ID NO: 184370 - DNA, 1072 bp, Homo Sapiens
  misc_feature (937)..(970): n is a, c, g, or t
ttgggctacatagctccttatagctgcattttgagatatgcagtgtctgctgctctttggctagccattggaattatacaggtcgtgttctttgctgtcttttatgagagatttatagaagataaaattcgacagttcgttgatttatgctctatgagtaatatatcagtgtttctgttatcccacaaatgttttggatattacattcatggtagatcagtacatgggcatgcagatactaatatggaagaaatgaatatgaaccttaaaagagaagcggaaaatttgtgtagccagagaggtttggtacccaacacagatggtcagacttttgagattgcaatttctaaccagatgagacaacattatgacagaattcatgagacactaataaggaaaaatggtcctgctagactactgagttcatcagcaagtacttttgagcagagtataaaagcatatcatatgatgaataaatttctggctccttcattgaccatgttcataaggaaatggattactttataaaagataagttgcttcttgaaagaattcttggaatggaattcatggaaccaatggaaaaaagcatcttttacaatgatgaaggttattctttcagcagtgtcctgtattatggaaatgaagctactcttcttatttttgatctgctgttcttctgtgttgtggatttggcttgccaaaattttattttagcatccttccttacatatctacaacaagagatttttagatatatccgtaatacagtaggacaaaagaatttggcatccaaaacattggtggatcaaagatttttgatttaacttcctgaataaataacttaaagactcagtataatcatggccaaaaaaaagtcatgatatcaggttagtttgccatatttttttaaaacttataatgcagactattctgnnnnnnnnnnnnnnnnnnnnnnnnnnnnnnnnnnataacttgggaatatataacctgatataatagaaaatactgttttcccattgtgtgtagtatttaatgcagtaaataataaattaatactgacagtgaggcc

SEQ ID NO: 184371 - DNA, 2357 bp, Homo Sapiens
ttgggaaagcaaaaaaattagtagaaatggaaagagaacatgaaaaatcacttagtgaaattagacagttaaagagagaacttgagaatgttaaggccaagcttgctcagcacgtcaaaccagaggaacatgaacaggttaagagcagattagaacagaaatcaggagaacttgggaagaagatcactgagttaacattgaaaaatcagacactacaaaaggaaattgaaaaagtttatttggataataagctcctcaaggagcaagcacataacttaacaattgaaatgaaaaatcattatgttcctttaaaagtaagtgaagacatgaaaaagtcacatgatgcaattattgatgatcttaatagaaagcttttagatgtaacacaaaaatatacagaaaagaagttggaaatggagaaattgctactggaaaatgacagcttaagtaaggatgtaagccgcctagaaactgtgtttgtacctcctgagaaacatgaaaaagagataatagctctgaaatccaatattgttgaacttaagaaacagctgtctgaacttaagaaaaaatgtggtgaagaccaggagaaaatacacgctctcacatctgaaaacactaacttgaagaagatgatgagtaatcagtatgtgccagttaaaacccatgaagaggttaaaatgacactgaatgacacgttagccaaaactaacagagaattattagatgtgaagaaaaaatttgaagatataaatcaggaatttgtaaaaataaaagataagaatgaaatattaaaaagaaacctggaaaacactcagaaccaaataaaagctgagtacatcagcctggcagagcacgaggcaaagatgagctcgctaagtcagagcatgagaaaggtgcaggatagtaatgctgaaatcttggccaactacagaaaaggccaagaagagattgtgacactgcatgccgaaattaaagcccagaagaaggagctcgacacaatacaagaatgcattaaggtaaaatacgccccaattgtcagctttgaggagtgcgagagaaaatttaaagcaacagagaaagaactaaaagaccagttatcagagcagacacaaaagtatagtgtcagtgaagaagaagtcaagaaaaacaagcaagagaatgacaagttaaagaaggagatttttacccttcagaaagatttgagagataagacagttctcattgagaagtctcatgaaatggaaagagcattaagcagaaaaacagacgagctaaacaaacagttaaaagacttgtcacagaaatacacggaagtaaagaatgtgaaagagaagctagtagaagaaaatgccaaacagacttctgagatacttgcagtgcaaaatcttttgcaaaaacaacatgttccattggaacaggttgaggctctgaaaaaatctcttaatggcacaattgaaaatctaaaggaagaactgaagagtatgcaaaggtgttacgagaaagagcagcagacagtgaccaaactgcatcaattgttggagaatcaaaagaactcttctgtacccctggcagagcatttgcagattaaagaagcatttgagaaagaagttggaatcataaaagccagcttgagagaaaaggaagaagaaagccaaaacaaaatggaagaagtctccaaacttcagtcggaggttcagaatactaaacaagcattaaaaaaattagagactagagaggtagttgacttgtctaaatataaagcaacaaaaagtgatttggagacacagatttctagcttaaatgaaaaattggccaatctgaatagaaagtatgaggaagtatgtgaggaagttttgcatgccaaaaagaaggaaatatctgcaaaagatgagaaggaattactgcatttcagcattgagcaagaaattaaggatcagaaggaacgatgtgataagtccttaacaacaatcacagagttacaaagaagaatacaagaatctgctaaacaaatagaagcaaaagataataagataactgaactgcttaatgatgtggaaagattaaaacaggcactcaatggcctttcccaactcacctacacaagtgggaaccccaccaagaggcagagccagctgattgacactctgcagcaccaagtgaaatctctggagcaacagctggccgatgctgacagacagcaccaagaagtaattgcaatttatcgggacacaccttcttagtgctgcacagggtcacatggatgaagatgttcaggaggctctgctccagatcatacaaaatgcggcaagggcttgtgtgctagccggttagcactgactgccagtatctgttttatc

SEQ ID NO: 184372 - DNA, 1069 bp, Homo Sapiens
  misc_feature (176)..(202): n is a, c, g, or t
  misc_feature (651)..(674): n is a, c, g, or t
ttggtgcaggggaaaagagctaggaaagagctgcaaagcagtgtgggctttttcccttttttgctccttttcattacccctcctccgttttcacccttctccggacttcgcgtagaacctgcgaatttcgaagaggaggtggcaaagtgggagaaaagaggtgttagggtttgggnnnnnnnnnnnnnnnnnnnnnnnnnnnaatttcttgatttcaacattttctcccaccctctcggctgcagccaacgcctcttacctgttctgcggcgccgcgcaccgctggcagctgagggttagaaagcggggtgtattttagattttaagcaaaaattttaaagataaatccatttttctctcccacccccaacgccatctccactgcatccgatctcattatttcggtggttgcttgggggtgaacaattttgtggctttttttcccctataattctgacccgctcaggcttgagggtttctccggcctccgctcactgcgtgcacctggcgctgccctgcttcccccaacctgttgcaaggctttaattcttgcaactgggacctgctcgcaggcaccccagccctccacctctctctacatttttgcaagtgtctgggggagggcacctgctctacctgccagaaattttnnnnnnnnnnnnnnnnnnnnnnnntctccgggggccctcttggcccctttatccctgcactctcgctctcctgccccaccccgaggtaaagggggcgactaagagaagatggtgttgctcaccgcggtcctcctgctgctggccgcctatgcggggccggcccagagcctgggctccttcgtgcactgcgagccctgcgacgagaaagccctctccatgtgcccccccagccccctgggctgcgagctggtcaaggagccgggctgcggctgctgcatgacctgcgccctggccgaggggcagtcgtgcggcgtctacaccgagcgctgcgcccaggggctgcgctgcctcccccggcaggacgaggagaagccgctgcacgccctgctgcacggccgcggggtttgcctcaacgaaaa

SEQ ID NO: 184373 - DNA, 1675 bp, Homo Sapiens
  misc_feature (163)..(204): n is a, c, g, or t
  misc_feature (370)..(378): n is a, c, g, or t
  misc_feature (416)..(461): n is a, c, g, or t
  misc_feature (1084)..(1093): n is a, c, g, or t
  misc_feature (1151)..(1187): n is a, c, g, or t
ttggggattctacaagagaaagcagtgcaaaccttcccgtggccgcaagcgtggcatctgctggtgcgtggacaagtacgggatgaagctgccaggcatggagtacgttgacggggactttcagtgccacaccttcgacagcagcaacgttgagtgatgcgtnnnnnnnnnnnnnnnnnnnnnnnnnnnnnnnnnnnnnnnnnngactccagccagcgcctccctccaccccaggacgccactcatttcatctcatttaagggaaaaatatatatctatctatttgaggaaactgaggacctcggaatctctagcaagggctcaacttcgaaaatggcaacaacagagatgcaaaaagctaaaaagacannnnnnnnntttaaatggttttctttttgaggcaagttggatgaacnnnnnnnnnnnnnnnnnnnnnnnnnnnnnnnnnnnnnnnnnnnnnntgtttgtgtagaagagagagaaagacgaatagagttaggaaaaggaagacaagcaggtgggcaggaaggacatgcaccgagaccaggcaggggcccaactttcacgtccagccctggcctggggtcgggagaggtgggcgctagaagatgcagcccaggatgtggcaatcaatgacactattggggtttcccaggatggattggtcagggggagaaaggaaaaggcaaaacactccaggacctctcccggatctgtctcctcctctagccagcagtatggacagctggacccctgaacttcctctcctcttacctgggcagagtgttgtctctccccaaatttataaaaactaaaatgcattccattcctctgaaagcaaaacaaattcataattgagtgatattaaatagagaggttttcggaagcagatctgtgaatatgaaatacatgtgcatatttcattccccaggcagacattttttagaaatcaatacatgccccaatattggaaagacttgttcttccacggtgactacagtacatgctgaagcgtgccgtttcagccctcatttaattcaatttgtaagtagcgcagcagcctctgtgggggaggataggctgnnnnnnnnnngtgggctcgtatttatctacaggactccatatagtcatatataggcatataaatctannnnnnnnnnnnnnnnnnnnnnnnnnnnnnnnnnnnnaaaggtttgcattaacttttcaaagtagttcctataggggcattgaggagcttcctcattctgggaaaactgagaaaacccatattctcctaatacaacccgtaatagcatttttgcctgcctcgaggcagagtttcccgtgagcaataaactcagcttttttgtggggcacagtactggatttgacagtgattccccacgtgtgttcatctgcacccaccgagccaggcagaggccagccctccgtggtgcacacagcacgcgcctcagtccatcccattttagtctttaaaccctcaggaagtcacagtctccggacaccacaccacatgagcccaacaggtccacgatggatccaccagtcccaccccagccttttcctttcatctgaacagaatgtgcatttttggaagcctccctcactctccatgctggcagagcacgagggagactgaagtaagagatggcagagggagatggtggcaaaa

SEQ ID NO: 184374 - DNA, 2405 bp, Homo Sapiens
  misc_feature (58)..(94): n is a, c, g, or t
gtgggctcgtatttatctacaggactccatatagtcatatataggcatataaatctannnnnnnnnnnnnnnnnnnnnnnnnnnnnnnnnnnnnaaaggtttgcattaacttttcaaagtagttcctataggggcattgaggagcttcctcattctgggaaaactgagaaaacccatattctcctaatacaacccgtaatagcatttttgcctgcctcgaggcagagtttcccgtgagcaataaactcagcttttttgtggggcacagtactggatttgacagtgattccccacgtgtgttcatctgcacccaccgagccaggcagaggccagccctccgtggtgcacacagcacgcgcctcagtccatcccattttagtctttaaaccctcaggaagtcacagtctccggacaccacaccacatgagcccaacaggtccacgatggatccaccagtcccaccccagccttttcctttcatctgaacagaatgtgcatttttggaagcctccctcactctccatgctggcagagcaggagggagactgaagtaagagatggcagagggagatggtggcaaaaaggtttagatgcaggagaacagtaagatggatggttccggccagagtcgatgtggggaggaacagagggctgaagggagagggggctgactgttccattctagctttggcacaaagcagcagaaagggggaaaagccaatagaaatttccttagcttccccaccatatgtattttctaggatttgagaggaaagagaggaaaatgggggaatgggttgcaaaatagaaatgagcttaatccaggccgcagagccagggaaggtgagtaactttaggagggtgctagactttagaagccagataggaagaatcagtctaaactggccatgctttggaagggacaagactatgtgctccgctgcccaccttcagcctgcaatgagggactgaggcccacgagtctttccagctcttcctccattctggccagtccctgcatcctccctggggtggaggatggaaggaaagctgggacaagcagggaacgcatgattcagggatgctgtcactcggcagccagattccgaaactcccattctccaatgacttcctcaaccaatgggtggccttgtgactgttctttaaggctgaagatatccaggaaagggggcttggacactggccaaggagaccccttcgtgctgtggacacagctctcttcactctttgctcatggcatgacacagcggagaccgcctccaacaacgaatttggggctacgaagaggaatagcgaaaaagcaaatctgtttcaactgatgggaaccctatagctatagaacttgggggctatctcctatgcccctggacaggacagttggctggggacaggagaagtgctcaatcttcatgagacaaaggggcccgatagggccagcagccacaaggccttgacctgccgagtcagcatgccccatctctctgcacagctgtcccctaaacccaactcacgtttctgtatgtcttaggccagtatcccaaacctcttccacgtcactgttctttccacccattctccctttgcatcttgagcagttatccaactaggatctgccaagtggatactggggtgccactcccctgagaaaagactgagccaggaactacaagctccccccacattcctcccagcctggacctaattcttgagaggggctctctcttcacggactgtgtctggactttgagcaggcttctgccccttgcgttggctctttgctgccagccatcaggtgggggattagagcctggtgtaagtgcgccagactcttccggtttccaaagttcgtgcctgcgaacccaaacctgtgagtctcttctgcatgcaggagtttctcctgggcagctggtcactccccagagaagctgggccttcatggacacatggaactaagcctcccaaatgggagttctggctgagcccagggtggggagatcctgggaagggaggcactggaggaagacggcacctcttcccccatggcagggtgtgagggaggcaggtttggaatggtgcgagtatggcaatctaagcaggggtctggtctctttgactccaggctggcctttggccgactgtctgctcacccagagaccttggactccggactatccatggctccgaatctaagtgctgcccactcccatgctcacacccacagaaggtcttcccatcccctttagattcgtgcctcactccaccagtgaggaagatgcctctgtctttcccacgactgccaggagatagggaagcccagccaggactgaccctccttcctccagcctgccctgacccacctggcaaagcaggcacatggggaggaa

SEQ ID NO: 184375 - DNA, 1307 bp, Homo Sapiens
  misc_feature (97)..(105): n is a, c, g, or t
  misc_feature (143)..(213): n is a, c, g, or t
  misc_feature (811)..(820): n is a, c, g, or t
  misc_feature (878)..(914): n is a, c, g, or t
ttggatctatttgaggaaactgaggacctcggaatctctagcaagggctcaacttcgaaaatggcaacaacagagatgcaaaaagctaaaaagacannnnnnnnntttaaatggttttctttttgaggcaagttggatgaacnnnnnnnnnnnnnnnnnnnnnnnnnnnnnnnnnnnnnnnnnnnnnnnnnnnnnnnnnnnnnnnnnnnnnnncgaatagagttaggaaaaggaagacaagcaggtgggcaggaaggacatgcaccgagaccaggcaggggcccaactttcacgtccagccctggcctggggtcgggagaggtgggcgctagaagatgcagcccaggatgtggcaatcaatgacactattggggtttcccaggatggattggtcagggggagaaaggaaaaggcaaaacactccaggacctctcccggatctgtctcctcctctagccagcagtatggacagctggacccctgaacttcctctcctcttacctgggcagagtgttgtctctccccaaatttataaaaactaaaatgcattccattcctctgaaagcaaaacaaattcataattgagtgatattaaatagagaggttttcggaagcagatctgtgaatatgaaatacatgtgcatatttcattccccaggcagacattttttagaaatcaatacatgccccaatattggaaagacttgttcttccacggtgactacagtacatgctgaagcgtgccgtttcagccctcatttaattcaatttgtaagtagcgcagcagcctctgtgggggaggataggctgnnnnnnnnnngtgggctcgtatttatctacaggactccatatagtcatatataggcatataaatctannnnnnnnnnnnnnnnnnnnnnnnnnnnnnnnnnnnnaaaggtttgcattaacttttcaaagtagttcctataggggcattgaggagcttcctcattctgggaaaactgagaaaacccatattctcctaatacaacccgtaatagcatttttgcctgcctcgaggcagagtttcccgtgagcaataaactcagcttttttgtggggcacagtactggatttgacagtgattccccacgtgtgttcatctgcacccaccgagccaggcagaggccagccctccgtggtgcacacagcacgcgcctcagtccatcccattttagtctttaaaccctcaggaagtcacagtctccgggacaccacaccacatgagcccaacacgtccacgatggatccaccagtcccaccccagccttttcctttcatctgaa

SEQ ID NO: 184376 - DNA, 1080 bp, Homo Sapiens
  misc_feature (49)..(57): n is a, c, g, or t
  misc_feature (95)..(140): n is a, c, g, or t
  misc_feature (763)..(772): n is a, c, g, or t
  misc_feature (830)..(866): n is a, c, g, or t
ttggcttcgaaaatggcaacaacagagatgcaaaaagctaaaaagacannnnnnnnntttaaatggttttctttttgaggcaagttggatgaacnnnnnnnnnnnnnnnnnnnnnnnnnnnnnnnnnnnnnnnnnnnnnntgtttgtgtagaagagagagaaagacgaatagagttaggaaaaggaagacaagcaggtgggcaggaaggacatgcaccgagaccaggcaggggcccaactttcacgtccagccctggcctggggtcgggagaggtgggcgctagaagatgcagcccaggatgtggcaatcaatgacactattggggtttcccaggatggattggtcagggggagaaaggaaaaggcaaaacactccaggacctctcccggatctgtctcctcctctagccagcagtatggacagctggacccctgaacttcctctcctcttacctgggcagagtgttgtctctccccaaatttataaaaactaaaatgcattccattcctctgaaagcaaaacaaattcataattgagtgatattaaatagagaggttttcggaagcagatctgtgaatatgaaatacatgtgcatatttcattccccaggcagacattttttagaaatcaatacatgccccaatattggaaagacttgttcttccacggtgactacagtacatgctgaagcgtgccgtttcagccctcatttaattcaatttgtaagtagcgcagcagcctctgtgggggaggataggctgnnnnnnnnnngtgggctcgtatttatctacaggactccatatagtcatatataggcatataaatctannnnnnnnnnnnnnnnnnnnnnnnnnnnnnnnnnnnnaaaggtttgcattaacttttcaaagtagttcctataggggcattgaggagcttcctcattctgggaaaactgagaaaacccatattctcctaatacaacccgtaatagcatttttgcctgcctcgaggcagagtttcccgtgagcaataaactcagcttttttgtggggcacagtactggatttgacagtgattccccacgtgtgttcatctgc

SEQ ID NO: 184377 - DNA, 1201 bp, Homo Sapiens
  misc_feature (97)..(105): n is a, c, g, or t
  misc_feature (152)..(213): n is a, c, g, or t
  misc_feature (811)..(823): n is a, c, g, or t
  misc_feature (881)..(917): n is a, c, g, or t
ttggatctatttgaggaaactgaggacctcggaatctctagcaagggctcaacttcgaaaatggcaacaacagagatgcaaaaagctaaaaagacannnnnnnnntttaaatggttttctttttgaggcaagttggatgaacagagaagggnnnnnnnnnnnnnnnnnnnnnnnnnnnnnnnnnnnnnnnnnnnnnnnnnnnnnnnnnnnnnncgaatagagttaggaaaaggaagacaagcaggtgggcaggaaggacatgcaccgagaccaggcaggggcccaactttcacgtccagccctggcctggggtcgggagaggtgggcgctagaagatgcagcccaggatgtggcaatcaatgacactattggggtttcccaggatggattggtcagggggagaaaggaaaaggcaaaacactccaggacctctcccggatctgtctcctcctctagccagcagtatggacagctggacccctgaacttcctctcctcttacctgggcagagtgttgtctctccccaaatttataaaaactaaaatgcattccattcctctgaaagcaaaacaaattcataattgagtgatattaaatagagaggttttcggaagcagatctgtgaatatgaaatacatgtgcatatttcattccccaggcagacattttttagaaatcaatacatgccccaatattggaaagacttgttcttccacggtgactacagtacatgctgaagcgtgccgtttcagccctcatttaattcaatttgtaagtagcgcagcagcctctgtgggggaggataggctgnnnnnnnnnnnnngtgggctcgtatttatctacaggactccatatagtcatatataggcatataaatctannnnnnnnnnnnnnnnnnnnnnnnnnnnnnnnnnnnnaaaggtttgcattaacttttcaaagtagttcctataggggcattgaggagcttcctcattctgggaaaactgagaaaacccatattctcctaatacaacccgtaatagcatttttgcctgcctcgaggcagagtttcccgtgagcaataaactcagcttttttgtggggcacagtactggatttgacagtgattccccacgtgtgttcatctgcacccaccgagccaggcagaggccagctctccgtggtgcacacagcacgcgcctcagtccatcccatttta

SEQ ID NO: 184378 - DNA, 1792 bp, Homo Sapiens
  misc_feature (330)..(353): n is a, c, g, or t
  misc_feature (1262)..(1333): n is a, c, g, or t
  misc_feature (1469)..(1477): n is a, c, g, or t
  misc_feature (1515)..(1585): n is a, c, g, or t
agttggcaaaaattttaaagataaatccatttttctctcccacccccaacgccatctccactgcatccgatctcattatttcggtggttgcttgggggtgaacaattttgtggctttttttcccctataattctgacccgctcaggcttgagggtttctccggcctccgctcactgcgtgcacctggcgctgccctgcttcccccaacctgttgcaaggctttaattcttgcaactgggacctgctcgcaggcaccccagccctccacctctctctacatttttgcaagtgtctgggggagggcacctgctctacctgccagaaattttnnnnnnnnnnnnnnnnnnnnnnnntctccgggggccctcttggcccctttatccctgcactctcgctctcctgccccaccccgaggtaaagggggcgactaagagaagatggtgttgctcaccgcggtcctcctgctgctggccgcctatgcggggccggcccagagcctgggctccttcgtgcactgcgagccctgcgacgagaaagccctctccatgtgcccccccagccccctgggctgcgagctggtcaaggagccgggctgcggctgctgcatgacctgcgccctggccgaggggcagtcgtgcggcgtctacaccgagcgctgcgcccaggggctgcgctgcctcccccggcaggacgaggagaagccgctgcacgccctgctgcacggccgcggggtttgcctcaacgaaaagagctaccgcgagcaagtcaagatcgagagagactcccgtgagcacgaggagcccaccacctctgagatggccgaggagacctactcccccaagatcttccggcccaaacacacccgcatctccgagctgaaggctgaagcagtgaagaaggaccgcagaaagaagctgacccagtccaagtttgtcgggggagccgagaacactgcccacccccggatcatctctgcacctgagatgagacaggagtctgagcagggcccctgccgcagacacatggaggcttccctgcaggagctcaaagccagcccacgcatggtgccccgtgctgtgtacctgcccaattgtgaccgcaaaggattctacaagagaaagcagtgcaaaccttcccgtggccgcaagcgtggcatctgctggtgcgtggacaagtacgggatgaagctgccaggcatggagtacgttgacggggactttcagtgccacaccttcgacagcagcaacgttgagtgatgcgtnnnnnnnnnnnnnnnnnnnnnnnnnnnnnnnnnnnnnnnnnnnnnnnnnnnnnnnnnnnnnnnnnnnnnnnngacgccactcatttcatctcatttaagggaaaaatatatatctatctatttgaggaaactgaggacctcggaatctctagcaagggctcaacttcgaaaatggcaacaacagagatgcaaaaagctaaaaagacannnnnnnnntttaaatggttttctttttgaggcaagttggatgaacnnnnnnnnnnnnnnnnnnnnnnnnnnnnnnnnnnnnnnnnnnnnnnnnnnnnnnnnnnnnnnnnnnnnnnncgaatagagttaggaaaaggaagacaagcaggtgggcaggaaggacatgcaccgagaccaggcagggggctcaactttcacgtccagctctggcctggggtcgggagaggtgggcgctagaagatgcagcctcaggatgtggcaatcaatgacactattggggtttcccaggatggattggtcacggggagaaaggaaaaggcaaaa

SEQ ID NO: 184379 - DNA, 869 bp, Homo Sapiens
  misc_feature (717)..(764): n is a, c, g, or t
actttgtacaaaaaagttggacctctgtggcctccatggtacccccacagggctggcctcccctagagggtgggcctcaaccacctgctcccgccacgcaccggttagtgagacagggctgccacggcaaccgccaagcccccctcaaggtgggacagtaccccggacccatccactcactcctgagagggctccggcccagaatgggaacctcagagaagagctctaaggagaagaaaccccatagcgtcagagaggatatgtctggcttccaagagaaaggaggctccgttttgcaaagtggaggagggacgagggacaggggtttcaccagccagcaacctgggccttgtactgtctgtgtttttaaaaccactaaagtgcaagaattacattgcactgtttctccactttttattttctcttaggcttttgtttctatttcaaacatactttcttggttttctaatggagtatatagtttagtcatttcacagactctggcctcctctcctgaaatccttttggatggggaaagggaaggtggggagggtccgaggggaaggggaccccagcttccctgtgcccgctcaccccactccaccagtccccggtcgccagccggagtctcctctctaccgccactgtcacaccgtagcccacatggatagcacagttgtcagacaagattccttcagattccgagttgcctaccgnnnnnnnnnnnnnnnnnnnnnnnnnnnnnnnnnnnnnnnnnnnnnnnngaagacagcaataaccacagtacatattactgtagttctctatagttttacatacattcataccataactctgttctctcctcttttttgtttttcacctttaaa

SEQ ID NO: 184380 - DNA, 1086 bp, Homo Sapiens
  misc_feature (181)..(203): n is a, c, g, or t
tcacaaactggttgcatttgttgatttatttttccatccttttcaccagtaaagattatcatcgtttatttttgtttttaaagttgaaaacaaaaaagaggagagaacagagttatggtatgaatgtatgtaaaactatagagaactacagtaatatgtactgtggttattgctgtcttcnnnnnnnnnnnnnnnnnnnnnnncaacaacaacaacaacgaaaacaaccggtaggcaactcggaatctgaaggaatcttgtctgacaactgtgctatccatgtgggctacggtgtgacagtggcggtagagaggagactccggctggcgaccggggactggtggagtggggtgagcgggcacagggaagctggggtccccttcccctcggaccctccccaccttccctttccccatccaaaaggatttcaggagaggaggccagagtctgtgaaatgactaaactatatactccattagaaaaccaagaaagtatgtttgaaatagaaacaaaagcctaagagaaaataaaaagtggagaaacagtgcaatgtaattcttgcactttagtggttttaaaaacacagacagtacaaggcccaggttgctggctggtgaaacccctgtccctcgtccctcctccactttgcaaaacggagcctcctttctcttggaagccagacatatcctctctgacgctatggggtttcttctccttagagctcttctttgaggttcccattctgggccggagccctctcaggagtgagtggatgggtccggggtactgtcccaccttgaggggggcttggcggttgccgtggcagccctgtctcactaaccggtgcgtggcgggagcaggtggttgaggcccaccctctaggggaggccagccctgtgggggtaccatggaggccacagaggtggtggtggggagatggggtgggagagaaggggcatgatcagaaaagggcctccctggacctcgtgcgcctgccttcctcccctcatggggccagtgtccccaggcctgtctgtctaggcctggctttctaaaaggaaggttccagccaacttttttgtacaa

SEQ ID NO: 184381 - DNA, 1982 bp, Homo Sapiens
  misc_feature (1765)..(1812): n is a, c, g, or t
gcttttttataatgccaactttgtacaaaaaagttggcccaactcacgtttctgtatgtcttaggccagtatcccaaacctcttccacgtcactgttctttccacccattctccctttgcatcttgagcagttatccaactaggatctgccaagtggatactggggtgccactcccctgagaaaagactgagccaggaactacaagctccccccacattcctcccagcctggacctaattcttgagaggggctctctcttcacggactgtgtctggactttgagcaggcttctgccccttgcgttggctctttgctgccagccatcaggtgggggattagagcctggtgtaagtgcgccagactcttccggtttccaaagttcgtgcctgcgaacccaaacctgtgagtctcttctgcatgcaggagtttctcctgggcagctggtcactccccagagaagctgggccttcatggacacatggaactaagcctcccaaatgggagttctggctgagcccagggtggggagatcctgggaagggaggcactggaggaagacggcacctcttcccccatggcagggtgtgagggaggcaggtttggaatggtgcgagtatggcaatctaagcaggggtctggtctctttgactccaggctggcctttggccgactgtctgctcacccagagaccttggactccggactatccatggctccgaatctaagtgctgcccactcccatgctcacacccacagaaggtcttcccatcccctttagattcgtgcctcactccaccagtgaggaagatgcctctgtctttcccacgactgccaggagatagggaagcccagccaggactgaccctccttcctccagcctgccctgacccacctggcaaagcagggcacatggggaggaagagactggaacctttctttgacagccaggcctagacagacaggcctggggacactggccccatgaggggaggaaggcaggcgcacgaggtccagggaggcccttttctgatcatgccccttctctcccaccccatctccccaccaccacctctgtggcctccatggtacccccacagggctggcctcccctagagggtgggcctcaaccacctgctcccgccacgcaccggttagtgagacagggctgccacggcaaccgccaagcccccctcaaggtgggacagtaccccggacccatccactcactcctgagagggctccggcccagaatgggaacctcagagaagagctctaaggagaagaaaccccatagcgtcagagaggatatgtctggcttccaagagaaaggaggctccgttttgcaaagtggaggagggacgagggacaggggtttcaccagccagcaacctgggccttgtactgtctgtgtttttaaaaccactaaagtgcaagaattacattgcactgtttctccactttttattttctcttaggcttttgtttctatttcaaacatactttcttggttttctaatggagtatatagtttagtcatttcacagactctggcctcctctcctgaaatccttttggatggggaaagggaaggtggggagggtccgaggggaaggggaccccagcttccctgtgcccgctcaccccactccaccagtccccggtcgccagccggagtctcctctctaccgccactgtcacaccgtagcccacatggatagcacagttgtcagacaagattccttcagattccgagttgcctaccgnnnnnnnnnnnnnnnnnnnnnnnnnnnnnnnnnnnnnnnnnnnnnnnngaagacagcaataaccacagtacatattactgtagttctctatagttttacatacattcataccataactctgttctctcctctttttgttttcaactttaaaaacaaaaataaacgatgataatccttactggtgaaaaggatgggaaaataaatcaacaaatgcaacc

SEQ ID NO: 184382 - DNA, 2036 bp, Homo Sapiens
  misc_feature (1572)..(1581): n is a, c, g, or t
ctttgtacaaaaaagttgggtggagtcgccgccagggtcatgcagaaaaccaatgtggtctgtgtcaacctggtgaatattctgcagatggctttgcaccttgcctgctctgtgccctgggcacgttccagcctgaagctggtcgaacttcctgcttcccctgtggaggaggccttgccaccaaacatcagggagctacttcctttcaggactgtgaaaccagagttcaatgttcacctggacatttctacaacaccaccactcaccgatgtattcgttgcccagtgggaacataccagcctgaatttggaaaaaataattgtgtttcttgcccaggaaatactacgactgactttgatggctccacaaacataacccagtgtaaaaacagaagatgtggaggggagctgggagatttcactgggtacattgaatccccaaactacccaggcaattacccagccaacaccgagtgtacgtggaccatcaacccaccccccaagcgccgcatcctgatcgtggtccctgagatcttcctgcccatagaggacgactgtggggactatctggtgatgcggaaaacctcttcatccaattctgtgacaacatatgaaacctgccagacctacgaacgccccatcgccttcacctccaggtcaaagaagctgtggattcagttcaagtccaatgaagggaacagcgctagagggttccaggtcccatacgtgacatatgatgaggactaccaggaactcattgaagacatagttcgagatggcaggctctatgcatctgagaaccatcaggaaatacttaaggataagaaacttatcaaggctctgtttgatgtcctggcccatccccagaactatttcaagtacacagcccaggagtcccgagagatgtttccaagatcgttcatccgattgctacgttccaaagtgtccaggtttttgagaccttacaaatgactcagcccacgtgccactcaatacaaatgttctgctatagggttggtgggacagagctgtcttccttctgcatgtcagcacagtcgggtattgctgcctcccgtatcagtgactcattagagttcaatttttatagataatacagatattttggtaaattgaacttggtttttctttcccagcatcgtggatgtagactgagaatggctttgagtggcatcagcttctcactgctgtgggcggatgtcttggatagatcaagggctggctgagctggactttggtcagcctaggtgagactcacctgtccttctggggtcttactcctcctcaaggagtctgtagtggaaaggaggccacagaataagctgcttattctgaaacttcagcttcctctagcccggccctctctaagggagccctctgcactcgtgtgcaggctctgaccaggcagaacaggcaagaggggagggaaggagacccctgcaggctccctccacccaccttgagacctgggaggactcagtttctccacagccttctccagcctgtgtgatacaagtttgatcccaggaacttgagttctaagcagtgctcgtgnnnnnnnnnngcagaaagaattagaaataaataaaaactaagcacttctggagacataataatgtacatttattgccagccttcctcgttgcaagcttccaccctgcagcaaatgcactatgctgactctcgcaccttcagctgtgccctctgacactctgctggccattgcctgagggactggggagttcaggtgaaatgtaatttcctcagtggatgagaatcatcaattgtcatgaaaaggcgatttcaccaaccctgagtcggtattgccaagggttctactccccaagtgggcttcccatcacaagggatctgaggtccaggtgggtgtggtgaggcccagcctgtcatgtatgccttccttccccagtctcaaatgtgagagacggactctgctccgtggacatgagcagccccttgaagggtggtctcattctctaacagtaacagcactgccagaaa

SEQ ID NO: 184383 - DNA, 1401 bp, Homo Sapiens
  misc_feature (839)..(889): n is a, c, g, or t
ttggggcctcagtgacaagaagtttcagcggcctcaagatcagtacccacctttccgcttcggcacggtgcccaacggcagcacggagcggaacatccgcagtaactaccgtgacatgcacacccacatggtcaagttcaaccagcgctcggtggaggacgcgctcaccagcctcaagatgggctggatgccttcatctatgatgctgctgtcctcaactacatggcaggcaaggacgagggctgcaagctggtcaccattgggtctggcaaggtctttgctaccactggctacggcatcgccatgcagaaggactcccactggaagcgggccatagacctggcgctcttgcagttcctgggggacggagagacacagaaactggagacagtgtggctctcagggatctgccagaatgagaagaacgaggtgatgagcagcaagctggacatcgacaacatggcaggcgtcttctacatgctgctggtggccatggggctggccctgctggtcttcgcctgggagcacctggtctactggaagctgcgccactcggtgcccaactcatcccagctggacttcctgctggctttcagcaggggcatctacagctgcttcagcggggtgcagagcctcgccagcccaccgcggcaggccagcccggacctcacggccagctcggcccaggccagcgtgctcaagatgctgcaggcagcccgcgacatggtgaccacggcgggcgtaagcagctccctggaccgcgccactcgcaccatcgagaattggggtggcggccgccgtgcgcccccaccgtccccctgcccgaccccgcggtctgnnnnnnnnnnnnnnnnnnnnnnnnnnnnnnnnnnnnnnnnnnnnnnnnnnncgggctggggaccgccagacgggggtcgcgcggcgcttgtgcgcagggctccgcagcccccgggccgccccccgacgccggggccgcccctgtccgacgtctcccgagtgtcgcgccgcccagcctgggaggcgcggtggccggtgcggaccgggcactgcgggaggcacctctcggcctccgagcggcccctgtcgcccgcgcgctgtcactacagctcctttcctcgagccgaccgatccggccgccccttcctcccgctcttcccggagcccccggagctggaggacctgccgctgctcggtccggagcagctggcccggcgggaggccctgctgcacgcggcctgggcccggggctcgcgcccgcgtcacgcttccctgcccagctccgtggccgaggccttcgctcggcccagctcgctgcccgctgggtgcaccggccccgccctgcgcccgccccgacggccactcggcctgcagcgcttggcgcaagcgcagtcgatgtgcttg

SEQ ID NO: 184384 - DNA, 2309 bp, Homo Sapiens
actttgtacaaaaaagttggcgctggggcccgcgctccgctgctgttgctccattcggcgcttttctggcggctggctcctctccgctgccggctgctcctcgaccaggcctccttctcaacctcagcccgcggcgccgacccttccggcaccctcccgccccgtctcgtactgtcgccgtcaccgccgcggctccggccctggccccgatggctctgtgcaacggagactccaagctggagaatgctggaggagaccttaaggatggccaccaccactatgaaggagctgttgtcattctggatgctggtgctcagtacgggaaagtcatagaccgaagagtgagggaactgttcgtgcagtctgaaattttccccttggaaacaccagcatttgctataaaggaacaaggattccgtgctattatcatctctggaggacctaattctgtgtatgctgaagatgctccctggtttgatccagcaatattcactattggcaagcctgttcttggaatttgctatggtatgcagatgatgaataaggtatttggaggtactgtgcacaaaaaaagtgtcagagaagatggagttttcaacattagtgtggataatacatgttcattattcaggggccttcagaaggaagaagttgttttgcttacacatggagatagtgtagacaaagtagctgatggattcaaggttgtggcacgttctggaaacatagtagcaggcatagcaaatgaatctaaaaagttatatggagcacagttccaccctgaagttggccttacagaaaatggaaaagtaatactgaagaatttcctttatgatatagctggatgcagtggaaccttcaccgtgcagaacagagaacttgagtgtattcgagagatcaaagagagagtaggcacgtcaaaagttttggttttactcagtggtggagtagactcaacagtttgtacagctttgctaaatcgtgctttgaaccaagaacaagtcattgctgtgcacattgataatggctttatgagaaaacgagaaagccagtctgttgaagaggccctcaaaaagcttggaattcaggtcaaagtgataaatgctgctcattctttctacaatggaacaacaaccctaccaatatcagatgaagatagaaccccacggaaaagaattagcaaaacgttaaatatgaccacaagtcctgaagagaaaagaaaaatcattggggatacttttgttaagattgccaatgaagtaattggagaaatgaacttgaaaccagaggaggttttccttgcccaaggtactttacggcctgatctaattgaaagtgcatcccttgttgcaagtggcaaagctgaactcatcaaaacccatcacaatgacacagagctcatcagaaagttgagagaggagggaaaagtaatagaacctctgaaagattttcataaagatgaagtgagaattttgggcagagaacttggacttccagaagagttagtttccaggcatccatttccaggtcctggcctggcaatcagagtaatatgtgctgaagaaccttatatttgtaaggactttcctgaaaccaacaatattttgaaaatagtagctgatttttctgcaagtgttaaaaagccacataccctattacagagagtcaaagcctgcacaacagaagaggatcaggagaagctgatgcaaattaccagtctgcattcactgaatgccttcttgctgccaattaaaactgtaggtgtgcagggtgactgtcgttcctacagttccgtgtgtggaatctccagtaaagatgaacctgactgggaatcacttatttttctggctaggcttatacctcgcatgtgtcacaacgttaacagagttgtttatatatttggcccaccagttaaagaacctcctacagatgttactcccactttcttgacaacaggggtgctcagtactttacgccaagctgattttgaggcccataacattctcagggagtctgggtatgctgggaaaatcagccagatgccggtgattttgacaccattacattttgatcgggacccacttcaaaagcagccttcatgccagagatctgtggttattcgaacctttattactagtgacttcatgactggtatacctgcaacacctggcaatgagatccctgtagaggtggtattaaagatggtcactgagattaagaagattcctggtatttctcgaattatgtatgacttaacatcaaagcccccaggaactactgagtgggagtaataaacttcttgttctatt

SEQ ID NO: 184385 - DNA, 1018 bp, Homo Sapiens
ttggacaaaggttaatcttaaacttacctaagaagatgagaatcaaacaaaacagatatgcttactctagttaaaaagaaaataaatctcatgtcagacccagaaaggaccaatcactgtccgattgtaagctatgttgggccaattccaaaatattatacgatggagaggtcaaatttacctacttctgagttacctcagtttcccaacaatggaccttggcacactggagtaacaatacataacagagttgccaagatatttataccctcagcactcggggcaacacagtggaaagtggggaggccatagacccaaacaagttctttgggccaggcatggcctagtaagtacaccatgcctcgaaaataagtccagaagcactggactaaagagtgctaatgcaggaaataatacacataatttttaggtaaggataataatttatctctgctcctaatattactatcccattgtaattatttataaccctcaagccagttgatttttaatatatttgattggaaaagaactctctggtattattaagactcacacagaatcagggacagggcccccaaaggagtttgctgtaaaataggcagtagagttgtggcacgggcccaaccctgcattcaagtgtaacagcattctgtcagggtcactttgaattgtgtacataagaaaaccaatacaaaaaacaatttgtattcaatattgtcacatttctctctggtagaaaaatcaaataccttagagattatgaagtcattaatttatactgaaattggattgacttactacctaacactgagcgctgtttttaaatgaaaagaatgagatttataaccacttgagtgttattgcagtgatatttgaactcatttgaatatattcagtatcatttaatgtctgaattcagaaaaaaatgccgaaatttttattcagatggtccataaattaaattgcatattcattacttatctgctctatttagatttattttaaaagtttattt

SEQ ID NO: 184386 - DNA, 922 bp, Homo Sapiens
ttgggccagtgcgactccaccctccagctcgacggcagccgccccggccgacagccccgagacgacagcccggcgcgtcccggtccccacctccgaccaccgccagcgctccaggccccgccgctccccgctcgccgccaccgcgccctccgctccgcccgcagtgccaaccatgaccgccgccagtatgggccccgtccgcgtcgccttcgtggtcctcctcgccctctgcagccggccggccgtcggccagaactgcagcgggccgtgccggtgcccggacgagccggcgccgcgctgcccggcgggcgtgagcctcgtgctggacggctgcggctgctgccgcgtctgcgccaagcagctgggcgagctgtgcaccgagcgcgacccctgcgacccgcacaagggcctcttctgtgacttcggctccccggccaaccgcaagatcggcgtgtgcaccgccaaagatggtgctccctgcatcttcggtggtacggtgtaccgcagcggagagtccttccagagcagctgcaagtaccagtgcacgtgcctggacggggcggtgggctgcatgcccctgtgcagcatggacgttcgtctgcccagccctgactgccccttcccgaggagggtcaagctgcccgggaaatgctgcgaggagtgggtgtgtgacgagcccaaggaccaaaccgtggttgggcctgccctcgcggcttaccgactggaagacacgtttggcccagacccaactatgattaaagccaactgcctggtccagaccacagagtggagcgcctgttccaagacctgtgggatgggcatctccacccgggttaccaatgacaacgcctccttgcaggctagagaagcagagccgcctgtgcatggtcaaggccttgccaaagctgacctgaaagaaaac

SEQ ID NO: 184387 - DNA, 1579 bp, Homo Sapiens
  misc_feature (1390)..(1410): n is a, c, g, or t
  misc_feature (1462)..(1478): n is a, c, g, or t
ttggctctcttcccttcctcttctccagccaaagatggtgctccctgcatcttcggtggtacggtgtaccgcagcggagagtccttccagagcagctgcaagtaccagtgcacgtgcctggacggggcggtgggctgcatgcccctgtgcagcatggacgttcgtctgcccagccctgactgccccttcccgaggagggtcaagctgcccgggaaatgctgcgaggagtgggtgtgtgacgagcccaaggaccaaaccgtggttgggcctgccctcgcggcttaccgactggaagacacgtttggcccagacccaactatgattagagccaactgcctggtccagaccacagagtggagcgcctgttccaagacctgtgggatgggcatctccacccgggttaccaatgacaacgcctcctgcaggctagagaagcagagccgcctgtgcatggtcaggccttgcgaagctgacctggaagagaacattaagaagggcaaaaagtgcatccgtactcccaaaatctccaagcctatcaagtttgagctttctggctgcaccagcatgaagacataccgagctaaattctgtggagtatgtaccgacggccgatgctgcaccccccacagaaccaccaccctgccggtggagttcaagtgccctgacggcgaggtcatgaagaagaacatgatgttcatcaagacctgtgcctgccattacaactgtcccggagacaatgacatctttgaatcgctgtactacaggaagatgtacggagacatggcatgaagccagagagtgagagacattaactcattagactggaacttgaactgattcacatctcatttttccgtaaaaatgatttcagtagcacaagttatttaaatctgtttttctaactgggggaaaagattcccacccaattcaaaacattgtgccatgtcaaacaaatagtctatcaaccccagacactggtttgaagaatgttaagacttgacagtggaactacattagtacacagcaccagaatgtatattaaggtgtggctttaggagcagtgggagggtaccagcagaaaggttagtatcatcagatagcatcttatacgagtaatatgcctgctatttgaagtgtaattgagaaggaaaattttagcgtgctcactgacctgcctgtagccccagtgacagctaggatgtgcattctccagccatcaagagactgagtcaagttgttccttaagtcagaacagcagactcagctctgacattctgattcgaatgacactgttcaggaatcggaatcctgtcgattagactggacagcttgtggcaagtgaatttgcctgtaacaagccagattttttaaaatttatattgtaaatatnnnnnnnnnnnnnnnnnnnnnatatatatatatatgtacagttatctaagttaatttaaagttgtttgtgccnnnnnnnnnnnnnnnnnaatgctttgatatttcaatgttagcctcaatttctgaacaccataagtagaaatgtaaagcttgtctgatcgttcaaagcatgaaatggatacttatatgg

SEQ ID NO: 184388 - DNA, 1638 bp, Homo Sapiens
  misc_feature (379)..(442): n is a, c, g, or t
  misc_feature (449)..(483): n is a, c, g, or t
  misc_feature (1411)..(1420): n is a, c, g, or t
aaaaaaaatatacactttattttcaactaaaaaggtgcaaacatgtaacttttggtcacactctcaacaaataaactgtccgaaaaacagtcatatcaaagtaaaaacaaatgcttccaggtgaaaaaactgatcagctatatagagtcactcagtttttaataaaggccatttgttcattaaaagtgaggctaccacatttcctacctaaaaatcagcctgccaaggacactgatgcctcccctttgcaaacaatctgttttgacggactgtcattctatctgagcaaaatttccatataagtatccatttcatgctttgaacgatcaaacaagctttacattctacctatggtgttcaaaaattgaggctaacattnnnnnnnnnnnnnnnnnnnnnnnnnnnnnnnnnnnnnnnnnnnnnnnnnnnnnnnnnnnnnnnnctgtacnnnnnnnnnnnnnnnnnnnnnnnnnnnnnnnnnnnatatttacaatataaattttaaaaaatctggcttgttacaggcaaattcacttgccacaagctgtccagtctaatcgacaggattccgattcctgaacagtgtcattcgaatcagaatgtcagagctgagtctgctgttctgacttaaggaacaacttgactcagtctcttgatggctggagaatgcacatcatagctgtcactgggggctacaggcaggtcagtgagcacgctaaaattttccttctcaattacacttcaaatagcaggcatattactcgtataagatgctatctgatgatactaaacctttctgctggtaccctcccactgctcctaaagcaacaccttaatatacattctggtgctgtgtactaatgtagttccactgtcaagtcttaacattcttcaaaccagtgtctggggttgatagactatttgtttgacatggcacaatgttttgaattgggtgggaatcttttcccccagttagaaaaacagatttaaataacttgtgctactgaaatcatttttacggaaaaatgagatgtgaatcagttcaagttccagtctaatgagttaatgtctctcactctctggcttcatgccatgtctccgtacatcttcctgtagtacagcgattcaaagatgtcattgtctccgggacagttgtaatggcaggcacaggtcttgatgaacatcatgttcttcttcatgacctcgccgtcagggcacttgaactccaccggcagggtggtggttctgtggggggtgcagcatcggccgtcggtacatactccacagaatttagctcggtatgtcttcatgctggtgcagccagaaagctcaaacttgataggcttggagattttgggagtacggatgcactttttgcccttctaaggaagacaagggaaaagagagaggnnnnnnnnnntcagcgactctacaagaggagtggctttcttcaaccctctgtgttttagtcttctgttgtctgacttctgtttatattttgaggggaggaagtttgagtctcatttgctatgtccaaaaatagccagagcctctcttggaatgtcttgaattaactaaccctgtggaagatttcgtagtggaaaactggtggttgctattacacaagctctcatccaa

SEQ ID NO: 184389 - DNA, 873 bp, Homo Sapiens
ttggcttccttcctcttctccagccaaagatggtgctccctgcatcttcggtggtacggtgtaccgcagcggagagtccttccagagcagctgcaagtaccagtgcacgtgcctggacggggcggtgggctgcatgcccctgtgcagcatggacgttcgtctgcccagccctgactgccccttcccgaggagggtcaagctgcccgggaaatgctgcgaggagtgggtgtgtgacgagcccaaggaccaaaccgtggttgggcctgccctcgcgggtgagtcgagtcttcctctaagtcagggtcgtgattctctcccagggagggagtcctaactgtgccgaccgaacgggggaaataccttatccaggcgttttacatggtgtttgtgtgctctgctctcgcagcttaccgactggaagacacgtttggcccagacccaactatgattagagccaactgcctggtccagaccacagagtggagcgcctgttccaagacctgtgggatgggcatctccacccgggttaccaatgacaacgcctcctgcaggctagagaagcagagccgcctgtgcatggtcaggccttgcgaagctgacctggaagagaacattaagaagggcaaaaagtgcatccgtactcccaaaatctccaagcctatcaagtttgagctttctggctgcaccagcatgaagacataccgagctaaattctgtggagtatgtaccgacggccgatgctgcaccccccacagaaccaccaccctgccggtggagttcaagtgccctgacggcgaggtcatgaagaagaacatgatgttcatcaagacctgtgcctgccattacaactgtcccggagacaatgacatcttt

SEQ ID NO: 184390 - DNA, 908 bp, Homo Sapiens
aactttgtacaaaaaagttgggacagccagtgcgactccaccctccagctcgacggcagccgccccggccgacagccccgagacgacagcccggcgcgtcccggtccccacctccgaccaccgccagcgctccaggccccgccgctccccgctcgccaccaccgcgccctccgctcaacccgcagtgccaaccatgaccgccgccagtatgggccccgtccgcgtcgccttcgtggtcctcctcgccctctgcagccggccggccgtcggccagaactgcagcgggccgtgccggtgcccggacgagccggcgccgcgctgcccggcgggcgtgagcctcgtgctggacggctgcggctgctgccgcgtctgcgccaagcagctgggcgagctgtgcaccgagcgcgacccctgcgacccgcacaagggcctcttctgtgacttcggctccccggccaaccgcaagatcggcgtgtgcaccgccaaagatggtgctccctgcatcttcggtggtacggtgtaccgcagcggagagtccttccagagcagctgcaagtaccagtgcacgtgcctggacggggcggtgggctgcatgcccctgtgcagcatggacgttcgtctgcccagccctgactgccccttcccgaggagggtcaagctgcccgggaaatgctgcgaggagtgggtgtgtgacgagcccaaggaccaaaccgtggttgggcctgccctcgcggcttaccgactggaagacacgtttggcccagacccaactatgattagagccaactgcctggtccagaccacagagtggagcgcctgttccaagacctgtgggatgggcatctccacccgggttaccaatgacaacgcctcctgcaggctagagaagcagagccgcctgtgcatgg

SEQ ID NO: 184391 - DNA, 1050 bp, Homo Sapiens
  misc_feature (825)..(859): n is a, c, g, or t
  misc_feature (897)..(914): n is a, c, g, or t
actttgtacaaaaaagttggctgtggagtatccttccagacggccgatgctgcaccccccacagaaccaccaccctgccggtggagttcaagtgccctgacggcgaggtcatgaagaagaacatgatgttcatcaagacctgtgcctgccattacaactgtcccggagacaatgacatctttgaatcgctgtactacaggaagatgtacggagacatggcatgaagccagagagtgagagacattaactcattagactggaacttgaactgattcacatctcatttttccgtaaaaatgatttcagtagcacaagttatttaaatctgtttttctaactgggggaaaagattcccacccaattcaaaacattgtgccatgtcaaacaaatagtctatcaaccccagacactggtttgaagaatgttaagacttgacagtggaactacattagtacacagcaccagaatgtatattaaggtgtggctttaggagcagtgggagggtaccagcagaaaggttagtatcatcagatagcatcttatacgagtaatatgcctgctatttgaagtgtaattgagaaggaaaattttagcgtgctcactgacctgcctgtagccccagtgacagctaggatgtgcattctccagccatcaagagactgagtcaagttgttccttaagtcagaacagcagactcagctctgacattctgattcgaatgacactgttcaggaatcggaatcctgtcgattagactggacagcttgtggcaagtgaatttgcctgtaacaagccagattttttaaaatttatattgtaaatatnnnnnnnnnnnnnnnnnnnnnnnnnnnnnnnnnnngtacagttatctaagttaatttaaagttgtttgtgccnnnnnnnnnnnnnnnnnnatgctttgatatttcaatgttagcctcaatttctgaacaccatatgtagaatgtaaagctttgtctgatcgttcaaagcatgaaatggatacttatatggaaattctgctcagatagaatgacagtccgtcaaaca

SEQ ID NO: 184392 - DNA, 1349 bp, Homo Sapiens
ttggcgtcccctccccggctcgctggtaccggcagtgccatggcggccttcagcaagtacttgacggcgcgaaactcctcgctggctggtgccgcgttcctgctgctctgcctgctccacaagcggcgccgcgccctcggcctgcacggtaagaaaagtggaaaaccaccattacagaacaatgagaaagaggggaaaaaggagcgagctgtggtggacaaggtgtttttctcaaggctcatacagattctgaaaatcatggtccctagaacattttgtaaagagacaggttacttggtacttattgctgttatgctggtgtctcgaacatattgtgatgtttggatgattcaaaatgggacactaattgaaagtggtatcattggtcgtagcaggaaagatttcaagagatacttactcaacttcatcgctgccatgcctcttatctctctggttaataacttcttgaagtatgggttaaatgagcttaaactgtgcttccgagtaaggctcactaaatacctctatgaggagtatcttcaagctttcacatattataaaatggggaatctggacaacagaatagctaatccagaccagctgcttacacaagatgtagaaaaattttgtaacagtgtagtcgatctgtattcaaatcttagtaagccatttttagacatagttttgtatatctttaagttaacgagtgcaattggagctcagggcccagcgagcatgatggcctacttggttgtttctgggctattcctaactcgacttcgaagacccattggtaagatgacaataactgagcaaaagtatgaaggagaatatagatatgttaattctcggctcatcacaaacagtgaagaaattgccttttacaatgggaataaaagagaaaagcagacagtccactcagtcttccgaaaactggtggaacacctacataatttcattttgtttcggttttcaatgggcttcattgatagtattattgccaaataccttgccactgttgttggttacctagttgtcagtcgccctttcttagatttgtctcatcctcgacatctcaagagtacacattcggaacttctagaggattactaccaaagtggaagaatgcttttgcgaatgtctcaagctctgggtcgaatagttttggctgggcgtgaaatgactagattggccggttttactgctcggattacagaattaatgcaagtactgaaggatttaaatcatggcaaatatgagcgcacaatggtctcacaacagaaaagggtattgaacgagtacagtcattcccttgatacctggtgctggagaaatcattattgcagata

SEQ ID NO: 184393 - DNA, 2067 bp, Homo Sapiens
  misc_feature (799)..(810): n is a, c, g, or t
ttggatttaaactctatatgtctcaatatcagtgtccatgtgtgttgctacagaaacatttatgtgtttaattataaaattctgcctcagaactctctgggggtgttaaataatacattttcaaaatctgaattccaagacacattccaaaacagtagtttacggtaggggattatgaccctgtatttgaaaagcaagttgactgtcaacaatgctatactgatttaatttttcctgattttgacctttggctatttttatccttctcatattcctctcatatatttttcacaataaaataggagacatgataggagatatgttttttgcccaaaagaaaataatacacttaatgccagtacctggtagtttttattatgtggttgatggccagtactttccattgctataaacattttgcatccagttgtaaattttttctcattgacattgctttttaactttagtcactgaagactgtcctcttaacagcttaaagtacatggactagtttaatttgtgactctgttactgattaaacctaaatcattttctttgtattaggttggcatcactctcttcactgtgtctcataggaaatctctttggaaacatcatgagtactacctgcatatggatggcagaggcaactatgaattcaaacagataacagaagatacagttgagtttggctcttagagaaatctggagaactatacctgcttcagtgaaataattacagaatatacttagaaaggcaaagtacattgtaaaataaagttgagcttagttttttttnnnnnnnnnnnncaaagcaacaaattaactagatacagaataatggagaacaagttgttaaaacatttaatattatataggatattgctaattgtgtatatgttggtttaattaataatatgtactaagaatgtccttattcttgtggttaaaaacctgcctaaattaaattgggcttcaatcactgtaacctgattcatcctgggatgtaaaccattcgaagtcagctaattggacttttatggctctatcttttccttcagtgaagaaccctatttaaaactgggtcatcatttgtcctgttctagcaagatagtcttcagtttcattttcctgtgccctgtggtagttggaaacaaatcataatgtattatttaaatgtttaacatcattgcataacagcgtttattatacagtggcagatttctttagctgccacagtaatactcattccttgtgtgtgtcttggagtgcatttgactccaggaaaagccattttggttttccttaactaaatgataaatgtacccctctcagtctgcagtattgagttgtttaaagtatatgtgcagtcttgcttacaaggaggggttaccatgtatcacacctaatcttcccaatgtttgggatattaaaacacaaagtccttaacatgccaggctcaaggtcttataagagttctagatttttaagagaattagacaaatttgtgtgtgttagaagcccattcattagaagtgtggtggttatttggtattaaactccaaatgagccataggaaggcactacatgaaataatgcactgagtatgcaatgctatcactgtctttgactgtgattttatgtttaaaaagtatgttctaaaattattatatatacatgggtgaattatgtttccgaggcactgttttatctctgtgaatcttgaataacttttttatatttgggttatgatgtcaaacgatcctaagcgaagatgatttcagttcatcaaatcatcattaatgactttatgtattatttgcacagggagaattgaaactgagtataatcaataagctagatacgaaatcagtttctcaaactgagcttcagaaaggggcattttgtactcttgtttttgcataactggttttgtttttttgcagaattaactataacaatcactggctaccgaagtaaactgatgtactgaattccataatacataacattcaatttttaccacttctgtttagcgaacttgtatacttattttctgttcagatt

SEQ ID NO: 184394 - DNA, 1731 bp, Homo Sapiens
  misc_feature (1568)..(1578): n is a, c, g, or t
gccaactttgtacaaaaaagttggcaacagaatagctaatccagaccagctgcttacacaagatgtagaaaaattttgtaacagtgtagtcgatctgtattcaaatcttagtaagccatttttagacatagttttgtatatctttaagttaacgagtgcaattggagctcagggcccagcgagcatgatggcctacttggttgtttctgggctattcctaactcgacttcgaagacccattggtaagatgacaataactgagcaaaagtatgaaggagaatatagatatgttaattctcggctcatcacaaacagtgaagaaattgccttttacaatgggaataaaagagaaaagcagacagtccactcagtcttccgaaaactggtggaacacctacataatttcattttgtttcggttttcaatgggcttcattgatagtattattgccaaataccttgccactgttgttggttacctagttgtcagtcgccctttcttagatttgtctcatcctcgacatctcaagagtacacattcggaacttctagaggattactaccaaagtggaagaatgcttttgcgaatgtctcaagctctgggtcgaatagttttggctgggcgtgaaatgactagattggccggttttactgctcggattacagaattaatgcaagtactgaaggatttaaatcatggcaaatatgagcgcacaatggtctcacaacaggaaaagggtattgaaggagtacaagtcattcccttgatacctggtgctggagaaatcattattgcagataacattataaagtttgatcatgttcctttagcaacgccaaatggagatgttttgatccgagaccttaattttgaagttcgatctggggctaatgttctaatttgtggtccaaatggctgcggaaagagttcacttttccgtgttcttggtgaattatggcctctttttggaggacgtctaactaaacctgaaagaggaaaattattttatgttcctcagagaccttacatgacccttggaacacttcgagatcaagtgatatatccagatggacgagaagatcagaaaaggaagggaatttctgacctagtactgaaggaatacttagacaatgtccagttgggtcatatccttgaacgtgaaggaggctgggacagtgttcaggattggatggacgtactcagtggtggagaaaagcaaagaatggcgatggcaagattattttatcataaaccccagtttgccattttggatgaatgcacaagtgcagttagtgtcgacgtggaaggctacatttatagtcattgtcgaaaggttggcatcactctcttcactgtgtctcataggaaatctctttggaaacatcatgagtactacctgcatatggatggcagaggcaactatgaattcaaacagataacagaagatacagttgagtttggctcttagagaaatctggagaactatacctgcttcagtgaaataattacagaatatacttagaaaggcaaagtacattgtaaaataaagttgagcttagttttttttnnnnnnnnnnncaaagcaacaaattaactagatacagaataatgggagaacaagttgttaaaacatttaatattatataggatattgctaattgtgtatatgttggtttaattaataatatgtactaagaatgtccttattcttgtggttaaaacctgcctaaa

SEQ ID NO: 184395 - DNA, 1722 bp, Homo Sapiens
ttggattttagataatgatataagtgatctgggtctagaactaactttttctgttgagactgatgtgtttggagcaatggaagaggtgcctttgaaacctgggggtgggagtattcttgtgacacaaaataataaagcggagtacgtccagcttgttactgaacttcgaatgacaagagccattcagcctcagatcaatgcttttttacagggctttcatatgttcattccaccctccctcatacagctttttgatgaatatgaattggagctactgctttctggcatgccagaaattgatgtgagtgattggataaaaaatacagaatacacaagtggctatgaaagagaagatccagttattcagtggttctgggaagttgtagaagacattactcaagaggagagagttcttctcttacagtttgttacgggcagttccagggtcccacatggtgggtttgctaatatcatgggtggaagtggattgcaaaactttacaatcgctgctgtgccatatactccaaatcttttaccaacttcaagcacatgcatcaacatgctcaagttacctgaatacccaagtaaagaaatactcaaggacagacttcttgtggcactacattgtggcagctatggttacacaatggcataatgaagtctggaaaactcctctgactactgatgcacaattcagaatggcagaagtaatttgggaaaatgtcaacaaaaaagcagcctaaatgcaacccataggcagggctgatgcttccaatttataaaggatcatcaggttttctgtttctctcttttcccttttatgttttctctgtttgtgatacaattagaaaatataaaatcacagtagattttattttttaaaatgctaactgaaagtaatagagactgtcctttttcataattaattttatccaagattgtattaaggcaaaatctgattctacattccacctctgctatgtaactgtcttgttaaaagggtgttttctcctaatttctgatatattatatgaggtcatccagctggtgtgttcttttgcatgtaaactgccatttatattttagaaaactattgtatagaatggatttagattgtctataaagccacaaatacgtattttgccacagtgtattctatattgcaatgatttttttagcattttaatattttaatatatattgtaaaatttagactgatgatactaacagttgatgaaatgacatataatttatatatgaaagcttacgctatattgtatgaattatttgcatctttcagtggccagttttccatatgtatatattatggtctcaatgtttttcttacgcctcattttaatttataatgaaggtaaaattaaaatgtattttaccacgtttcttttcattacttttatctgtgagctctgacacatctgaaaaagtaatctgatgtgcaaattataatttaaatatgttaatttttttgcttcttaaatttgcttttcatcattaaaatgtcaagttcaagtgatatgtgcctaatatcacttggatgttggtgggtttttgaatttttgggtggttaatcagttttattttgaaaagacgtacttgaatagttacagcatatgtttgaacaggaagtaggaacatgcatacacgaagaaatgctaaccggaaggatttgttatgtttaggatcttcccttggaaactaaaa

SEQ ID NO: 184396 - DNA, 934 bp, Homo Sapiens
ttggccgatcctcgcctctgtcccatccttgtgttcaaacctcccgcatctcggcaacctcggcacccgcccggcagcctccgcaggaaccaggcacccgctctttggcggtcagacgccgaggccccagctgggagtttggtcctaagagggaaggcaaggaggcgggacgccgcatcggctctgctgaagagcctgcgggttggagggcaaaaaagtttatcttctggatgccaatgtgaattgtggtctacaaatacattgtggagaaaatagattgcacagaaatgaatattatcaggatctgaagactgtgaaaatgtttttcagtattgtcatagtctcctctggagaaaataatctgtgaaattatgtgaatagagaccatttttcaaaacaatgggggaaagagcaggaagtccaggtactgatcaagaaagaaaggcaggcaaacaccattattcttacttatctgattttgaaacgccacagtcttctggccgatcatcgctggtcagttcttcacctgcaagtgttaggagaaaaaatcctaaaagacaaacttcagatggccaagtacatcaccaagcccctcggaaaccaagccctaagggtctaccaaacagaaagggagtccgagtgggatttcgctcccagagcctcaatagagagccacttcggaaagatactgatcttgttacaaaacggattctgtctgcaagactgctaaaaatcaatgagttgcagaatgaagtatctgaactccaggtcaagttagctgagctgctaaaagaaaataaatctttgaaaaggcttcagtacagacaggagaaagccctgaataagtttgaagatgccgaaaatgaaatctcacaacttatatttcgtcataacaatgagattacagcactcaaagaacgcttaggaaaatctc

SEQ ID NO: 184397 - DNA, 2088 bp, Homo Sapiens
gtacaaaaaagtttggaaaaggcccaaatggtgtctatgatttctctcaggctcataatgccaaggatgtgcccaacacgcagcccaaggcagcctttaagtcccaaaatgctaccccaaagggtccaaatgctgcctatgatttttcccaggcagcaaccactggtgggttagctgctaacaagtctgagatggccttcaaggcccagaatgccactactaaagtgggcccaaatgccacctacaatttctctcagtctctcaatgccaatgacctggccaacagcaggcctaagacccctttcaaggcttggaatgataccactaaggccccaacagctgatacccagacccagaatgtaaatcaggccaaaatggccacttcccaggctgacatagagaccgacccaggtatctctgaacctgacggtgcaactgcacagacatcagcagatggttcccaggctcagaatctggagtcccggacaataattcggggcaagaggacccgcaagattaataacttgaatgttgaagagaacagcagtggggatcagaggcgggccccactggctgcagggacctggaggtctgcaccagttccagtgaccactcagaacccacctggcgcaccccccaatgtgctctggcagacgccattggcttggcagaacccctcaggctggcaaaaccagacagccaggcagaccccaccagcacgtcagagccctccagctaggcagaccccaccagcctggcagaacccagtcgcttggcagaacccagtgatttggccaaacccagtaatctggcagaacccagtgatctggccaaaccccattgtctggcccggccctgttgtctggccgaatccactggcctggcagaatccacctggatggcagactccacctggatggcagaccccaccgggctggcagggtcctccagactggcaaggtcctcctgactggccgctaccacccgactggccactgccacctgattggccacttcccactgactggccactaccacctgactggatccccgctgattggccaattccacctgactggcagaacctgcgcccctcgcctaacctgcgcccttctcccaactcgcgtgcctcacagaacccaggtgctgcacagccccgagatgtggcccttcttcaggaaagagcaaataagttggtcaagtacttgatgcttaaggactacacaaaggtgcccatcaagcgctcagaaatgctgagagatatcatccgtgaatacactgatgtttatccagaaatcattgaacgtgcatgctttgtcctagagaagaaatttgggattcaactgaaagaaattgacaaagaagaacacctgtatattctcatcagtacccccgagtccctggctggcatactgggaacgaccaaagacacacccaagctcggtctcctcttggtgattctgggtgtcatcttcatgaatggcaaccgtgccagtgaggctgtcctctgggaggcactacgcaagatgggactgcgtcctggggtgagacatcccctccttggagatctaaggaaacttctcacctatgagtttgtaaagcagaaatacctggactacagacgagtgcccaacagcaaccccccggagtatgagttcctctggggcctccgttcctaccatgagactagcaagatgaaagtgctgagattcattgcagaggttcagaaaagagaccctcgtgactggactgcacagttcatggaggctgcagatgaggccttggatgctctggatgctgctgcagctgaggccgaagcccgggctgaagcaagaacccgcatgggaattggagatgaggctgtgtctgggccctggagctgggatgacattgagtttgagctgctgacctgggatgaggaaggagattttggagatcccctggtccagaattccatttaccttctgggccagataccaccagaatgcccgctccaaattccctcagacctttgccggtcccattattggtcctggtggtacagccagtgccaacttcgctgccaactttggtgccattggtttcttc

SEQ ID NO: 184398 - DNA, 2604 bp, Homo Sapiens
ctttgtacaaaaaagttggatcgaatgtttcgacatgggatttgagtaccaagttcgatccatagcaagtcatgttcgtcctgacaggcagactctcttatttagtgcaacttttcggaagaagattgaaaagttggccagagacatcctgatcgaccctattcgagtggtgcagggagatattggagaggcaaatgaagatgtgacacagattgtggagattctccattctggacctagtaaatggaactggcttacccggcgtctggtagaatttacctcttcagggagtgtcctcctctttgttactaaaaaagccaatgctgaagagctagcgaataaccttaaacaggagggtcataatcttgggctgctccatggggatatggatcagagtgagagaaacaaggtcatttcagactttaagaaaaaggacatcccagtcctggtggccacagatgttgcagcccgtggtctggacattccttcaattaagactgtcattaactatgatgtggcacgagacattgatacccacacgcataggattggccgcacaggaagagcgggtgagaaaggtgtggcctataccctactcactcccaaggacagcaattttgctggtgacctggtccggaacttggaaggagccaatcaacacgtttctaaggaactcctagatctggcaatgcagaatgcctggtttcggaaatctcgattcaaaggagggaaaggaaaaaagctgaacattggtggaggaggcctaggctacagggagcggcctggcctgggctctgagaacatggatcgaggaaataacaatgtaatgagcaattatgaggcctacaagccttccacaggagctatgggagatcgactaacggcaatgaaagcagctttccagtcacagtacaagagtcactttgttgcagccagtttaagtaatcagaaggctggaagttctgctgctggggcaagtgggtggactagtgcagggagcttgaattctgttccaactaactcagcacaacagggccataacagtcctgacagccccgtcaccagtgccgccaagggcatcccaggctttggcaatactggcaacatcagtggtgcccctgtgacctacccgtctgccggagcccaaggagtcaacaacacagcttcagggaataacagccgagaagggactgggggcagcaacgggaaaagagagagatatactgagaaccggggcagcagccgtcacagtcacggagagactggcaatcggcatagcgatagtccacgtcacggagatggtggtcgccatggagatggataccgccatccagaaagcagcagccgtcatactgatggccatcggcacggggagaacagacatggaggaagcgcaggccggcatggggagaaccggggtgcaaatgatggtcggaatggggaaagcaggaaagaagcttttaatcgtgagagcaagatggagcccaagatggaacccaaagtggacagcagcaagatggacaaggtggacagcaagacagataagacagctgacggctttgctgtcccagagccgcctaaacgcaagaaaagtcgatgggacagttagaggggatgtgctaaagcgtgaaatcagttgtccttaatttttagaaagattttggtaactaggtgtctcagggctgggttggggtccaaagtgtaaggaccccctgcccttagtggagagctggagcttggagacattaccccttcatcagaaggaattttcggatgttttcttgggaagctgttttggtccttggaagcagtgagagctgggaagcttcttttggctctaggtgagttgtcatgcgggtaagttgaggttatcttgggataaagggtcttctagggcacaaaactcactctaggtttatattgtatgtagcttatattttttactaaggtgtcaccttataagcatctataaattgagttctttttcttagttgtatggccaggcagtccccattttaggagttggcttctgcaaattcaatccattgagctaactgttggggagcaatttggtagttgtagacatttgcagggaagggagatgtctgattctaaatgggagttgatgctcaggtccccagccaggtttgcatccagccctgagacatgtaggaaacacctttcagacccaggctctgaagattcccagaagccacaaggattgaagggaaaaggtgatcctggtaactgttccaggattgctccaggtttgagatggtattgctaaatttaaaattaaacaagagacccaacaacagcttttaaagtgtcttctatttcattgtattttttttaacttgccccaatgatagaaaagtcttttgctgaaatgattttgatgatttttgtttatcgtttataaaaaggaaaagaaatatacaaactttgacttttgtgactttgtgaaggtttctttaagatgtgcattcctttctgcttgctctctagtaaatgttttactaccgggacctgtggatcgtttgtcatttctgtctatgaattggtacatattaagctgggacttaagaatagtgccgcacacag

SEQ ID NO: 184399 - DNA, 1562 bp, Homo Sapiens
actttgtacaaaaaagttgggtgcgctaattacaggtagcagaaacattctcaattgtacttgggtgtgattatgttcttgtgctttcctgcaggaagcttattttcgatacatggcagaaaacccaactgctggtgtggttcaggaggaagaggaagacaatctagaatatgatagtgacggaaatccaattgcacctaccaaaaaaatcattgatcctcttccccccattgatcattcagagattgactatccaccatttgaaaaaaacttttacaatgagcatgaagagataaccaacctcactccacagcagttaatagatctccggcataagctcaatcttcgggtctctggtgctgcacctcctagaccaggaagtagctttgctcattttgggtttgacgaacaacttatgcaccagattcggaaatctgaatacacacagcccactccaatacagtgccagggtgtgcctgtggcattaagtggtagagacatgattggtattgccaaaacaggtagtgggaaaactgcagccttcatttggcccatgttgattcatataatggaccagaaggagttggaaccaggtgatggaccaattgcagtgattgtgtgtcctaccagggagctttgccagcagatccatgcagaatgtaagcggtttggaaaagcatataatcttcgatcagtggccgtatatggaggagggagtatgtgggagcaggccaaggcccttcaggagggggcagagattgttgtgtgtaccccaggtcgactgatagatcatgtgaaaaagaaagctaccaatcttcaaagagtctcttaccttgtgtttgatgaagcagatcgaatgtttgacatgggatttgagtaccaagttcgatccatagcaagtcatgttcgtcctgacaggcagactctcttatttagtgcaacttttcggaagaagattgaaaagttggccagagacatcctgatcgaccctattcgagtggtgcagggagatattggagaggcaaatgaagatgtgacacagattgtggagattctccattctggacctagtaaatggaactggcttacccggcgtctggtagaatttacctcttcagggagtgtcctcctctttgttactaaaaaagccaatgctgaagagctagcgaataaccttaaacaggagggtcataatcttgggctgctccatggggatatggatcagagtgagagaaacaaggtcatttcagactttaagaaaaaggacatcccagtcctggtggccacagatgttgcagcccgtggtctggacattccttcaattaagactgtcattaactatgatgtggcacgagacattgatacccacacgcataggattggccgcacaggaagagcgggtgagaaaggtgtggcctataccctactcactcccaaggacagcaattttgctggtgacctggatccggaacttggaaagagccaatcaacacgtttctaagaactcctagatctggcaatgcagaatgcctggtttcggaatctcgattcaaggagggaaa

SEQ ID NO: 184400 - DNA, 1262 bp, Homo Sapiens
ttggtgatttggggtgggcagagagttgtcatcagaagggttgcagggagagctgcacccaggtgtctgtgggccttgtcctaatgaatgtgggagaccaggccatgggcacccaaaggcagctaagccctgcccgggagagtagttgaggggtggagagggacttgcttttcagtcattcctcattctgtcctcaggaatgtcccaagccttcgggtagggtaagcatcatggctggcagcctcacaggattgcttctacttcaggcagtgtcgtgggcatcagatgagtgagtcaaggcagtggggaggtagcacagagcctcccttctgcctcatagtcctttggtagccttccagtaagctggggtagacttttagtaggtgctcaataaatccttttgagtgactgagaccaactttggggtgaggatttttgaaaccgtcttcagtctctccaaacagctgtgtccgttctccacatccttgtcagacctcacctctgcttgtgctccctccctcccaggtggtgcccctgcatccctaaaagcttcagtacagctcggtggtctgtgtctgcaatgccacatactgtgactcttgaccccccgacctttcctgccctaggtgccttcagccgctacaagagcagaagcagtgggcattggatggagctgagtacaggaccatacaggctaattgcaccggcacaggaatcggatataacatcatctgggtacccatggccagctgtgacttctccatccgcacctacacctatgcagacacccctgatgatttccagttgcacaacttcagcctcccagaggaagataccaagctcaagatacccctgattcaccgagccctgcagttggcccagcgtcccgtttcactccttgccagcccctggacatcacccacttggctcaagaccaggggagcggggaatgggaaggggccactcaagggacagcccagagacatctaccaccagacctgggccagatacattgtgaagttcctggatgcctatgctgagcacaagttacagttctgggcagtgacagctgaaaatgagccttctgctgggctgttgagtggataccccttccagtgcctgggcttcacccctgaacatcagcgagacttcattgcccgtgacctaggtcctaccccttgccaacggtactcaccacaatgtccgcctactcatgctgggatgaccaacgcttgctgctgccccactggggcaaggtggta

SEQ ID NO: 184401 - DNA, 1311 bp, Homo Sapiens
agagaggagctggagcaggcccagatcaaggggcccgtggatgtgcctggacgtggaagatggcaaggaggcaccggaggaggcacagctcgatcgccctgggcaagggattgctgtgcctgtgggcgaggcccaccgccacgagcctcctgttcctcacgacaaggtggtggtagatgaaggccaagaccgagaggtgccagaagagaacaaacctccatccagacacgcgggcggaaaggctccaggggtccagggccagatggcgccgcctctgcccgactcagaaagagagaaacaagagccggagcagggagaggttgggaagaggcctggacaggcccaggccttggaggaggcgggtgatcttcctgaagatccccagaaagttccagaagcagatggtcagccagctgtccagcctgcaaaggaggacctggggccaggagacaggggcctgcatcctcggccccaggcagtgctgtctgagcagcagaacggcctggcggtgggtggaggggaaaaggccaaggggggaccgccgccaggcaacgccgccggggacacagggcagcccgcagaggacagcgaccacggtgggaagcctcccctcccagcggagaagccggctccagggcctgggctgccgcccgagcctcgcgagcagagggacgtggagcgagcgggtggaaaccaggcggccagccagctggagggaagctggcagggcggagatgctggaccacgccgtcctgcttcaggtgatcaaagaacagcaggtgcagcaaaagcgcttgctggaccagcaggagaagctgctggcggtgatcgaggagcagcacaaggagatccaccagcagaggcaggaggacgaggaggataaacccaggcaggtggaggtgcatcaagagcccggggcagcggtgtccagaggccaggaggcccctgaaggcaaggccagggagacggtggagaatctgcctcccctgcctttggaccctgtcctcagagctcctgggggccgccctgctccatcccaggaccttaaccagcgctctctggagcactctgaggggcctgtgggcagagactctgctggctctcctgacggcggccctgacacagagcctcgggcagctcaggccaagctgagagatggccagaagatgccgctcccagggcagctggcactgtgaaggagctcctcaagggctcggagcagtgctcgtgctcagactcgccagggaagccgggggcccagaggagcgtctcgcagaggaatttcctgggcaaagtcaagacgttactggc

SEQ ID NO: 184402 - DNA, 1531 bp, Homo Sapiens
ttggctaacccggcgcgccatgaccgtcgcgcggccgagcgtgcccgcggcgctgcccctcctcggggagctgccccggctgctgctgctggtgctgttgtgcctgccggccgtgtggggtgactgtggccttcccccagatgtacctaatgcccagccagctttggaaggccgtacaagttttcccgaggatactgtaataacgtacaaatgtgaagaaagctttgtgaaaattcctggcgagaaggactcagtgatctgccttaagggcagtcaatggtcagatattgaagagttctgcaatcgtagctgcgaggtgccaacaaggctaaattctgcatccctcaaacagccttatatcactcagaattattttccagtcggtactgttgtggaatatgagtgccgtccaggttacagaagagaaccttctctatcaccaaaactaacttgccttcagaatttaaaatggtccagcagtcgaattttgtaaaaagaaatcatgccctaatccgggagaaatacgaaatggtcagattgatgtaccaggtggcatattatttggtgcaaccatctccttctcatgtaacacagggtacaaattatttggctcgacttctagtttttgtcttatttcaggcagctctgtccagtggagtgacccgttgccagagtgcagagaaatttattgtccagcaccaccacaaattgacaatggaataattcaaggggaacgtgaccattatggatatagacagtctgtaacgtatgcatgtaataaaggattcaccatgattggagagcactctatttattgtactgtgaataatgatgaaggagagtggagtggcccaccacctgaatgcagaggaaaatctctaacttccaaggtcccaccaacagttcagaaacctaccacagtaaatgttccaactacagaagtctcaccaacttctcagaaaaccaccacaaaaaccaccacaccaaatgctcaagcaacacggagtacacctgtttccaggacaaccaagcattttcatgaaacaaccccaaataaaggaagtggaaccacttcaggtactacccgtcttctatctgggcacacgtgtttcacgttgacaggtttgcttgggacgctagtaaccatgggcttgctgacttagccaaagaagagttaagaagaaaatacacacaagtatacagactgttcctagtttcttagacttatctgcatattggataaaataaatgcaattgtgctcttcatttaagatgctttcattgtctttaagatgtgttagaatgtcaacagagcaaggagaaaaaaggcagtcctggaatcacattcttagcacacctacacctcttgaaaatagaacaacttgcagaattgagagtgattcctttcctaaaagtgtagaaagcatagagatttgttcgtatttagaatgggatcacgaggaaagagaagaaagtgatttttttccacaagatctgtaatgttatttccacttataagggaaataaaaaa

SEQ ID NO: 184403 - DNA, 905 bp, Homo Sapiens
aactttgtacaaaaaagttggctctaacttcccaggtcccaccaacagttcagaaacctaccacagtaaatgttccaactacagaagtctcaccaacttctcagaaaaccaccacaaaaaccaccacaccaaatgctcaagcaacacggagtacacctgtttccaggacaaccaagcattttcatgaaacaaccccaaataaaggaagtggaaccacttcaggtactacccgtcttctatctgggcacacgtgtttcacgttgacaggtttgcttgggacgctagtaaccatgggcttgctgacttagccaaagaagagttaagaagaaaatacacacaagtatacagactgttcctagtttcttagacttatctgcatattggataaaataaatgcaattgtgctcttcatttaggatgctttcattgtctttaagatgtgttaggaatgtcaacagagcaaggagaaaaaaggcagtcctggaatcacattcttagcacacctacacctcttgaaaatagaacaacttgcagaattgagagtgattcctttcctaaaagtgtaagaaagcatagagatttgttcgtatttagaatgggatcacgaggaaaagagaaggaaagtgatttttttccacaagatctgtaatgttatttccacttataaaggaaataaaaaatgaaaaacattatttggatatcaaaagcaaataaaaacccaattcagtctcttctaagcaaaattgctaaagagagatgaaccacattataaagtaatctttggctgtaaggcattttcatctttccttcgggttggcaaaatattttaaaggtaaaaacatgctggtgaaccaggggtgttgatggtgataagggaggaatatagaatgaaagactgaatcttc

SEQ ID NO: 184404 - DNA, 3056 bp, Homo Sapiens
ttgggaatataggtgaacttccaactgccttgaagggtcgactcaatgattcaaataaaatcttggtacagcaaacgctgaatatcctgcaacaactggcagtagccatgggcccaaatattaagcaacatgtaaaaaatttaggcatccctatcatcacagtccttggagacagcaagaacaatgttcgagctgctgccctagcgactgtgaatgcttgggcagaacagactggcatgaaggaatggctggaaggagaagatctttctgaagagctcaaaaaggaaaatcctttcttgaggcaagagcttctgggctggctggctgagaaactacctactcttcgttccacccctacagaccttatcctttgtgttcctcatctctactcctgcctagaagatcgaaatggagatgtgcgaaagaaggcccaagatgccttgccattcttcatgatgcatttaggatatgaaaaaatggccaaggctactgggaaactaaagccaacttctaaagatcaggtattggccatgctagagaaagccaaagttaacatgccagccaagcctgctccacccactaaagcaacttctaaaccaatgggagggtccgctccagccaaattccagcctgcatcagcacctgctgaagattgtatttccagcagtacagaacccaaacctgatccaaaaaaggccaaagctccaggattatcctctaaagcaaagagtgcacacgggaagaagatgccaagcaaaaccagcttaaaggaggatgaagacaaatccgggcctatttttattgttgttccaaatggaaaagagcaaaggatgaaagatgaaaaaggattgaaggtgctaaagtggaattttactaccccacgggatgaatacattgagcaactaaagactcaaatgtctagctgtgtggctaaatggttacaagatgagatgtttcactcagactttcagcatcataacaaagcccttgctgttatggttgatcacttggagagtgaaaaagaaggagttattggttgcctggatcttatcttaaagtggcttaccctgaggttttttgacaccaatacaagcgtcctgatgaaagcactagaatatttaaaattgctcttcaccttgctaagtgaagaagaatatcatcttactgagaatgaagcatcttccttcatcccctatcttgtcgtcaaggttggagaaccaaaggatgtcattcgtaaagatgttcgtgccatcctgaaccggatgtgccttgtctacccagctagcaagatgtttccctttatcatggaaggaaccaaatccaaaaactctaagcagagagcagagtgcctggaagagctgggatgtctggttgagtcctatggcatgaatgtttgccaaccaaccccaggaaaagccttaaaggaaatagctgttcacataggagaccgtgacaatgctgtacgcaatgctgcactcaacaccattgtaacggtgtacaatgtacatggggatcaggtgttcaaactgattggaaatctttctgaaaaggatatgagcatgctcgaggagaggattaagcggtcagcaaagagaccctctgctgcaccaataaaacaggtggaagagaaacctcagcgtgcacagaacataagctccaatgccaacatgttacgcaagggaccagctgaggacatgtcttccaaactcaaccaagcccgaagcatgagtgggcatcctgaggcagcccagatggtccgccgagaattccagctggatctagatgagattgagaatgacaatggtacagtccgatgtgaaatgccagaacttgttcagcacaaactggatgacatttttgagccagtccttattcctgaacccaagatccgggctgtttctccacacttcgatgacatgcacagtaatacagcatccacaatcaatttcattatctcccaagtagccagtggtgacatcaacacaagtatccaagctctgacacagatcgatgaggtcctgagacaggaagacaaagctgaagccatgtccggccatattgatcagtttctgatagccacttttatgcagctaagactcatctacaacacacacatggcagatgagaaattggagaaggacgagatcatcaagttgtatagctgtatcattggcaacatgatttcgctgtttcagatagagagccttgcccgggaggcctccactggagtactaaaagacctaatgcatggcctcatcaccttaatgctggattctcggattgaagatcttgaggaaggacaacaggtcatccgctctgtgaacctcttggtggtgaaggttctggagaagtcagaccagaccaacatcctgagtgccctacttgttttgctccaagacagcctgctagcaacagccagttctcccaaattctcagagcttgttatgaagtgtctctggagaatggttcgactgttgcctgataccatcaatagcattaacctagacagaattcttctggatatccacattttcatgaaggtcttccccaaagagaaactgaagcaatgcaaaagtgaatttcccataaggaccctaaagaccctgctacacaccttatgcaaattaaaagggcccaagatcctggaccacctaacgatgatcgacaacaaaaacgagtctgagctggaggcccatctctgccggatgatgaagcacagtatggaccagactgggagcaagtctgataaggaaacagaaaagggagcatctcgaatagatgaaaaatcatcaaaggccaaagtgaatgatttcttagctgagatttttaagaagattggctctaaagaaaacactaaagagggactagcagagttatatgaatataagaagaaatactcagatgctgacattgaaccatttctgaaaaattcctcacagttcttccagagctatgtcgaaagaggccttcgggtgattgagatggagagggagcgcaaaggtcgtatttccacttcaacaggcatctcccctcagatggaagtcacatgtgtgccc

SEQ ID NO: 184405 - DNA, 2475 bp, Homo Sapiens
  misc_feature (593)..(652): n is a, c, g, or t
aaatagtactgggtgtatactagacacacatattttatactaattttgggcttttaatgttctgattttaaaaaatgattgacctttttggtcttttcagacccgaaaagaaacccagaagttaagagaatttgaagaaggcctggttagccaatacaagttttatttggaaaatctggaacaaatggttaaagattggaagcagaggaagctgaagaaaagtaatgtagtttccttaaaggcatacaaaggactggcagaagtcgctgtgaagagcttgtgtgagctgttggtggcactacctcattttaactttcacaacaacatcatcgtattgattgtccctctcatgaatgacatgtcaaaattgatatctgaaatgtgttgtgaagctgtgaagaaactctttaagcaagataaattaggccaagcttctcttggtgtaattaaagtgatttctggttttgtgaagggcagaaattacgaagttaggccagagatgttaaaaacatttttatgcctaagaatcaaggaagtagaagtgaaaaaagatacagaagacattaataaaccaaaaaaatttatgactttcnnnnnnnnnnnnnnnnnnnnnnnnnnnnnnnnnnnnnnnnnnnnnnnnnnnnnnnnnnnnctagagcgagagcttcgagaggcagaagcttcagagagtactgagaaaaaacttaaactgcacacagagactctgaatattgtgtttgtaacctacttcagaatattgaagaaggcccagaggtcacctctcctgccagcagttctagaaggtcttgccaagtttgctcaccttataaatgtggaattttttgatgatctgttagtagttcttcatactctcattgagtctggtgacctaagctatcaagaaagtcttcactgtgtccagactgcttttcatattctttctggacaaggtgatgttctgaatattgatccattgaaattctacacacatctctacaaaacactgttcaaattacatgcaggtgctaccaatgaaggtgttgagattgtactccagtgccttgatgtcatgctaactaagcgcagaaagcaagtttctcagcagcgagctcttgccttcatcaaacgcctttgtacccttgctcttcatgttcttccaaattcaagtattggcattttagcaactaccagaatattaatgcatactttccccaaaacagatctactgcttgacagtgaatctcagggaagtggagttttccttcctgaactggatgagcctgagtactgcaatgctcagaacactgctctgtgggaactgcatgctctgcggaggcattatcatcccatagtgcagagatttgcagcccacctgatcgctggagcaccttctgaaggctctggagcactcaaaccagagttgagtcgaagatctgctactgaactttttgaggcatatagcatggcagaaatgacattcaatcctcctgttgaatcttcaaaccccaaaataaagggtaaatttttacaaggggattcatttttgaatgaagatttaaatcagctaatcaaaagatactccagtgaagttgctactgaatcgcctctggatttcacgaaatatttgaaaacatcactacactagtagaggaatgaagtcagtggactttcttgtatatttgtgtgtgcagatgtacataaagatgagttgttaacttaggatcttttctttttatacaaggaaagcttcctaagaatgtctaggaagaagaggaagaatgaccctttgcatggcacagggttctgcccctattctgaatatgtcattccatcaaggagatcaaaagcctttttttctccccagtatttggaaattactttcttgatgatgctgccttttaagagcttcacgtacattatagttttttaaaaaaatctttggactggatcttactgaagtgcagttgctatattaaaattagggcatagagcacagaaaaatcaagaccatgagaagacattttaccatttagctactttttataactaaatactctttaaatatttttatttcaatactgtggatggaaatgagaagcattctaaatttgagttaatatatttttatgaagatatttgagaaaagaaaaaaatagcttgtattcaggttcattggcttttgctggatgatccacctaaagaagttacctaatttggccttttaaaaaaggtgttagtgtttattatagctactttcaaggaaagtttgaatatgattctagtctctaaagttcttcacgttttctgacattccctgggaggggtgactggggaagaattgctccagggtagaagaaccagggcccaagactttaccattctgatctagagacaaaggatactcaatgatggagcttttttcccctcttgggaacaggtaaaatgctttttcttattaatataattataaaacag

SEQ ID NO: 184406 - DNA, 1426 bp, Homo Sapiens
  misc_feature (313)..(353): n is a, c, g, or t
  misc_feature (1108)..(1150): n is a, c, g, or t
  misc_feature (1232)..(1251): n is a, c, g, or t
ttggcattcctctaagtcggtcacccctgcttccacactgaccaaaagtggccctggccgttggaaaacaccagcagccataccggccacccctgtggccgtctcccagccaatccgaacagacctgcctccgccacccccgccacctccagtccactatgccggtgatttcgatggaatgtccatggatttgcctctcccaccacccccttccgccaaccagatagggctgccgtctgcgcaggtggctgctgctgaacggagaaagagagaagaacatcagcgttggtatgagaaggagaaggcccgcctnnnnnnnnnnnnnnnnnnnnnnnnnnnnnnnnnnnnnnnnnagttgggccagatgcgcactcagtccttaaaccctgctccgttttctcccctgactgcacagcagatgaagcccgaaaagccttccacactccagcggccacaggaaacagtcattcgggagctgcagcctcagcagcagccccgcacgatcgagcgcagagacttgcagtacattacagtcagcaaagaggagctttcctcgggggacagtctgtcccccgacccgtggaagcgggaggagaaggcccacctggaggaggagcagcagatgcacatcgtggacatgctgagcaaggagatccaggagctccagagcaaaccggaccgcagcgccgaggagagcgaccggctgcgcaagctcatgctggagtggcagttccagaagagactccaggagtcgaagcagaaggacgaagatgacgaggaggaggaggacgatgatgtggacaccatgctgatcatgcagcgcctggaggctgaacgaagagcgagggacgaggagcggaggcggcagcagcagttagaagagatgcgcaagcgggaagcggaagaccgagcgaggcaagaggaagagcgccggcggcaggaggaggagcgaacaaaacgagacgctgaagaaaagaggcgacaggaagaagggtattacagccgcctggaagccgagaggcgcagacagcacgacgaggcggcgcgcaggttgctggagcccgaggcgcccggtctgtgccgccctccgcttccccgggactacgannnnnnnnnnnnnnnnnnnnnnnnnnnnnnnnnnnnnnnnnnncctcagcgaaacgcctcctacctcaaaacacaggtcctctcccccgactcgctgttcactgccaagtttgttgcatacaatnnnnnnnnnnnnnnnnnnnnctgcagcctagcaggaccaaactcttacccaggatctactggagcagctgttggagcccatgacgcctgtcgggatgcaaaagagaagcgctctaaaagccaagatgcagattcacctgggaagttctggggcccctgaaaacttgacattcaaggaacgccagcgtcttttttc

SEQ ID NO: 184407 - DNA, 1177 bp, Homo Sapiens
ttggcacggtctggccacccttctcaatcagccatcccccatgatgcagagaatttcagatcgtcgtggctcaggtaaaccccgaccaaagagtgaaggctttgagctctataataattcaactcaaaatgggtctcctgagagtcctcagctgccttgggcagaatatagtgaaccaaagaaattgcctggtgatgacagactgatgaaaaatagagctgatcaccgttccagccccaacgtagcaaatcagcctcctagtcctggagggaaaagtgcatatgcctctggaacaacagcgaagataacatctgtctctactggaaacctctgcactgaggagcagacgcctccgcctagacctgaagcctaccccatccccactcagacgtacaccagagagtattttaccttcccagcttccaaatcccaggatcggatggctcctcctcagaaccagtggccaaattatgaggaaaagccacatatgcacacagatagtaatcattccagtattgcaattcagcgtgttacacgttcccaagaagaacttcgagaagataaagcttaccaacttgagcggcatcgaatagaggcagctatggaccgaaagtctgatagtgatatgtggataaatcagagctcctcactggactccagtacctctagccaggagcatctgaaccattcctctaagtcggtcacccctgcttccacactgaccaaaagtggccctggccgttggaaaacaccagcagccataccggccacccctgtggccgtctcccagccaatccgaacagacctgcctccgccacccccgccacctccagtccactatgccggtgatttcgatggaatgtccatggatttgcctctcccaccacccccttccgccaaccagatagggctgccgtctgcgcaggtggctgctgctgaacggagaaagagagaagaacatcagcgttggtatgagaaggagaacgcccgcctggaggaggagcgggagaggaagcggagagagcacgagaggaagttgggccagatgcgcactcagtccttaaaccctgctccgttttctcccctgactgcacagcagatgaagcccgaaaagccttccacactccagcggccacaggaaacagtcattcgggagctgcagcctcagcagcagccc

SEQ ID NO: 184408 - DNA, 1593 bp, Homo Sapiens
ctttgtacaaaaaagttggattttgtattttatgacagaaacgttggtacatttcttcatgaatgagcttgcattctgaagcaagagcctacaaaaggcacttgttataaatgaaagttctggctctagaggccagtactctggagtttcagagcagccagtgattgttccagtcagtgatgcctagttatatagaggaggagtacactgtgcactcttctaggtgtaagggtatgcaactttggatcttaaaattctgtacacatacacactttatatatatgtatgtatgtatgaaaacatgaaattagtttgtcaaatatgtgtgtgtttagtattttagcttagtgcaactatttccacattatttattaaattgatctaagacactttcttgttgacaccttgaatattaatgttcaagggtgcaatgtgtattcctttagattgttaaagcttaattactatgatttgtagtaaattaacttttaaaatgtatttgagcccttctgtagtgtcgtagggctcttacagggtgggaaagattttaattttccagttgctaattgaacagtatggcctcattatatattttgatttataggagtttgtgtctgggtcccaggaacatctactggggatgactgttaggcagcttgtgatgatgttttttaaaaaacctaagtaacttggggagacagagcatttcaaacccatatagacacctatcatacctgtatatcccctaatacatggaacataaatttcatttcagctttatgcattaatgtattgaagaggcaggctttttttccagtaataatactgtacatctaaggttgctattcagtaaaactaatagaagagataattattgaataccttggaatatgtagtgagaagaggccaaatttttcatgtttgtgagcatgtctttcagatactcgctaatggagaaattcactttagacctctagaccccaaaaccaagttagcaagtgacaaaaagtaaattattaatagtctgtaaagtggatgctggtcttacaaagctcctattcacatgaaccctatggttaattagaaagaacttgctgtctccagaaaagggaatggaaataataactatgtatcttcttttcatgtaatttggtcacagaataaggtattcaagttaagtctaatccaagtcttagagatctttaagtatcctaaaatagcagcctaagtagtcatcatgtaaagaagttgactttcaggaatgtcagcattgacctctccttgccactgttactcagctaaacataacttgccattcttaaaaataaaaaagctcccacccagaaactctagtgatactcagttttgacctcttactgcttccatgtgggacttcttttcagcttttaaccattggaattttctacctgctatgttcctctctggaaaatatcaatttggaaatgctgcctttcaaatcaatgccatgatcatccatattgttgagtttgttgttggtgttccagaagtgtccccattttacaactttatgcacacacctggcaaatcattaacatgagcattcaacagtac

SEQ ID NO: 184409 - DNA, 1790 bp, Homo Sapiens
ttggcaaaaataatttatgaaataaacacagtagggcatgaggttgtgttatttgtgaggcagcaatggagcatgacttgtagtcaacaaacatgggtgtcctgatcaaagctctgctgtgctattcggcaagactctatgtggatgcctcttgtagaatgtggttaataataccagccgatctcatagggcactgtgcagactcagcattatggtgcacagctccttgaactcataggagtggcacttaactggagctttgtgtcgtactcatcaaacatcttcccccagacaatgattcttctgattctgctaactctggacagagtttgcattgtcttttgagaaaaatgaatgtatcacttagtcaaaaaactgtacaaaatacataggctctttccgatgcttgctttctcagagccctatgagtttgtctctctggaatggctgcaaaagtggttggatgaatcaacacctaccaaacctattgataatcacgcttgcctgtgttcccatgacaagcttcacccggataaaatatcaattatgaagaggatatctgaatatgcagctgacattttctatagtagatatggaggaggtccaagactaactgtgaaagccctgtgtaaggaatgtgtagtagaacgttgtcgcatattgcgtctgaagaaccaactaaatgaagattataaaactgttaataatctgctgaaagcagcagtaaagggcagcgatggattttgggtggggaagtcctccttgcggagttggcgccagctagctcttgaacagctggatgagcaagatggtgatgcagaacaaagcaacggaaagatgaacggtagcaccttaaataaagatgaatcaaaggaagaaagaaaagaagaggaggaattaaattttaatgaagatattctgtgtccacatggtgagttatgcatatctgaaaatgaaagaaggcttgtttctaaagaggcttggagcaaactgcagcagtactttccaaaggctcctgagtttccaagttacaaagagtgctgttcacagtgcaagattttagaaagagaaggggaagaaaatgaagccttacataagatgattgcaaacgagcaaaagacttctctcccaaatttgttccaggataaaaacagaccgtgtctcagtaactggccagaggatacggatgtcctctacatcgtgtctcagttctttgtagaagagtggcggaaatttgttagaaagcctacaagatgcagccctgtgtcatcagttgggaacagtgctcttttgtgtccccacgggggcctcatgtttacatttgcttccatgaccaaagaagattctaaacttatagctctcatatggcccagtgagtggcaaatgatacaaaagctctttgttgtggatcatgtaattaaaatcacgagaattgaagtgggagatgtaaacccttcagaaacacagtatatttctgagcccaaactctgtccagaatgcagagaaggcttattgtgtcagcagcagagggacctgcgtgaatacactcaagccaccatctatgtccataaagttgtggataataaaaaggtgatgaaggattcggctccggaactgaatgtgagtagttctgaaacagaggaggacaaggaagaagctaaaccagatggagaaaaagatccagattttaatcaaagcaatggtggaacaaagcggcaaagatatcccatcaaaattatatagcctatcaaaagcaagttattcgccgaagtatgcgacatagaaaagtt

SEQ ID NO: 184410 - DNA, 962 bp, Homo Sapiens
tgtacaaagaaccagcttggttaagagaagaagacatctgaccagaacatagaggagaaaccccctgtctaagatatatcatacgaaaatgaaaattataattcttcttggattcctgggagccacattgtcagccccacttatcccacagcgtctcatgtctgccagcaatagcaatgagttacttcttaatcttaataatggtcaacttttgccactacaacttcagggcccacttaattcatggattccacctttctctggaattttacaacagcagcagcaggctcaaattccaggactctcccagttctctttatcagctctagaccagtttgctggactgctcccaaatcagatacccttaacaggagaggccagttttgcccaaggagcccaggcaggccaagttgatcccttacagcttcaaacaccgcctcagacacaaccaggccccagtcacgtgatgccctatgtattctccttcaaaatgcctcaagagcaaggacagatgtttcaatactatccagtttacatggtcctaccctgggaacaacctcagcaaacagttccaaggtcacctcaacaaacaagacagcaacagtatgaggagcagataccattctatgctcaatttggatacattccacaactagcagaacctgctatatcaggaggacagcagcaactagcttttgatccccaactaggcacagctcctgaaattgctgtgatgtcaacaggagaagagataccatatttacaaaaagaagcgatcaactttagacatgacagtgcaggagtttcatgccctcaacttcaccaaaacccagcacaaccaatgttttcacttctgctgtagaccaaactattaccccagagctcccagaaaaaaagacaagactgacagcctaagggaaccataaaagttgccctgatcattcaggacattttgggaaaaa

SEQ ID NO: 184411 - DNA, 1727 bp, Homo Sapiens
tttgtacaaaaaagttggggaaaagaacacagatctcgcatggttcagatttttctttttaggtccaggagtaagatatatcatacgaaaatgaaaattataattcttcttggattcctgggagccacattgtcagccccacttatcccacagcgtctcatgtctgccagcaatagcaatgagttacttcttaatcttaataatggtcaacttttgccactacaacttcagggcccacttaattcatggattccacctttctctggaattttacaacagcagcagcaggctcaaattccaggactctcccagttctctttatcagctctagaccagtttgctggactgctcccaaatcagatacccttaacaggagaggccagttttgcccaaggagcccaggcaggccaagttgatcccttacagcttcaaacaccgcctcagacacaaccaggccccagtcacgtgatgccctatgtattctccttcaaaatgcctcaagagcaaggacagatgtttcaatactatccagtttacatggtcctaccctgggaacaacctcagcaaacagttccaaggtcacctcaacaaacaagacagcaacagtatgaggagcagataccattctatgctcaatttggatacattccacaactagcagaacctgctatatcaggaggacagcagcaactagcttttgatccccaactaggcacagctcctgaaattgctgtgatgtcaacaggagaagagataccatatttacaaaaagaagcgatcaactttagacatgacagtgcaggagttttcatgccctcaacttcaccaaaacccagcacaaccaatgttttcacttctgctgtagaccaaactattaccccagagctcccagaagagaaggacaagactgacagcctaagggaaccataagaagttgccctgatcattcagacattttgggaaaaagatgtggccatgccttggatataattttaggctattagcttcctcaatactagtatcagttctttggaatacatgaaatatcttgactcttctcctaaatttgtttttacttatacatgttattaaactctttaaatatgtcatagaaaataatacaatcatgtaatgagtcttgtcttacaaaattatatgtctcttcaaatatcctatcattgtataatatggaatataataacacagaataaagctagtatcattaaatcaattggataattgcattagtaaatgatgcctctgcaaaatggtagtacccatgaagatatgtatattgtcattggatgtatgatgagtgttgtgattggaactgatgaagtaaaataagtatctagatttgacatgtcatctcttcatttccctaaggtccatttagtcagtttcctcctgagacattctcatgacaatcaaaattatttggtggcagatatcataaagtgcttattcctaatatgacacagtcacatagagaggtgtctgtccttactcaaaaggataggaaagtgtatgcttgtttgggggaggcagcatcctgtagagaataaggtggagattttgggtttcatcagatctggctttcaatctagaataatttctctaaaatcagctttgcttacatttggtaattctcaaaactttccctaccaactattctccactggatgtttcctatctaaataaaacagcattagttcaagaataaaata

SEQ ID NO: 184412 - DNA, 909 bp, Homo Sapiens
ttggagaacgtgtctggttattatgcagatgcacggctggaggtgggatccacacagctcagaacagctggatcttgctcacactctttcaagagaagcttccttgggttaagaaaaaaaacgaacccttccagtcaggtcagtgactggagagctccatggaaagtctctcagtgacctggctgctggcaccatggactcagaaaagaaacgctttactgaagaggccaccaaatacttccgggagagagtcagcccagtgcatctgcaaatcctgctgactaacaatgaagcctggaagagattcgtgactgcggctgaattgcccagggatgaggcagatgctctctacgaagctctgaagaagcttagaacatatgcagctattgaggacgaatatgtgcagcagaaagatgagcagtttagggaatggtttttgaaagagtttccccaagtcaagaggaagatccaggagtccatagaaaagcttcgtgcccttgcaaatggtattgaagaggtccacagaggctgcaccatctccaatgtggtgtccagctccactggcgctgcctctggcatcatgtcccttgctggtcttgttttggcaccatttacagcagggacgagtctggcccttactgcagctggggtagggctgggagcagcgtctgctgtgactgggatcaccaccagcatcgtggagcactcatacacatcatcagcagaagctgaagccagcaggctgactgcaaccagcattgaccgattgaaggtatttaaggaagttatgcgtgacatcacacccaacttactttcccttcttaataattattacgaagccacacaaaccattgggagtgaaatccgtgccatcaggcaagccagagccagggcccgactccctgtgac

SEQ ID NO: 184413 - DNA, 1666 bp, Homo Sapiens
actttgtacaaaaaagttggcacacctcggatttcagccaggctgtgccacggagggcagaggccacccagaaaagaaacgctttactgaagaggccaccaaatacttccgggagagagtcagcccagtgcatctgcaaatcctgctgactaacaatgaagcctggaagagattcgtgactgcggctgaattgcccagggatgaggcagatgctctctacgaagctctgaagaagcttagaacatatgcagctattgaggacgaatatgtgcagcagaaagatgagcagtttagggaatggtttttgaaagagtttccccaagtcaagaggaagatccaggagtccatagaaaagcttcgtgcccttgcaaatggtattgaagaggtccacagaggctgcaccatctccaatgtggtgtccagctccactggcgctgcctctggcatcatgtcccttgctggtcttgttttggcaccatttacagcagggacgagtctggcccttactgcagctggggtagggctgggagcagcgtctgctgtgactgggatcaccaccagcatcgtggagcactcatacacatcatcagcagaagctgaagccagcaggctgactgcaaccagcattgaccgattgaaggtatttaaggaagttatgcgtgacatcacacccaacttactttcccttcttaataattattacgaagccacacaaaccattgggagtgaaatccgtgccatcaggcaagccagagccagggcccgactccctgtgaccacctggcgaatctcagctggaagtggtggtcaagcagagagaacgattgcaggcaccacccgggcagtgagcagaggagcccggatcctgagtgcgaccacttcaggcatcttccttgcactggatgtggtcaaccttgtatacgagtcaaagcacttgcatgagggggcaaagtctgcatctgctgaggagctgaggcggcaggctcaggagctggaggagaatctaatggagctcactcagatctatcagcgtctgaatccatgccatacccactgaccccagaccagtgcagccagcaggggaggtgagccatacacaggccacgacaaaatgcaggcattttattagggggataaagagggcaaggtaaagtttatggagctgagtgttagtgactttggcatttctgtagctgagcacagcaggggaggggttaatgcagatggcaagtgcaccaaggagaaggcaggaatgctggagcctggaataagggaggagaggggactggagagtgtggggaataggaagaagaaatttcctttagactaacgaatatattggggggaggaatagaggggaggtgtgcaggaaccagcaatgagaaggccaggaaaagaaagagctgaaaatgcagaaagccgaagagttagaacttttggatacagcagaagaaacagcggctccactaccgacctgcccccggttcgatgtccttccaagaatgaagtctttccctggtgatggtcccctgccctgtctttccagcatccactctgtcttgtcctcctggaagtgtatctcagtcagcccagtgggcttcttgatgatggcgtgggaggtggtggttgtagtgtgatgggatcccctttaggttatttaggggta

SEQ ID NO: 184414 - DNA, 1618 bp, Homo Sapiens
  misc_feature (391)..(431): n is a, c, g, or t
ttggctctttgaggacttggagttccagcagttggagcgggagagccgcgtggaggaggagcgcgagctggccggccaggggctgctccggagcaaggctgagctgctccgcagcatcgccaagaggaaggagcgcctggccatcctggacagtcaggctgggcagatccgggctcaggccgtgcaggagtcagaacgcctggcccgggacaagaatgcctccttacagctgctgcaaaaggagaaggagaagctgactgtgctggaaaggagataccactcactcacagggggcaggcctttcccgaagaccacatcgaccctcaaagaggtttaccgctccaagatggatggcgaggccaccagcccccttccccggacccgcagcggnnnnnnnnnnnnnnnnnnnnnnnnnnnnnnnnnnnnnnnnnagctcagtgtggctaccctggggcgtagcccctccccaaagagcgctctactcacccagaatggcacgggcagccttcctcgcaacctggcagccacactgcaggacatcgagaccaagcgccaactagctctgcagcagaagggacaacaagtgattgaagagcagcggcggcgactggctgagctgaagcagaaagcggcagctgaggcacagtgccagtgggatgcccttcacggggcagcacccttcccagcgggcccctcgggcttcccccctctcatgcaccactctatcctacaccacctgcctgcggggcgggagcgtggggaggagggtgagcacgcctatgatacgctgagtctggagagctctgacagcatggagaccagcatctccaccgggggcaactcggcctgctcccctgacaacatgtccagcgcgagtggtctggacatggggaagatcgaggagatggagaagatgctgaaagaggctcatgcagagaagaaccggctcatggagtcgagggagcgggagatggagctgcggcggcaggccctggaggaggagcggcggaggcgtgagcaggtagaacggaggctgcagagtgagagtgcccggaggcagcagctggtcgagaaggaggtcaagatgcgggagaaacaattttcccaggcacgacccctgacccgctacctgccaatccggaaggaggactttgacctgaagacacatattgagtcatcgggccatggtgttgatacctgcctgcacgtggtgctcagcagcaaggtctgccgtggctacttggtcaagatgggcggcaagattaaatcatggaagaagcgctggtttgtcttcgaccggctcaagcgcaccctttcctattatgtggacaagcatgagacgaagctgaagggagtcatctatttccaggccattgaggaagtgtactacgaccacctgcgcagtgcagccaagagcccgaacccagccctcaccttctgcgtaaagacccatgaccggctgtactacatggtggccccatctgcagaggccatgcgtatctggatggatgtcattgtcacaggggctgagggctacactcagttcatgaactaactgccgtgggcctcctggcagagcacaactggggcttttgtataagaagactttatattctgt

SEQ ID NO: 184415 - DNA, 1090 bp, Homo Sapiens
actttgtacaaaaaagttggagaagactttaatattctgtaaggagcttggtcctgtgagtttctgggctctggcctcctgaagaaccagccagaagaagaaaagtagaggtggctttgctgcctcctgggagcccagaacttgcagtaaccctttagggtcctgccccaggcccagccagggctgaggagctgtcacagagagggcctcagctctgacctgacacctgctctccccagcctgttttctcttttctaaaagacaaattatggtaccataagctgccaaagatcccctcctgcctcagacccctttgccaggggctttgggggctgagcagagccacatccagagtggggtaatagctcaggcggcccgcttcccatttctcaaaccccgctctgccccattgttctcctttcccttatactttttattaccttgctcaagggccagagatctcaagtgtcaaccttgaggtcccagctccatcccctagttgcagactcatcaccatggttaccatagtgactgcttcattgccatggttacatactaattgctgcagctctgtggcccagcccactgcttcagctgtgggccatctgagggtacgtgccatcatctctccagcccaggcccctgggcatctcatgctggggggaagggactgaatacctttttccttccccctgcctgtgtcttcagccctgatgcacaggctgccagccccccagtccagccctctcccttccactggtgccttgcttagagccagaagggatgaagccgggggatctatggaacagaggaggagcgatgcagttgggagaggaagctagaagggttatggttggagttctgtacagtgttgagtttccgacagggaaagaggattcctccaatgctcctagagagaaagcctgagcaggagatgatgcagcagaggggaagggccctgtggtgccgccgcccttccttcagcctccgaagggtgatggaaatggagagtggaggactaggcctccagctgtctggcctcccccttcacgccttaacactaagcccacctcccctgctctccttccca

SEQ ID NO: 184416 - DNA, 1968 bp, Homo Sapiens
  misc_feature (448)..(485): n is a, c, g, or t
ccaccacagtcatgagagccaagcgagactgggcttgtggcctggggctccacagctgcccagctccaccttccggcatttactggtctcatcctgagaggcattgggtgcccactcactggctggatgctgggctggttcatgggtggcagagccagggtataccctttggggatgtccctaacccctcaggaccagaggcagcaccaagcagcatgtcacagccagtgctagggtcagctgcaccctttgctgggactctagctctcctcagagggcctcctagggccattccgggcactgtgggtggcaatggggagccccggctccctcattaggccagacaccagtctggccgggtcagggaggcccagccttgggccctgtcacacgtagtccagaatctctgtctccatttcgttttcactgccgtcggatggcttgaagnnnnnnnnnnnnnnnnnnnnnnnnnnnnnnnnnnnnnngtcttccccagactcgtacgtcagctgctcttttccgccatcagccttggctgagctggaaaagagagcaggcctcttggagcggatggtctgccggatcatgagggacatggtgtccctgagctcgtcgctggtcttggggaggcaccacccatcccgttctgtgcaggaattctctgccccgtcattgcggtgaatgatcttctgcaactcttccacattcaagtcgcataactggtagaacatctgccgatagggtggcaaggccccttcccggaagatgtagacagagtccttgagcttgtacttgctggaagctggtttccgagcaccactcgtccccgacgggcccaggccctgcttcaggtcatgcatggtgacaagctggctggatgtcttcttgacggtgatggggaggctgtagttgtaggtgctgcgctttgctttgaccggcaagtcactgggggcgtaaccgtgtttcattccacaacggattcggaaatcgaggacttgataaatcttggcatctgggttttttcgggggtcatacccaaatcgaatccataggctgcgccaggggcctgttatcatgtaataggctatgaagggaagcaagaccttgagcttgtctgggtggacgctgatgttggccttgacagcatttcgggaccagatgggacggatgtcaaacagcttcctcagctcctcctccaccttccggtccacggggttagtgcagactctcctccacgtctgggctgcagcctccagtggctgcttgggcacctcctcatcctcaaagttgacaaagatggcattgtgggggcgccgggctctgctcaggccaatcagattctcacctgagatggggggattgttgtagccttcccggtgctgggtctctggtcggtagaagtagtccaccggggcgtccagccgggagaagatgggtggggggatgtagagcggcagctcctggtggaaaaaggcctccttctcgggccggagcatgagcaccttgtcatacattgacgtatgcttgccgcctgcttccgtatgcacagccaagtactggaagtcagacatcccctgaaatttgtaaatggtggagatgatgccaaggatctccatgtcaaatgtgacctcggagtgggcctcagtgcccagcacccctttctgccgcctcgttctcttcctgatgcggagcagcaggctgctggtactgaagcggttggcgcacactgggtggcagtatgggtccttgggccggaagtacagctccagcctcttggtggggtctgcgtagatcgctcgcgtcatcctaactccccgggctcagcaagacgcgagggcctccagggagcaaatggcccatgggagggcccatgtcttcgggaaaacgaccgccgtgtcctcgactttttatttaaaattaagcgagttagtccaccgggcggggcaagcaccagccaacttttttgta

SEQ ID NO: 184417 - DNA, 2047 bp, Homo Sapiens
  misc_feature (1067)..(1158): n is a, c, g, or t
ggaacttcatgcagattaggattctaaagcacagagaggttaaattgcctgcccgaggctacacagttaatgggttggattccttaacaactggtagaggcataaagtggaagtcacagaaaataatgttttcccttcagaagctcttcattaacaatatttgggttggagttcagatgtgcgctcccgggataggctgcctcggagagggagaggcggggtcagctgtatcacgttggatctgctccagctgccgctgccgcagtcgtcgtctttctctgtctcggctgaggcagccatctttctcttgccgcgtgctggtgttggaggaccctccctgcttcagatttaccaacagcatgaatcaagaaaagttagccaaacttcaggctcaggtccggatagggggcaagggtacagctcgcagaaagaagaaggtggtacatagaacagccacagctgatgacaaaaagcttcagagttctctaaaaaaactggctgtgaataatatagctggtattgaagaggtgaacatgattaaagatgatgggacagttattcatttcaacaatcccaaagtccaagcttccctttctgctaatacctttgcaattactggtcatgcagaagccaaaccaatcacagaaatgcttcctggaatattaagtcagcttggtgctgacagtttaacaagccttaggaagttagctgaacagttcccacggcaagtcttggacagtaaagcaccaaaaccagaagacattgatgaggaagatgatgatgttccagatcttgtagaaaattttgatgaggcatcaaagaatgaagctaactaaaagtttggtttttggaagctggcatggactagatttaacaaatcagctatgtggttccaaagttttacagacatggagaacatcacctgttactagttcagtaatataaatattttgtatattaataatgctgtttgttcagcatttttcggtcatttgattttgcattttgcacttcctcccaggatatttttttggtcaaaatatgaagtattggtgcagtttgagggnnnnnnnnnnnnnnnnnnnnnnnnnnnnnnnnnnnnnnnnnnnnnnnnnnnnnnnnnnnnnnnnnnnnnnnnnnnnnnnnnnnnnnnnnnnnacagtggagagcaaattggaaaacagttctatttatcctcctccctccccagtagaaataaaaaaaatctttacatttgttacttttcttttccccccgtaagacacagaattaatggaaagtgagtatcttggatttcaaatctgaagagatttttaccattagtggtttgattttaatttgcttggttaactatcatatttttcatacacttctctggatttaaaatatcttgaggtattttgccactggcttcatgctggagtaatgggtaacatatctttggtatggttgccttagattaacttacctagtcagacccagaagaacttcttttactagcttgcttcctaaatgccttttttcctctccttttggtctccaaatggcctggtcagcttttggtaatattcttcctcatcttccacctagcttgagaaggatgttctccatatagagtttagcgagtgcctaatccctccttttgtaagattttgttccctcagcttgaggaacaacttcatcttcaactttttatttctccctgatgttacagtttggtagatttcaaactggaatagctagcatgtgcttgctaaataattttatgccagccttatcctgtatcctagctgttcttaacagcaggtacaaaaatgcctgtttttcagcaaggttgaaattgggaatgtccttttgaatcagaagaaaataggccatagactcatctcccagcacaaatgggcattctatgaaatggtactggccctaggaggatttcctcaaccactctcctactcttggccttgaacctacctctgggttggatcttactattgtagctgctcactataccctcctgcatgcttagaataatgctttgagggga

SEQ ID NO: 184418 - DNA, 1281 bp, Homo Sapiens
ttggggtagcggagccggcgccgccgccatgttgggtctgaagcggctgctgtaggcgccgacggagcgagcgggcgtgcggagcgggcgacagtggcgtgggatctgcctctctgcgagcagctgggagcggcggcggcggcgccatgagcgggggcaccccttacatcggcagcaagatcagcctcatctccaaggcggagatccgctacgagggcatcctctacaccatcgacaccgaaaactccaccgtagcccttgccaaagttcgatcctttggtacagaagacagaccgacagatcgtccaataccacctcgagatgaagtctttgaatacattatattccgtgggagtgacattaaagaccttactgtttgtgagccaccaaaaccacagtgttctttgcctcaagacccagctattgttcagtcctcactaggctcatcgacttcttcattccagtccatgggttcttatggacctttcggcaggatgcccacatacagtcagttcagtccgagttccttagttgggcagcagtttggtgctgttggtgttgctggaagctctttgacatcctttggaacagaaacatcaaacagtggtaccttaccccaaagtagtgcggttggttctgcctttacacaggatacaagatctctaaaaacacagttatctcaaggtcgctcaagccctcagttagaccctttgagaaaaagcccaaccatggaacaagcagtgcagaccgcctcagcccacttacctgctccagcagctgttgggagaaggagtcctgtatcaaccaggcctttgccatctgccagccaaaaggcaggagagaatcaggagcacaggcgagctgaagtacacaaagtttcaaggccagaaaatgagcaactcagaaatgataacaagagacaagtagctccaggtgctccttcagctccaaggagagggcgtgggggtcatcggggtggcaggggaagatttggtattcggcgagatgggccaatgaaatttgagaaagactttgactttgaaagtgcaaatgcacaattcaacaaggaagagattgacagagagtttcataataaacttaaattaaaagaagataaacttgagaaacaggagaagcctgtaaatggtgaagataaaggagactcaggagttgatacccaaaacagtgaaggaaatgccgatgaagaagatccacttggacctaattgctattatgacaaaactaaatccttctttgataatatttcttgtgatgacaata

SEQ ID NO: 184419 - DNA, 1230 bp, Homo Sapiens
  misc_feature (418)..(440): n is a, c, g, or t
  misc_feature (613)..(625): n is a, c, g, or t
  misc_feature (702)..(754): n is a, c, g, or t
  misc_feature (1067)..(1119): n is a, c, g, or t
ttgggctgaagaaagaagattaaatgctgaaacatttggaatcccacttcgtccaaaccgtggccgtgggggatacagaggcagaggaggtcttggtttccgtggtggcagagggcgtggtggtggcagaggtggtaccttcactgcccctcgaggatttcgcggtggattcagaggaggtcgtgggggccgggagtttgcggattttgaatataggaaaaccacagcttttggaccctaaaaggtctggattgatcgtactgctttctgaaagaaagacaacaaagttgctgcatagtctacaaacaagtctctgaaaataggtgaatttctagctcttcatggtcctgaacattgatttcagtctttgcaaagaatgaagaagtgaattcgctgtacatttgtcaccagcactggnnnnnnnnnnnnnnnnnnnnnnnccgcttaatttcaaagataaaatgcagttacttttgggggtggaaggctcatcttaaaacatgagcattaaatatatttggaatagcagaaggttaagtaatttcttatgtatagttaaactaaagcagtacttcagtgggacttaacaagtattttttcatcactgaaaggnnnnnnnnnnnnnatcactaaattgtatttggcaattgcaagttgcctgcagatagggccgtgatactgtgttttgagccacagaaggtnnnnnnnnnnnnnnnnnnnnnnnnnnnnnnnnnnnnnnnnnnnnnnnnnnnnnctttttcctcctttcttttggggaatcctgtaatatgaggtagcttatttcgtcaattaattagggtgctggatggtaaagaattttttcagtcaactatgtacacacagtaaatactgtttcttacgcaaaggtaacttttttatatagttgtaaaattccattatattccattgccaaagaaacattaagaactttgtatagctgtataaaaagcaactaattttttaaagaataaacattttaaagtcagcaaacatactgtgtccttgcaaaagttgatgtgctgagcagcagccttatgggtgggtcnnnnnnnnnnnnnnnnnnnnnnnnnnnnnnnnnnnnnnnnnnnnnnnnnnnnnggaacataaatgaagatttgatacattatttcattatctaaaacagattaattattcatgctcattgtaagaacttcattttgtaccaaatggcatatcacaggatctgtc

SEQ ID NO: 184420 - DNA, 1657 bp, Homo Sapiens
  misc_feature (254)..(299): n is a, c, g, or t
  misc_feature (612)..(664): n is a, c, g, or t
  misc_feature (741)..(752): n is a, c, g, or t
  misc_feature (925)..(947): n is a, c, g, or t
ataggaaaacaggttcattgatgcctagttttaaagtcctacaaaaggggggaagattacttatttgaaaatacagctaagtacattctcatctgtgattatttacatttgtatactgaaaatatcgattatctggacagatcctgtgatatgccatttgctacaaaatgaagttcttacaatgagcatgaataattaatcctttttagataatgaaataatgtatcaaatcttcatttatgttccaaacattnnnnnnnnnnnnnnnnnnnnnnnnnnnnnnnnnnnnnnnnnnnnnngacccacccataaggctgctgctcagcacatcaacttctgcaaggacacagtatgtttgctgactttaaaatgtttattctttaaaaaattagttgctttttatacagctatacaaagttcttaatgtttctttggcaatggaatataatggaattttacaactatataaaaaagttacctttgcctaagaaacagtatttactgtgtgtacatagttgactgacaaaattctctaccatccagcaccctaattaattgacgaaataagctacctcatattacaggattccccaaaagaaaggaggaaaaagnnnnnnnnnnnnnnnnnnnnnnnnnnnnnnnnnnnnnnnnnnnnnnnnnnnnnaccttctgtggctcaaaacacagtatcacggccctatctgcaggcaacttgcaattgccaaatacaatttagtgatnnnnnnnnnnnncctttcagtgatgaaaaaatacttgttaagtcccactgaagtactgctttagtttaactatacataagaaattacttaaccttctgctattccaaatatatttaatgctcatgttttaagatgagcgttccacccccaaaagtaactgcattttatctttgaaattaagcggnnnnnnnnnnnnnnnnnnnnnnnccagtgctggtgacaaatgtacagcgaattcacttcttcattctttgcaaagactgaaatcaatgttcaggaccatgaagagctagaaattcacctattttcagagacttgtttgtagactatgcagcaactttgttgtctttctttcagaaagcagtacgatcaatccagaccttttagggtccaaaagctgtggttttcctatattcaaaatccgcaaactcccggcccccacgacctcctctgaatccaccgcgaaatcctcgaggggcagtgaaggtaccacctctgccaccaccacgccctctgccaccacggaaaccaagacctcctctgcctctgtatcccccacggccacggtttggacgaagtgggattccaaatgtttcagcatttaatcttctttcttcagcccaggttggtctccgttctctattgtcatcacaagaaatattatcaaagaaggatttagttttgtcataatagcaattaggtccaagtggatcttcttcatcggcatttccttcactgttttgggtatcaactcctgagtctcctttatcttcaccatttacaggcttctcctgtttctcaagtttatcttctaagaacaaaagcacatatcagaaaagtcaagacagctaatctgaattacataaaaacacctaatctgagaaacatctgtaattcacagatcaaataagatccaa

SEQ ID NO: 184421 - DNA, 1255 bp, Homo Sapiens
  misc_feature (194)..(205): n is a, c, g, or t
  misc_feature (282)..(330): n is a, c, g, or t
ttgggttttttgtttgtttttccgcttaatttcaaagataaaatgcagttacttttgggggtggaaggctcatcttaaaacatgagcattaaatatatttggaatagcagaaggttaagtaatttcttatgtatagttaaactaaagcagtacttcagtgggacttaacaagtattttttcatcactgaaaggnnnnnnnnnnnnatcactaaattgtatttggcaattgcaagttgcctgcagatagggccgtgatactgtgttttgagccacagaaggtnnnnnnnnnnnnnnnnnnnnnnnnnnnnnnnnnnnnnnnnnnnnnnnnnctttttcctcctttcttttggggaatcctgtaatatgaggtagcttatttcgtcaattaattagggtgctggatggtagagaattttgtcagtcaactatgtacacacagtaaatactgtttcttaggcaaaggtaacttttttatatagttgtaaaattccattatattccattgccaaagaaacattaagaactttgtatagctgtataaaaagcaactaattttttaaagaataaacattttaaagtcagcaaacatactgtgtccttgcagaagttgatgtgctgagcagcagccttatgggtgggtctctttttcttagttttccaggcttaacatttttgattttgttttttaatgtttggaacataaatgaagatttgatacattatttcattatctaaaaaggattaattattcatgctcattgtaagaacttcattttgtagcaaatggcatatcacaggatctgtccagataatcgatattttcagtatacaaatgtaaataatcacagatgagaatgtacttagctgtattttcaaataagtaatcttccccccttttgtaggactttaaaactaggcatcaatgaacctgtttttcctattatgcctggaatttagtcatgataccttgactcattccatcatatttcaagaggattcagagtgctagaaattattttggtagcctgtaacacacggcaacactggtccttgggcctatgacccacaaatgactcagtatagagttcattgctaattataaattactagtgaatctttttgatattttaagctctaatgggaaaaatctggccacttttgtgtttttatgaaggccatggaaataaaaggatccaaaatataaatatttttatctaaaattttgattgttttcttaactttctccctaaaaac

SEQ ID NO: 184422 - DNA, 1108 bp, Homo Sapiens
  misc_feature (842)..(864): n is a, c, g, or t
  misc_feature (1036)..(1047): n is a, c, g, or t
ttgccaactttgtacaaaaaagttggctcagaaatgataacaagagacaagtagctccaggtgctccttcagctccaaggagagggcgtgggggtcatcggggtggcaggggaagatttggtattcggcgagatgggccaatgaaatttgagaaagactttgactttgaaagtgcaaatgcacaattcaacaaggaagagattgacagagagtttcataataaacttaaattaaaagaagataaacttgagaaacaggagaagcctgtaaatggtgaagataaaggagactcaggagttgatacccaaaacagtgaaggaaatgccgatgaagaagatccacttggacctaattgctattatgacaaaactaaatccttctttgataatatttcttgtgatgacaatagagaacggagaccaacctgggctgaagaaagaagattaaatgctgaaacatttggaatcccacttcgtccaaaccgtggccgtgggggatacagaggcagaggaggtcttggtttccgtggtggcagagggcgtggtggtggcagaggtggtaccttcactgcccctcgaggatttcgcggtggattcagaggaggtcgtgggggccgggagtttgcggattttgaatataggaaaaccacagcttttggaccctaaaaggtctggattgatcgtactgctttctgaaagaaagacaacaaagttgctgcatagtctacaaacaagtctctgaaaataggtgaatttctagctcttcatggtcctgaacattgatttcagtctttgcaaagaatgaagaagtgaattcgctgtacatttgtcaccagcactggnnnnnnnnnnnnnnnnnnnnnnnccgcttaatttcaaagataaaatgcagttacttttgggggtggaaggctcatcttaaaacatgagcattaaatatatttggaatagcagaaattaagtaatttcttatgtatagttaaactaaagcagtacttcagtgggacttaacaagtattttttcatcactgaaaggnnnnnnnnnnnnatcactaaattgtatttggcaattgcaagttgcctgcagataggccgtgatactgtgtttt

SEQ ID NO: 184423 - DNA, 1273 bp, Homo Sapiens
ttggagcattctgtgaagaaggcagtacattttgggttaccgagagcttttgctgggaagacggcaaacaagctgatggatgccctaaaggactccgacctcctgcactggaaacacagcctgtcagagctcatcgatatcagcatcgcacagaaaacggccatctggaggctgtatggccgcagcaccatggcactgcaacaggcccagatgttgctgagcatgaacagcctggaggcggtgaatgcgggcgtgcagcagaacaacacagagtcctttgctgtcgcactctgccacctcgcagagctacacgcggagcagggctgttttgctgcagcttctgaagtgttaaagcacttgaaggaacgatttccgcctaatagtcagcacgcccagttatggatgctatgtgatcaaaaaatacagtttgacagagcaatgaatgatggcaaatatcatttggctgattcacttgttacaggaatcacagctctcaatagcatagagggtgtttataggaaagcggttgtattacaagctcagaaccaaatgtcagaggcacataagcttttacaaaaattgttggttcattgtcagaaactgaagaacacagaaatggtgatcagtgtcctactgtccgtggcagagctgtactggcgatcttcctcccctaccatcgcgctgcccatgctcctgcaggctctggccctctccaaggagtaccggttacagtacttggcctctgaaacagtgctgaacttggcttttgcgcagctcattcttggaatcccagaacaggccttaagtcttctccacatggccatcgagcccatcttggctgacggggctatcctggacaaaggtcgtgccatgttcttagtggccaagtgccaggtggcttcagcagcttcctacgatcagccgaagaaagcagaagctctggaggctgccatcgagaacctcaatgaagccaagaactattttgcaaaggttgactgcaaagagcgcatcagggacgtcgtttacttccaggccagactctaccataccctggggaagacccaggagaggaaccggtgtgcgatgctcttccggcagctgcatcaggagctgccctctcatggggtacccttgataaaccatctctagagaggacatccctgctgggctgctgtgcagagtataagattttggacttgttcatgtcccctctctccctataaatgatgtatttgtgacaccctatcttgtcaataaacagcattctgattaa

SEQ ID NO: 184424 - DNA, 4171 bp, Homo Sapiens
  misc_feature (898)..(910): n is a, c, g, or t
  misc_feature (2638)..(2711): n is a, c, g, or t
ttggcatgccaccagtgatggcagctgccctctcgcggcatggaatacggagcccggggatcctgcccgtcatccagccggtggtggtgcagcccgtcccctttatgtacacaagtcacctccagcagcctctcatggtctccttatcggaggagatggaaaattccagtagtagcatgcaagtacctgtaattgaatcatatgagaagcctatatcacagaaaaaaattaaaatagaacctgggatcgaaccacagaggacagattattatcctgaagaaatgtcaccccccttaatgaactcagtgtcccccccgcaagcattgttgcaagagaatcacccttcggtcatcgtgcagcctgggaagagacctttacctgtggaatccccggatactcaaaggaagcggaggatacacagatgtgattatgatggatgcaacaaagtgtacactaaaagctcccacttgaaagcacacagaagaacacacacaggagaaaaaccctacaaatgtacatgggaagggtgcacatggaagtttgctcggtctgatgaactaacaagacatttccgaaaacatactggaatcaaacctttccagtgcccggactgtgaccgcagcttctcccgttctgaccatcttgccctccataggaaacgccacatgctagtctgattgcctctgtgtcctgcctcagcgtgactccccactcacctggctctctctctgtcctgcctcccattatctaacacattttttacatgtacattttaatttgattcagctggtctgaatctctgaatttatatcatccaaaacttccatatggtcagtagtagatgttctctaatcctccctctccttaccacgggtcagacctaaagaatgtgaacacnnnnnnnnnnnnnctggggatgctaagcaaacccttcttacagatacgtttaatgtaataagaacaagggaacatgtaaactaacataaccaattgtcagttctccatgtattcctcaaaagaatgtcagagtaaatgtattagaaatacagtatccagactgctagtccttgccagagacattcttacctctgccctgtgataatattttatgcttgacagtgaaaacaagtgtggccccttgcaccggttagctagaagtacagccagatttcaagctagtgcagtcacctcttccgtcattcttcacaaatcttgtcaacctggatcttagacttcatctgaatcgagttctttgccctcctttgtgcctgcagctcatatggaggtctttgccaccaatgggagatgagcccaaactttcgatctaggtgggtgatgtgtagcagttcaagggaagggtgctgtgttttcatagcatggagtcggaggagagggccatttagcagggggagcagaagaggcaattcctcctgggctaggggttgtcaatgaggtttcaacattttgttagctgtgtgcagcattcccagagcttcagtctctgtgcatactcagctttgtagaaccatgctgcaaagccatataccgatggggttatccatgcaactatctccattcctacaatgtccttaatatgagatcatcaaacattgatagtagggactccatggaatatttgcccagtaatggtaagaaatctttcgggtaagagtatggatggttcttcttttacccaatctgcttatagctttttttgtaaacagggaaatgttgagtggtacttgtattcccttatcaaattaatcacatagcttttatacagaaactcttcctgtgtgagctgttaaggtgccaaattggctgtcatttgtattcatgacacataccataaagcatctgctaatgctttaatggattgattcaattaagacctgagtgacactatttgtaaatataactagttgtgaagcacacatacctttattttgggaatttatgagaaaatatagaaaaccacagatcagggattcatatatgtagctcaaaaattcccaaaagtttactgttagagttggcaatttcctatcactatttcagtgtcagaacaaactgaaaataatggctcgtgtttatgttgaagataaatagcaccattattgggggaagttattcaaaagcaggcttttgagcaccatagtctaaatgccaataaaaataattcatacatagaaatgtcattggtcctgaatttgaagaaagtgagcaacagtagttaaatgtgggtgcatataaccaaattccccttcatcaagaatggaggagaagagagaagaatgaaatcctgaagattcatcccagccgcaactcaggatccaacacaactttaactgggaggaatacattgtttgatcatttttaaaacatctgtgaatgagtgattccggaggcctgtgaattgtgtggggagcttgctttgatggcactgtgttaataaaagttgtagggactgtgcacctaagaggctaagaggtcccactcatccgccctgtgaaccagctgtaaagaaatgtagttaagaaatgcaaagaaatgtgttatcttggcacttgggtttgattttcctttttttaaagcactgcaaaacttctttaggatactaaaacatcctaattgggcnnnnnnnnnnnnnnnnnnnnnnnnnnnnnnnnnnnnnnnnnnnnnnnnnnnnnnnnnnnnnnnnnnnnnnnnnngcaactatgacatgaattgagtgataaaatggctctttgaaaagtagatattgtctgtattgtaaatgcttagtcatattcatggcaaagtgttcatttcttgagatggttctttcacaacacacaagaatcaagatggaacgcaaggaaaatctttttgttttgaccgaggtaaccagtttatgtgtgttccaatccatagagaagtgggggaaagggcgagaaaggatcagattgatctgggatcagctttgagcctgagttcagtgaatagcctcatgggcatctcatggaattgatgcatttgctgtggcatatttaaattttgttcaaaagatttgaagcaagaccttgcaaagactcttaacattactgttcagcttgcttagattgtgttaacagttcatttaacaaagatccgttttaactctgaacaaaagcaacccagagcggccattctctattcccatgctggtcaatacgctttcattaccaattggcccttaccaaacttttcttatatatatatttgtattttactatgatagttgagaaatttagcctcttagtcatttttagctgttattgtggaagacctcaaatacaagattagatgcccttgaacatgttttaatgatgtgtgtcatgttactatcaatggtgatttcaatcgcaatattttaaattgatgagaatgatttgtaaacatgaagttactattacgtaaattctgtttgttatagagtttcttcagttgttacccaagtgtcatcctagagaagtcagaagaatcagaatccatcgtattttagagttatgtgaatctacatcataaatgggcattaacattctaaattgcttggtttggagaatgtgttagcagcatagctatattcaactagggagatgctaaatacacagaagtttcaagagccttggaacagaattacaggggaactatatatgtatatgtatattttattaaacacccatctgcactatcagtattgcactaatgtggaatttgaaagactattttgctgatactgtatatatgcgcatcattcctgattagattgttgtaaagacaatctgaaagatctaaggttttaaaataatttggtttgaaaatatacagttgtcttgaaggaattgctgtcatacatgaagttgctccgagctgtctttattctcttcttggtcaaggttaacaattgctaaatgatcgcaaattcacctaaacaatacatttacaaagccatctttacatgcattaaacgaggctacaacaatattgttttacaaatactagcacttttttttctgttatgtacttagtgttagagggtcaaaataatctttctgcttaacatctcttaaaccatacctgcaaatatagcaggattattacatttacagtactttaatacttgtataacctatgcagaaatttttaataa

SEQ ID NO: 184425 - DNA, 1461 bp, Homo Sapiens
tttctctgactcttgaaatccctggtatgggtgtaggcaactgcactgcaatgaagtccgcaggagaggaaggtctctcctcccccgaaagctatcccaggtcacatgcgtggcgaatgcccactgaacctcggctctcatggaagcaggaaagacaccgagattcaagccttctagtaggttgaggacgctgtgctcatggcatcttcggagattttggtactggcagggtggatgcttgcaaaatacttgacatcgctgtcacggtccatctgaagagccatgatggtctgctccacagcctcctggtggcagctggcagaggccaagaaatagtctttttctagtagagtttgtcttaatgtctttgcaagcagcactcgcacgttaggaaccctgtcatttgctaaggttagcagatgcggcatgagatgcacagcaaactggtccatgggaaggcagtcatcctcaatgacagtctggcagacaaagacaaaggcttgccgaccagaccacttgggacatctgccaaagttctccacaagctcattgatgaggtccactccgaacgttggtggtgttgccgcgtgcagcttcttcaccatctcgctgaccaacttgtaggaaatccaacgaacagaagaaactttgtctgcacacagattcagagcaatgggacgtaaatagtcataaacatctctgggactatataactctagaagtaaaatcagctgttcagccagttcagctcgaaaccgccaatttctactattatctgtcaccaaaaactcctgaagttgataaagatattctcttcttttgtcaatatgaagaagcttcagaaaatcatgcaagtgtttaagaacacctatcctgacttcatcgaggtcttttaaaaatccattaaaaattggaaccagatctgcagctgtcaattgatctccaagaataactgcaagctcgtggatggagaatgctagagttcgtcgaactttccactgcatgtctgaggccagagtctcatacgtctctctcaggcagtgccaattctgtcttccgagtgtcaaggccacaccagggaggctatatgcacagtgcttagcaatttcagtgtcaaccgtctgtgcacgagaagggtcagtcatagataaatactgatctaacaacgcctgaggtacaacatcttgtactttagttctcctttcctcatcagggctaaaactgctattgttgctcaagtctgaatcgctgtgaatatagtgaagagtggagtccatattcctcacactccagagtccagataatgtcactggccctccgcaacatggcctcaagtcccgatcttctgctcagaatactgtgttgcttgctgcagtgaaatggtccgatcagaaacaaagcacctctcaacagcatcgctgattaaaggcacagaatcttctccaacttttttgtacaaag

SEQ ID NO: 184426 - DNA, 1566 bp, Homo Sapiens
ctttgtacaaaaaagttggcccaggaggacggggaataaaaaaggtggaggatcctggctaccactctgaatccgataccgcttctcttagacctcagcgacagaaaaagggaagggtgtctcatcccccttcctcctctcctccctgtcctgagccttagccatggccgaggcaggggctgggctgagcgagaccgtcactgagacaacggttaccgtgacaaccgagcccgagaaccggagccttaccatcaaacttcggaaacggaagccagagaaaaaggtagaatggacaagtgacactgtggacaatgaacacatgggccgccgctcatccaaatgctgctgtatttatgagaaacctcgggcctttggcgagagctccacggaaagtgatgaggaggaagaagagggctgtggtcatacacactgtgtacgtggccaccgcaaaggacggcgtcgtgcaaccctaggaccgacccccaccacccctccccagcctcctgacccttcccagccccctccagggccaatgcagcactaaatccctctctcctccagcattcctgtgtctgtctggccctaaatgtatccatgtggctacttctccagccccctccttccctctcttctgcctgatagagggaagaggaagaggaggacgaacagagatcctgaaattctgacttgctgctattccagaacccagcctcctgggtttccccagtcctcatttttcctcccaatacccacccttctctctcgagggatctaggcaccttggtcccagtgtcttccttttgttctcactgccaaactgcctgtcctgggatctagttatcttggccctgcactctcaacatgagtagcgaacacttaaattgggttttcaacagtcccagctttcactgccagggtcccagtcagattccaggaatttgcgccctaactttgcttgctaatcctggtttagagctatcccactaaaatatttaatcctaattcttagtccttgcctgtgagatatgaggtcttacaggagacctcagagctcccagcccttctcctcctgctaacccttctcacaccctcaagaggagttagaaaagaggtccttgtcattctcacctcttatggaaaatggaataagaaataatcatatcctttcttcccacccttctcctgttatttaggatttctgacaaagctggcttgagattggtcacttagagccgactgtctcctctgccttttgtttttcagcttcagagacagatccaatatagtcccagggacctgggtctctgggagaggaaggaagagggagggagcaaagagattggggtatgtcccctgtagtacactcttacctcttacttcctagactttgatttctccggcagcccagatgttcagttctcttggcccctctctaccccttactgggatctggttttcattttccggtccttttgccatacacagttacagagatcagtcaaatccataccaccactgagatctcatttattgccacagatgcacaaaaataaataacccaaaatc

SEQ ID NO: 184427 - DNA, 1322 bp, Homo Sapiens
tctctggggtgcagtcggtgaaaaggggcactagcaggggcacgttgtcaatgttctgcaggtggggcccgcacttggtggataccccggggcagcttggcccggttggagtcctccaggaagctggggatgtcgctgtccgtaggctggaagctgatgaggtccgagtggccctcctcctccatgaggaggagcccttctgcatcatctcgggacacctgattcaggtcatcatgcagggagcctgcgtggctggggctggagggggggatctcggagccaggcatgtcaccattgggtgtgagggagatgtggcagttccagcctgtctccaggcccattttttctgcaaacaccttgcttttgagctcatcctccaaagagaagtagacaaagcggatgcaggcgttgacaagcccatcaatgaggcgcacgatgtccagccgggcctggtactgggaggacaccatgcccatgaagatctggccgctcagggcctgcatgcagtcttccttctccagcacctccccgatcccttcgtcagagctccagctgctgcggcgggcgttctgcttgatggggatggtgctgggcagctcgcacatggtgaagatgctgctttggccgggcacctgtaccagctcgatgcacttgccattgagctgagaggacagggcgcagttcatgggcttgtaggcgaaggcagagcaatacccagacaggcaggctcgctggtagaagtccagcactttctttctgtcagatcccgagagagggtagatgtcagctccgtcccagaagtctgtgcaggcctctaagaccacatcagcggtgccatgggacagcatctgctctgtgcctgggggagagagttcaaaccctgagtgtcgctaaccagccccctcacgctgacctgacaggcaacgcactgtcctcctggagaagggcgctgaggagcccctgccagaggaggagactccctgggactcacggacagcaaggctctgcaatgccactgggcttggaatgcagacaccatattcccatcctttggacaatcccggcctctgcagccaacaccatcccagccctggtccccaattccagccctgccagagtggaacacttggaagcagtctacttttcatctgcccaggcctccctagcaatgggtggggctgggcagagcccccctgccaagctctggaaggtctcgcctggtgctggccaacgtagccagggctcactggtggtggtgtctttaatgaagaggctgatcatgtggctgaggggaggccgccgcttggtgacacaggagccaa

SEQ ID NO: 184428 - DNA, 2483 bp, Homo Sapiens
gattcccccaagatgacaggcagcccagcttgagcccaggcacaggaagaggctcagggcgaagcgggggccctgcctccatcttcaggttcaggcgggagactcccccacagagggagggaggggaggcactcggggccacatccaggcaagcaccacccccctgccctccacggcagccttgggagttggacgcgtcggccaaggctgctgctgttgctcctccaaagaaggttggcttcaaggccgtgtccagggacccacgagcagaggcactggggggcaagggatctccaagggggcaagggatccctaaagggggtagctcacaggtgagggggtttagggcccctctagggagcgcctgaggccatacattcaagagtgtccctggtgaggcccagggaagagccaggactggccaagggcccaggccgtcagctcctccacagtgagccccagggctcaggaagacagcggggtctgacacggggagctgggtttccagtgccacgggtgcaggagcaaacctggaaacattcatgatacaaactcccctgttcagaaatgggtctggctttagccccagggacgggggcaactacagccaccacagccagtggctcagaagggagagttcatgcccagcttagtttcaaactgcagcttctgtcgcttctggtagcggactcggacccgaatctcatgtagcttcacgatctcattggtcaccaccacaaggaccagggacaggcagcccaggagccatgtcagcaggggcacgtcctccaggccaaagtggacgtggctgtccctgtgtgtccacagctgcaggtccacagccgtctggaccacctgacccagcagcaccacaggcactgtcacggcccaccagaggttggtcaaggggctctttctccacaggggcttggtgcgatgcacatgggtgatggaaatgaagacagtgtgcaggacaatcagggcggccgtgagcttctgagccgacagcagtccattggcaaagtcctcaaaccaggctggagccctgtcgtcgttgctgggcagcatgacggaggagcagttggtgaggttgcggtcccgggagctgtcacagaagctctgcagtgtgaagccaaagcagatgaggcaggagctgatggtgaggctgaacttgagcaggaagcagagcaggaagtagtgctgggtcttcttgggaatggactggaggtttttccccgttgccatagacatgatggagctatgggggggcttccccagcagagagatgctgagcagagggtagcaaaagcaggacagccacaggatgtcggtggtactcaggagtggcggcagctggaccaggcaagaaaggaactgttcgataagccggatgatgctgatggtctcctcctggcgaaaggtcagggaacagggcaggctgttgagctgccctgacagctgcaggggagaaaggccatccgaggcctgggccatgctgatgctggtggcgtagccaaaggtctcccaggagcaacgggatgggtacaggggatccagggcaatgctgatgtcgctctggaggaagaggcagctgttccgcaggttggcagagctgcccaggcagcaggtcacctccccgtactcttgcatgatctttatcatctcacacatggtctctggggtgcagtcggtgaaaaggggcactagcaggggcacgttgtcaatgttctgcaggtggggccgcacttggtggataccccggggcagcttggcctggagaaagcagagatgccagcggcttcgggatggggatcagcatccctcccctccaccgcctgcccaccacctctctacctctcccctggaccagctatgggaccactacaggaacacgtgagacagatcctgccatcgtacccggttggagtcctccaggaagctggggatgtcgctgtccgtaggctggaagctgatgaggtccgagtggccctcctcctccatgaggaggagcccttctgcatcatctcgggacacctgattcaggtcatcatgcagggagcctgcgtggctggggctggagggggggatctcggagccaggcatgtcaccattgggtgtgagggagatgtggcagttccagcctgtctccaggcccattttttctgcaaacaccttgcttttgagctcatcctccaaagagaagtagacaaagcggatgcaggcgttgacaagcccatcaatgaggcgcacgatgtccagccgggcctggtactgggaggacaccatgcccatgaagatctggccgctcagggcctgcatgcagtcttccttctccagcacctccccgatcccttcttcaggcaggacacacaggacacagcccgatcaggacacccaggaaccagcccagggccacacacacagatgccacacccaaatcaatgagcatatgggccccaggggaccacacacagccaagccaa

SEQ ID NO: 184429 - DNA, 1541 bp, Homo Sapiens
  misc_feature (191)..(211): n is a, c, g, or t
  misc_feature (244)..(253): n is a, c, g, or t
ttactattttcactgagtttacagtgtgggtactactgtttacatcattttaatgaaagtatttataaaaacatctgcaatagttcatatcagaaaacaaagtttctctcaataaagacctttaaaaataaatttttatcttcattaactccctttctgggaatgggaatgaaataacatgcttctgtttnnnnnnnnnnnnnnnnnnnnncacaaaatttaataccctaattaggtttctggnnnnnnnnnngactaccctagcaataatttttaacattctacatttcatctatttctaaagacactccctttacaaaatcttttagttttatatattaggacaatcaggtttagagtctcacataaataaaatagccacattagaaggcatactgaagaatcaaatggttagccacatttgtctgttcacattcacggattctctaagagcgttgtgagagtccatataatactgttcacgtttagtctaagttaatatgtctcatctgacctattgctcctacaacactgatgctatcaacaaaaatcctgattttggggacacagtgatataacaaactggttaaacgagcagaggtaataggacagtaaactgtaactgcacaatttaaaatatccacccttcatccaccactaccatacttcttcccagtggtattaaattctcaaagccaaatcatatcagaggtgcaggatgccaaacactatttgcatagaaaatcagtcttcaagactaaacaaaaaagaaattcataaaattaaactttttgaatagttgcattcgttgctttcaatttcttcatccatatctgttctggtcatacatattttttccttctttttatccagagagattaatacacagattaatacacaaaacttttgtaaatagcattccagttcaaagttgcttgtgatcatagccacgtgtgaaccgttagacaagtgtatgctatgccccaaaatgttttataattcttcagtgcagtttcttactgatgtttcccttaaaattaaggcttaatgaaagagaaatccatagtattatgaactgattttctttagcttctgaattaagtgcactctttccaaaatcaagtggtcctggagtaacgttaagacaacttgtattaatcagtgtcatgactgaagtagtatcttactggaggtcccggcaaatcttcatatccatcaatgtctggagcaaatgacacagtaagatccacatatttcttttcagtagtaggttttacaagtttatgcattgttaacttcaatctttttgcatgaccaggcattacaggaacataaagcattttgactccctgtaccaccattgttggctcaattccatacttctctttgactgcatttatgaaatccaagagggtgaaatcttcttttccatgtacggtccatcgatcccaaattgtaaatgatattccatttctgattttagttttccttacttcagttgtctctgtaggtactacaattgccaacttttttgtacaaag

SEQ ID NO: 184430 - DNA, 960 bp, Homo Sapiens
ttaatgaaagagaaatccatagtattatgaactgatttttttagcttctgaattaagtgcactctttccaaatcaagtggtcctggagtaacgttaagacaactttattaatcagtgtcatgactgaagtagtatcttactggaggtcccggcaaatcttcatctccatcaatgtctggagcaaatgacacagtaagatccacatatttcttttcagtagtaggttttacaagtttatgcattgttaacttcaatctttttgcatgaccaggcattacaggaacataaagcattttgactccctgtaccaccattgttggctcaattccatacttctctttgactgcatttatgaaatccaagagggtgaaatcttcttttccatgtacggtccatcgatcccaaattgtaaatgatattccatttctgattttagttttccttacttcagttgtctctgtaaatactacaattggaatggctaagttaagaaaacaatttttgtaagcttcaaatggatagccaccagttactttgatcatctccaaggcaaccaagccagaaactgtagcagtggttgttgctatagcaggtataattttaccagctatgcgctttgttttgaaacggtcagctggttcaatgctgtacattttggcacgaagatttgatgcagctgtgatgaaatctatgtgtccattatgatcatcatctttttcaaatgaaagcactgccatctgaaggtcacttttggtggcttcattagataaaatagccttttctagttggaaaattgcattcctctcatcttcactgctaataggaacatggtctggtttccttgcagtttcatctgtttgaacaaccttattggaaggcttgaattcctgaatctttacttctgaaagaatattcaagagggcatctgctgataagtcctcttctgcaaatggaatccaa

SEQ ID NO: 184431 - DNA, 1415 bp, Homo Sapiens
  misc_feature (1105)..(1164): n is a, c, g, or t
ttggagcctttcgccaaagatccggaaaagcaaaagcgatacgacgagttcttagtacacatgaaacagggtcagaaagatgctctggaacgctgtctggaccccagcatgacagagtgggagcgaggccgtgagcgggatgagtttgcccgggcggccctgctgtacgcatcttcccattcgaccttgtcctccaggttcactcacgccaaggaggaggatgactcagatcaggttgaagtccctcgagaccaagagaatgatgtcggggataagcagtcggctgtgaagatgaagatgtttgggaagctcacccgagacacgtttgagtggcaccctgacaagcttctatgtaagagatttaatgtccctgacccttatccagattcaactttagttggcttaccaagagtgaagcgtgacaagtactcagtcttcaactttctgacgctcccagagacagcttccttgcccaccactcaagcatcaagtgaaaaagtatcacagcaccgaggtcccgacaaatcaagaaaaccatccagatgggatacctctaaacacgaaaagaaagaagattccattagtgaatttttaagtttggctagatcaaaagccgagccacctaaacaacagtccagccccttagtaaacaaagaggaagagcgtgcaccagaatcatccgcaaatcagaccgtcaacaaagatgtggacgcacaggctgaaggagaagggagccgcccatccatggacttattcagggccatctttgccagttcctcagatgaaaagtcctcatcctccgaggatgagcaaggtgacagtgaagatgatcaggcaggctctggggaggccaacttccaaagctcccaagacactgacttgggggaaacatcatctgtggctcacgctcttgtgccagcaccccaggagccgccaccttccttcccgatacaaaagatgcagatagatgaaagagaagagttcggcccgcggctgcctcccgtcttctgccccaatgctcgtcagacacttgaggttcctcaaaaagagaaacataaaaagaacaaagacaagcacaaggccaagaaagagcacaggcggaagnnnnnnnnnnnnnnnnnnnnnnnnnnnnnnnnnnnnnnnnnnnnnnnnnnnnnnnnnnnnccagagaaaagtagtagctccgagagttccgacagcagtgacagccagagtgacgaggaaaccgcagacgtgtcgcccagggagctgctgagacggctgaaaagtcttccactaagaaggcagtaattgaatgctgccctggctcgtcctagaatcatttctcctccatgatggaagcccagtgattgttcagttaacgcattgtacagagtgtatttatatgtaaattcctgctgtaaataatttttaaa

SEQ ID NO: 184432 - DNA, 2045 bp, Homo Sapiens
ttggcgaagatggcgtcgcccggctgcctgtggctcttggctgtggctctcctgccatggacctgcgcttctcgggcgctgcagcatctggacccgccggcgccgctgccgttggtgatctggcatgggatgggagacagctgttgcaatcccttaagcatgggtgctattaaaaaaatggtggagaagaaaatacctggaatttacgtcttatctttagagattgggaagaccctgatggaggacgtggagaacagcttcttcttgaatgtcaattcccaagtaacaacagtgtgtcaggcacttgctaaggatcctaaattgcagcaaggctacaatgctatgggattctcccagggaggccaatttctgagggcagtggctcagagatgcccttcacctcccatgatcaatctgatctcggttgggggacaacatcaaggtgtttttggactccctcgatgcccaggagagagctctcacatctgtgacttcatccgaaaaacactgaatgctggggcgtactccaaagttgttcaggaacgcctcgtgcaagccgaatactggcatgaccccataaaggaggatgtgtatcgcaaccacagcatcttcttggcagatataaatcaggagcggggtatcaatgagtcctacaagaaaaacctgatggccctgaagaagtttgtgatggtgaaattcctcaatgattccattgtggaccctgtagattcggagtggtttggattttacagaagtggccaagccaaggaaaccattcccttacaggagacctccctgtacacacaggaccgcctggggctaaaggaaatggacaatgcaggacagctagtgtttctggctacagaaggggaccatcttcagttgtctgaagaatggttttatgcccacatcataccattccttggatgaaacccgtatagttcacaatagagctcagggagcccctaactcttccaaaccacatgggagacagtttccttcatgcccaagcctgagctcagatccagcttgcaactaatccttctatcatctaacatgccctacttggaaagatctaagatctgaatcttatcctttgccatcttctgttaccatatggtgttgaatgcaagtttaattaccatggagattgttttacaaacttttgatgtggtcaagttcagttttagaaaagggagtctgttccagatcagggccagaactgtgcccaggcccaaaggagacaactaactaaagtagtgagatagattctaagggcaaacatttttccaagtcttgccatatttcaagcaaagaggtgcccaggcctgaggtactcacataaatgctttgttttgctggtgatttaaccagtgcttggaaaaatcttgcttggctatttctgcatcatttcttaaggctgccttcctctctgagtacgttgccctctgtgctatcaatcatcttatcatcaattattagacaaatcccactggcctacagtcttgcttctgcagcacccactttgtctcctcaggtagtgatgaattagttgctgtcacaaaaggagggaagtagcacccaaattaaattgcttaagagaggaaatgtacatcttgtataacttagggagcgaagaaaatgtaggcgcgaaagtgaaaagtgaggcagctagttcttcctattccattctcgaccaacctgccctttcttaatatgactagtggtcttgatgctagagtcaacttactctgttgctggctttagcagagaataggaggaaccatatgaaaaagatcaggctttctgacttccatccccaaaacacatttaccagcatactccaaactgtttctgatgtgttccatgagaaaaggattgtttgctcaaaaagcttggaaaatactacacactccctttctccttctggagatcaacccacattagagtgtctaaggactcctgagaattcctgttacagtaaacaaaactaacgtaatctaccatttcctaccactatttgagcatggaaatcatagtccccc

SEQ ID NO: 184433 - DNA, 1155 bp, Homo Sapiens
ttggcaagtttaattaccatggagattgttttacaaacttttgatgtggtcaagttcagttttagaaaagggagtctgttccagatcagtgccagaactgtgcccaggcccaaaggagacaactaactaaagtagtgagatagattctaagggcaaacatttttccaagtcttgccatatttcaagcaaagaggtgcccaggcctgaggtactcacataaatgctttgttttgctggtgatttaaccagtgcttggaaaaatcttgcttggctatttctgcatcatttcttaaggctgccttcctctctcagtacgttgccctctgtgctatcatcttatcatcaattattagacaaatcccactggcctacagtcttgcttctgcagcacccactttgtctcctcaggtagtgatgaattagttgctgtcacaaaaggagggaagtagcacccaaattaaattgcttaagagaggaaatgtacatcttgtataacttagggagcgaagaaaatgtaggcgcgaaagtgaaaagtgaggcagctagttcttcctattccattctcgaccaacctgccctttcttaatatgactagtggtcttgatgctagagtcaacttactctgttgctggctttagcagagaataggaggaaccatatgaaaaagatcaggctttctgacttccatccccaaaacacatttaccagcatactccaaactgtttctgatgtgttccatgagaaaaggattgtttgctcaaaaagcttggaaaatactacacactccctttctccttctggagatcaacccacattagagtgtctaaggactcctgagaattcctgttacagtaaacaaaactaacgtaatctaccatttcctacactatttgagcatggaaatcatagtccccactctgtgaaaacttaacgctttttggaagacatttctgtagcatgtcagtttggagaaatgatgagctacgccttgatgaaagaaccgtgttggtgctgctaagtttagccattatggtttttcctttctctctcttaagccttattcttcaactaaaagatgaaggattaagagcaagaagttggggggggatgtgaaaataattttatgaggttgtctaaaatacagagtagtttctt

SEQ ID NO: 184434 - DNA, 1404 bp, Homo Sapiens
  misc_feature (511)..(581): n is a, c, g, or t
  misc_feature (844)..(856): n is a, c, g, or t
  misc_feature (967)..(995): n is a, c, g, or t
  misc_feature (1133)..(1145): n is a, c, g, or t
ttggctccatctcccatcacacatcctttataacagactgaagttggcagagaacagaatgatttatttttagggtaaatggaagtttgttctcagcctcttggtttcacttactgtttaaaaccattgttttgcagctatcagttgagggatttgcagttgataaaatggctggagaggttaaggctttcttcgagagtcacccagctccttcagctgagcgtaccatccagcagtgttgtgaaaatattctgctgaatgctgcctggctaaagcgagatgctgagagcatccaccagtacctccttcagcggaaggcctcaccacccacagtgtgaatcctgaggtgccgccattggcggttctgctgcttcgctgcagggataaggtggagctaccgaacagctgattcatatgccaagaatttggagtcttctttcaaaccagtgggggttggacaatgaatgtagttaactggttcctgctcacactccagaattaaattctattnnnnnnnnnnnnnnnnnnnnnnnnnnnnnnnnnnnnnnnnnnnnnnnnnnnnnnnnnnnnnnnnnnnnnnnagagcataacgaaactgtgaaactttctgaagccttgtcagtggttaaaagtatttaacactctactgttaatgacagatgttctgtttttataacctaccaaaaggaaactagaggcttcttggtgaagagcatttttgtgaagtgggttctgcaaggagcctataaagccaagggtggtgtccatttctgggaatggttaaacacaaaaggctgatagctggtatcacatagttggagtcagtgcataattccaagtggcnnnnnnnnnnnnnggcacggggactgatcaggaagatatattcctgcataactcaatctgaaccaaggattgtagtttagttttcctccttgccttcccttctgtgtgaccgaccccttggccnnnnnnnnnnnnnnnnnnnnnnnnnnnnncctaccctgttctggtttttttcctccctttagttccacccccaacccccattccctggtgtccttcttagagatgaagaaataataaggaaacatctttcatagccacattaaataagagaaactgatatacattannnnnnnnnnnnnaaagatgacttataagaaccctgaaatttatataggtgagacaacagaaataaaaagatcttcagccaggcctttctgaaggagttattctgctaaaaatggtcttagttgtctgaaaagccagctcttgaacctcttcacaacagtatcaacactggcttcccccggttcattttatgcgtgcgagaagtcagtggtaactgctgcagggcttaatacattagtggtaactggtttaaaaaacaaagactgtaagcct

SEQ ID NO: 184435 - DNA, 2254 bp, Homo Sapiens
  misc_feature (192)..(212): n is a, c, g, or t
ttggattttgtttatacttttataggttgctgctaaaccttgcctttttataaggactacttcaatgttccttatcctctacctaaaattgatctcattgctattgcagactttgcagctggtaaagtaaatttcattttattgctgaattgtaataactttttaaaattttgtgacttttgatgcaagagnnnnnnnnnnnnnnnnnnnnncaataaatgtttatatttattttgtgaaggtgccatggagaactggggccttgttacttatagggagactgcattgcttattgatccaaaaaattcctgttcttcatcccgccagtgggttgctctggttgtgggacatgaactcgcccatcaatggtttggaaatcttgttactatggaatggtggactcatctttggttaaatgaaggttttgcatcctggattgaatatctgtgtgtagaccactgcttcccagagtatgatatttggactcagtttgtttctgctgattacacccgtgcccaggagcttgacgccttagataacagccatcctattgaagtcagtgtgggccatccatctgaggttgatgagatatttgatgctatatcatatagcaaaggtgcatctgtcatccgaatgctgcatgactacattggggataaggactttaagaaaggaatgaacatgtatttaaccaagttccaacaaaagaatgctgccacagaggatctctgggaaagtttagaaaatgctagtggtaaacctatagcagctgtgatgaatacctggaccaaacaaatgggatttcccctcatttatgtggaagctgaacaggtagaagatgacagattattgaggttgtcccaaaagaagttctgtgctggtgggtcatatgttggtgaagattgtccccagtggatggtccctatcacaatctctactagtgaagaccccaaccaggccaaactaaaaattctaatggacaagccagagatgaatgtggttttgaaaaatgtcaaaccagaccaatgggtgaagttaaacttaggaacagttgggttttatcggacccagtacagctctgccatgctggaaagtttattaccaggcattcgtgacctttctctgccccctgtggatcgacttggattacagaatgacctcttctccttggctcgagctggaatggcattagcactgtagaggttctaaaagtcatggaggcttttgtgaatgagcccaattatactgtatggagcgacctgagctgtaacctggggattctctcaactctcttgtcccacacagacttctatgaggaaatccaggagtttgtgaaagatgtcttttcacctataggggagagactgggctgggaccccaaacctggagaaggtcatctcgatgcactcctgaggggcttggttctgggaaaactaggaaaagcaggacataaggcaacgttagaagaagcccgtcgtcggtttaaggaccacgtggaaggaaaacagattctctccgctgatctgaggagtcctgtctatctgactgttttgaagcatggtgatggcactactttagatattatgttaaaacttcataaacaagcagatatgcaagaagagaaaaaccgaatcgaaagagtccttggcgctactcttttgcctgacctgattcaaaaagtcctcacgtttgcactttcagaagaggtacgtccacaggacactgtatcggtaattggtggagtagctggaggcagcaagcatggtaggaaagctgcttggaaattcataaaggacaactgggaagaactttataaccgataccagggaggattcttaatatccagactaataaagctatcagttgagggatttgcagttgataaaatggctggagaggttaaggctttcttcgagagtcacccagctccttcagctgagcgtaccatccagcagtgttgtgaaaatattctgctgaatgctgcctggctaaagcgagatgctgagagcatccaccagtacctccttcagcggaaggcctcaccacccacagtgtgaatcctgaggtgccgccattggcggttctgctgcttcgctgcagggataaggtggagctaccgaacagctgattcatatgccaagaatttggagtcttctttcaaaccagtgggggttggacaatgaatgtagttaactggttcctgctcacactccagaattaaattctattgaaaaaggaaaatcagcaattcagc

SEQ ID NO: 184436 - DNA, 1412 bp, Homo Sapiens
ttgtttggtccaggtattcatcacagctgctataggtttaccactagcattttctaaactttcccagagatcctctgtggcagcattcttttgttggaacttggttaaatacatgttcattcctttcttaaagtccttatccccaatgtagtcatgcagcattcggatgacagatgcacctttgctatatgatatagcatcaaatatctcatcaacctcagatggatggcccacactgacttcaataggatggctgttatctaaggcgtcaagctcctgggcacgggtgtaatcagcagaaacaaactgagtccaaatatcatactctgggaagcagtggtctacacacagatattcaatccaggatgcaaaaccttcatttaaccaaagatgagtccaccattccatagtaacaagatttccaaaccattgatgggcgagttcatgtcccacaaccagagcaacccactggcgggatgaagaacaggaattttttggatcaataagcaatgcagtctccctataagtaacaaggccccagttctccatggcaccagctgcaaagtctgcaatagcaatgagatcaattttaggtagaggataaggaacattgaagtagtccttataaaaaggcaaggttttagcagcaacctctaacgcaaattttccttgctctgctttgccaacaggagtgtaaacacggacacacacaccatcttttgaccttgtttctacaaagtcatattcacccacaacaaatgccaccagatatgtagacataacaggtgtgcgggcaaacttcacttccactaaattttcatcatcagggtatggtttccggtcaattacattcatgtttgataaagctactctgtctttaggaacaaccaatgagatatcaaaagttgctttgatagcaggctcatcccagcaaggaaaagcccttcgggcatcagtagcttctatagaaacctttcattttgtcattcagctctccaacaaaatctatctttaaggttcccgtacacttttactcggttttaaatctccaaggccatcaaaccataacaagatattgacagtgaccacttccaaaaagtggcatactgtttgcagagtactagggaaagacaaggtgactttttcatcttcattctgatagttaaatcctgtagcatgtatttcttcatctccttctggtgcatatgaagctgtaataatatcaatatcagcacaattcatcacaatctgattagtcgcctgcctcacctgggcggcggcctccagcttgccctcgaaggtgaagtccagcaagtcgggcttgaggcaaaggctgcagttgatgggggagacatcggcaggcagccgctcgaagggcctcttctccggcatcgcggcgaggcccaggctgt

SEQ ID NO: 184437 - DNA, 1159 bp, Homo Sapiens
  misc_feature (339)..(379): n is a, c, g, or t
ttggattgtattcaaagtttggagctaaggcagtcttcggaggtagggctccctgggattcatttctagtaatttaagatacattggcttgcaacaggattcctttgtgggtttcaatatgaattataataacatatttattagatggttattttgtttatacttttataggttgctgctaaaaccttgcctttttataaggactacttcaatgttccttatcctctacctaaaattgatctcattgctattgcagactttgcagctggtaaagtaaatttcattttattgctgaattgtaataactttttaaaattttgtgacttttgatgcaagagnnnnnnnnnnnnnnnnnnnnnnnnnnnnnnnnnnnnnnnnnctcaataaatgtttatatttattttgtgaaggtgccatggagaactgggaccttgttacttatagggagactgcattgcttattgatccaaaaaattcctgttcttcatcccgccagtgggttgctctggttgtgggacatgaacttgcccatcaatggtttggaaatcttgttactatggaatggtggactcatctttggttaaatgaaggttttgcatcctggattgaatatctgtgtgtagaccactgcttcccagagtatgatattggactcagtttgtttctgctgattacacccgtgcccaggagcttgacgccttagataacagccatcctattgaagtcagtgtgggccatccatctgaggttgatgagatatttgatgctatatcatatagcaaaggtgcatctgtcatccgaatgctgcatgactacattggggataaggactttaagaaaggaatgaacatgtatttaaccaagttccaacaaaagaatgctgccgcaggatggacgtggtagaggtcgcgggcagttggtgggcacaagagcgagaggacatcattatgaaatacgaaaagggacaccgagctgggctgccagaggacaaggggcctaagccttttcgaagctacaacaacaacgtcgatcatttggggattgtacatgagacggagctgcctcctctgactgcgcgggaggcgaagcaaatttggcgggagatcagccgaaagagcagtgggtggatatgctgggagactgggagaaatacaaaagc

SEQ ID NO: 184438 - DNA, 1160 bp, Homo Sapiens
ttggctgctttatgccaataacttgttaggttaattctaaggtatttatatttcatattcttttcttaaggctactgatgcccgaagggcttttccttgctgggatgagcctgctatcaaagcaacttttgatatctcattggttgttcctaaagacagagtagctttatcaaacatgaatgtaattgaccggaaaccataccctgatgatgaaaatttagtggaagtgaagtttgcccgcacacctgttacatctacatatctggtggcatttgttgtgggtgaatatgactttgtagaaacaaggtcaaaagatggtgtgtgtgtctgtgtttacactcctgttggcaaagcagaacaaggaaaatttgcattagaggtaaatgtacttgaagaggattgttccagcagtccataactccaggttgctgctaaaaccttgcctttttataaggactacttcaatgttccttatcctctacctaaaattgatctcattgctattgcagactttgcagctggtgccatggagaactgggaccttgttacttatagggagactgcattgcttattgatccaaaaaattcctgttcttcatcccgccagtgggttgctctggttgtgggacatgaacttgcccatcaatggtttggaaatcttgttactatggaatggtggactcatctttggttaaatgaaggttttgcatcctggattgaatatctgtgtgtagaccactgcttcccagagtatgatatttggactcagtttgtttctgctgattacacccgtgcccaggagcttgacgccttagataacagccatcctattgaagtcagtgtgggccatccatctgaggttgatgagatatttgatgctatatcatatagcaaaggtgcatctgtcatccgaatgctgcatgactacattggggataaggactttaagaaaggaatgaacatgtatttaaccaagttccaacaaaagaatgctgccgcaggtaatctttaatagcttgagatagaaatggagagaaagtattgtcactctatccaggctgggacattttatttttgttctgaatacttaactcaaggtcaggatccatgtaataaataaattagccttatttgaagctgtgttcaggttgaatatctct

SEQ ID NO: 184439 - DNA, 1836 bp, Homo Sapiens
  misc_feature (108)..(143): n is a, c, g, or t
  misc_feature (1437)..(1454): n is a, c, g, or t
  misc_feature (1544)..(1584): n is a, c, g, or t
ttggctttcatacatttgggaaagataggaatgactgtttcaaagaagagaggtgcacataatttatgcaggcaagtatgatacttatttcattggttttgtgagtcnnnnnnnnnnnnnnnnnnnnnnnnnnnnnnnnnnnngacttgaaaattaagatttaatactttaatgttttaagtgtggggggtttgggaaggaaggaatgtaatattatggatttagccttaggctttaagttttaggctggcaaaagaaatgttattcagtgggtttgaggtttggactactttcttcaaacttagagaattataacaggatggtgtttactttgttcacctggatgtccccaagactctagcttcttctatcagtggttggtctgatagaagaggtaaaaattgctcttgaaaatgtcctacaatttatgcagtttctttgataatatttttctgtttaaatccctgcttctgtttttggtctgttacctaaatatagttcaagtttaattctgtaagagcaaagaaatgaatttgatgaggaaattaagcatccaatggaggattggtcttgaagaccttaaaggtgctttccaacctgcactgctccagtgaaatgtggtacttttttcttttaaaagcaaccaagagagctgggaatatctgtgtacgcaaagtaattgcattttgtcccttcattttgactttcttagattcataatttgatacagtgcttaaacttccaaggaaattttaaacaattactacattacctgttcaaaataaggcttgttggaaatcctagtccatcaactaatttcaaaaatttatttttgatatgagtagcaacagctggtcatataccctatcccaaaaggaagaactgtcttgaacaagatgaatggaaaattgtggttaattctgaatttcatgtaatgacaacatattctttcataaaactatggcctgtttaagatggaactttgtgtgtgtctgctggggagggtggggtacatgtgtatggcgtgtgttcttgaaatgatgtctctctgaatatccaaaaaagtactgtactgtagaaatgctctttgaaaaagtctatcgactgaccatgatcaatctagcatatgtatgttcagtgggctagccttggtcctcagggacagtgtgtgactctagtggtcttcctaaccagtctcttgcctaaagatatctgggacctctactggctttaatgacaaataatgttatgttgaggttatgcttcctttgttatttgctgattttcctactaaatgtagcatttcaattagatccagctttcacattttgagataattgtaaaaagaatgaaattatgcagaaatggccaatatctcttatcaatctgttcttttggaaaccctcatgtactataaattgtgtacagttaaaaaannnnnnnnnnnnnnnnnntcttacatgagtaaaaagcaccctctcccagcaatcgtatgccattggtatttgaagagaattcccaaataacccattgctgctgctgcnnnnnnnnnnnnnnnnnnnnnnnnnnnnnnnnnnnnnnnnngtgtggtaaactgatatttaaaaaaggaaaggagaaaaatcacgactactgttttacagactgaaaaattattgcttttttatactactgagatcctaagttaagactctccaaggcagaaattttgggttaaaatcattatctgatgtagaaaaaaaggtagagaaaacttgtagtgtttcttcacataattggaaaatgtacacatgcctaagttgtgttgcctcatcaatttgtatattttcctaattt

SEQ ID NO: 184440 - DNA, 1345 bp, Homo Sapiens
  misc_feature (208)..(220): n is a, c, g, or t
ttggctactccaccagaaactagagctccctgacaatgtatccggtgaatttggatggtccttctgcctggcttgtgtctctgctcccttacagttcatggcttctgctctcttcatctgggctgctcacaccaaccggaaagagtacaccttaatgaaggcatatcgtgtggcatgagcaagaaactgcctgctttacaattgccannnnnnnnnnnnnaaaataatactgatattttccccacctctcaattgtttttaatttttatttgtggatataccattttattatgaaaatctattttatttatacacattcaccactaaatacacacttaataccactaaaatttatgtggtttactttaagcgatgccatctttcaaataaactaatctaggtctagacagaaagaaatggatagagacttgacacaaatttatgaaagaaaattgggagtaggaatgtgaccgaaaacaagttgtgctaatgtctgttagacttttcagtaaaactaaagtaactgtatctgttcaactaaaaactctatattagtttctttgggaaacctctcatcgtcaaaactttatgttcactttgctgttgtagatagccagtcaaccagcagtattagtgctgttttcaaagatttaagctctataaaattgggaaattatctaagatcattttccctaagcattgacacatagcttcatctgaggtgagatatggcagctgtttgtatctgcactgtgtctgtctacaaaaagtgaaaaatacagtgtttacttgaaattttaactttgtaactgcaagaattccagttcagccgggcgaggattagtattatttttaactctccgtaagattttcagtaccaccaaattgttttggattttttttctttcctcttcacataccagggttattaaaagtgtgctttctttttacattatattacagttacaaggtaaaattcctcaactgctatttatttattccagcccagtactataaagaacgtttcaccataatgaccctccagagctgggaaacctaccacaagatctaaagttctggctgtccattaacctccaactatggtctttatttcttgtggtaatatgatgtgcctttccttgcctaaatcccttcctggtgtgtatcaacattatttaatgtcttctaattcagtcatttttttataagtatgtctataaacattgaactttaaaaaacttatttatttattccactactgtagcaattgacagattaaaaaaatgtaacttcataatttcttaccataacctcaatgtctttttaaaaaataaaattaaaatga

SEQ ID NO: 184441 - DNA, 1260 bp, Homo Sapiens
  misc_feature (956)..(968): n is a, c, g, or t
agcaatgcttttctataaaagccaactttgtacaaaaaagttggctagagggtgaagctggcggagcaggaggatgggcgtgttgtctgttttagtatgcaggtgatagactagagaacaagacctctgtctccgtagcatcctggagcagtctgaatgccagaatggataaccgttttgctacagcatttgtaattgcttgtgtgcttagcctcatttccaccatctacatggcagcctccattggcacagacttctggtatgaatatcgaagtccagttcaagaaaattccagtgatttgaataaaagcatctgggatgaattcattagtgatgaggcagatgaaaagacttataatgatgcactttttcgatacaatggcacagtgggattgtggagacggtgtatcaccatacccaaaaacatgcattggtatagcccaccagaaaggacagagtcatttgatgtggtcacaaaatgtgtgagtttcacactaactgagcagttcatggagaaatttgttgatcccggaaaccacaatagcgggattgatctccttaggacctatctttggcgttgccagttccttttaccttttgtgagtttaggtttgatgtgctttggggctttgatcggactttgtgcttgcatttgccgaagcttatatcccaccattgccacgggcattctccatctccttgcaggtctgtgtacactgggctcagtaagttgttatgttgctggaattgaactactccaccagaaactagagctccctgacaatgtatccggtgaatttggatggtccttctgcctggcttgtgtctctgctcccttacagttcatggcttctgctctcttcatctgggctgctcacaccaaccggaaagagtacaccttaatgaaggcatatcgtgtggcatgagcaagaaactgcctgctttacaattgccannnnnnnnnnnnnaaaataatactgatattttccccacctctcaattgtttttaatttttatttgtggatataccattttattatgaaaatctattttatttatacacattcaccactaaatacacacttaataccactaaaatttatgtggtttactttaagcgatgccatctttcaaataaactaatctaggtctagacagaaagaaatggatagagacttgacacaaatttatgaaagaaaattgggagtaggaatgtgaccgaaacaagttgtgctaatgtctgttagacttttcagtaaa

SEQ ID NO: 184442 - DNA, 2092 bp, Homo Sapiens
actttgtacaaaaaagttggcgcgactcgctctctttcggttctacctgggagaatccaccgccatccgccaccatggtgaacttcacggtagaccagatccgcgccatcatggacaagaaggccaacatccgcaacatgtctgtcatcgcccacgtggaccatggcaagtccacgctgacagactccctggtgtgcaaggcgggcatcatcgcctcggcccgggccggggagacacgcttcactgatacccggaaggacgagcaggagcgttgcatcaccatcaagtcaactgccatctccctcttctacgagctctcggagaatgacttgaacttcatcaagcagagcaaggacggtgccggcttcctcatcaacctcattgactcccccgggcatgtcgacttctcctcggaggtgactgctgccctccgagtcaccgatggcgcattggtggtggtggactgcgtgtcaggcgtgtgcgtgcagacggagacagtgctgcggcaggccattgccgagcgcatcaagcctgtgctgatgatgaacaagatggaccgcgccctgctggagctgcagctggagcccgaggagctctaccagactttccagcgcatcgtggagaacgtgaacgtcatcatctccacctacggcgagggcgagagcggccccatgggcaacatcatgatcgatcctgtcctcggtaccgtgggctttgggtctggcctccacgggtgggccttcaccctgaagcagtttgccgagatgtatgtggccagttcgccgccagggggagggccagttggggcctgccgagcgggccaagaaagtagaggacatgatgaagaagctgtggggtgacaggtactttgacccagccaacggcaagttcagcaagtcagccaccagccccgaagggaagaagctgccacgcaccttctgccagctgatcctggaccccatcttcaaggtgtttgatgcgatcatgaatttcaagaaagaggagacagcaaaactgatagagaaactggacatcaaactggacagcgaggacaaggacaaagaaggcaaacccctgctgaaggctgtgatgcgccgctggctgcctgccggagacgccttgttgcagatgatcaccatccacctgccctcccctgtgacggcccagaagtaccgctgcgagctcctgtacgaggggcccccggacgacgaggctgccatgggcattaaaagctgtgaccccaaaggccctcttatgatgtatatttccaaaatggtgccaacctccgacaaaggtcggttctacgcctttggacgagtcttctcggggctggtctccactggcctgaaggtcaggatcatggggcccaactatacccctgggaagaaggaggacctctacctgaagccaatccagagaacaatcttgatgatgggccgctacgtggagcccatcgaggatgtgccttgtgggaacattgtgggcctcgtgggcgtggaccagttcctggtgaagacgggcaccatcaccaccttcgagcacgcgcacaacatgcgggtgatgaagttcagcgtcagccctgttgtcagagtggccgtggaggccaagaacccggctgacctgcccaagctggtggaggggctgaagcggctggccaagtccgaccccatggtgcagtgcatcatcgaggagtcgggagagcacatcatcgcgggcgccggcgagctgcacctggagaagtcccccaacaagcacaaccggctgtacatgaaggcgcggcccttccccgacggcctggccgaggacatcgataaaggcgaggtgtccgcccgtcaggagctcaagcagcgggcgcgctacctggccgagaagtacgagtgggacgtggctgaggcccgcaagatctggtgctttgggcccgactgcaccggccccaacatcctcaccgacatcaccaaaggtgtgcagtacctcaacgagatcaaggacagtgtggtggccggcttccagtgggccaccaatgatggcgcactgtgtgagagaacatgcggggtgtgcgcttcgacgtccacgacgtcaccctgcacgccga

SEQ ID NO: 184443 - DNA, 1775 bp, Homo Sapiens
ttggagcaacagcgacgcaagatggcagccaccacgggctcgggagtaaaagtccctcgcaatttccgactgttggaagaactcgaagaaggccagaaaggagtaggagatggcacagttagctggggtctagaagatgacgaagacatgacacttacaagatggacagggatgataattgggcctccaagaacaatttatgaaaaccgaatatacagccttaaaatagaatgtggacctaaatacccagaagcacccccctttgtaagatttgtaacaaaaattaatatgaatggagtaaatagttctaatggagtggtggacccaagagccatatcagtgctagcaaaatggcagaattcatatagcatcaaagttgtcctgcaagagcttcggcgcctaatgatgtctaaagaaaatatgaaactccctcagccgcccgaaggacagtgttacagcaattaatcaaaaagaaaaaccacaggcccttccccttccccccaattcgatttaatcagtcttcattttccacagtagtaaattttctagatacgtcttgtagacctcaaagtaccggaaaggaagctcccattcaaaggaaatttatcttaagatactgtaaatgatactaattttttgtccatttgaaatatataagttgtgctataacaaatcatcctgtcaagtgtaaccactgtccacgtagttgaacttctgggatcaagaaagtctatttaaattgattcccatcataactggtggggcacatctaactcaactgtgaaaagacacatcacacaatcaccttgctgctgattacacggcctggggtctctgccttctccccttaccctcccgcctcccaccctccctgcaacaacagccctctagcctggggggcttgttagagtagatgtgaaggtttcaggtcgcagcctgtgggactactgctaggtgtgtggggtgtttcgcctgcacccctggttcctttaagtcttaagtgatgccccttccaaaccatcatcctgtccccacgctcctccactcccgcccttggccgaagcatagattgtaacccctccactcccctctgagattggccttcggtgaggaattcagggctttccccatatcttctctcccccacctttatcgaggggtgctgctttttctccctcctcctcaagttcctttttgcaccgtcaccacccaacaccttccatgacacttccttgctttggccagaagccatcaggtaaggttggaaagagcctctgacctcccttgtttagttttggaaccatactcactcactctccaccagcctgggaaatgaatattgggtcctcagccctgccaccctctgctgtcatcagctgatgcattgtttttagctcaggttttgataaggtgaaaagaatagtcaccagggttactcagacctgccagctctcggagtccttggtggttgaacttggagaaagaccgcatgaagatacttgtaagcacacatgatccctctgaattgttttactttcctgtaactgcttttgcttttaaaaattgaagaagttttaaacagggctttcatttggtcatccttgcaatccattggggtctagtttggaatctgacactggaacaaaaagaaccttgaatccggtgcatgccttggttttggtgctgctgctgcttcccaagatcctcagcagggattaaaaggaacccggtgtgcacagcaaatcccgaattggtgggcttgacctcctggcaaa

SEQ ID NO: 184444 - DNA, 1398 bp, Homo Sapiens
ttggattttgggaaccaaccccaaggaattccccaaccaggatacaatccatatcgccatacccctggcagcagcagggctaatccttacattgcaccaccccagctgcagcagtgccaaacaccaggccctcctgctcatcctccaccttctggaccccctgttcagatgtaccagatgcctccaggatctttgccaccggttccttcttcagtgcagtcaccggcacagcagcaggtacctgccagacctggggctccctctgttcaagtgccatctccttttctacttcaaaaccaatatgagcctgttcagccccactggttttactgcaaggaggtagaatacaaacaactgtggatgccttttagtgtgttcgactctttgaatcttgaagaaatctataattcagttcagccagatccggagagcgtggttcttggcacggatggagggcgctacgatgtttacctctatgaccgaataaggaaggctgcctactgggaagaggagccagccgaagtgagacgctgtacttggttttacaagggggacacagatagtcgatttattccctatactgaggagttcagtgaaaaactagaggctgaatataaaaaagctgtaaccactaatcagtggcaccgaagattagagtttccaagtggagagacaattgttatgcacaatccaaaggttattgttcagttccagccctcctcagtgccagatgaatggggcaccacgcaagatggacagacaaggcccagggttgtaaagcgtggaattgatgataaccttgatgaaattcccgacggggagatgcctcaagttgaccatttggtgtttgtggtgcatggcattggacctgtgtgtgacttacgctttaggagcattattgagtgtgtggatgattttagggtggtttctctcaaattgctgcggacacatttcaagaaatctttagatgacgggaaagtaagcagagtggagttccttccagttcattggcatagttctttgggtggggacgccacaggtgtggacaggaatattaagaaaatcactttgccaagtattggtcgatttcgtcactttaccaatgaaactttgctagatattttattttataacagccccacctactgtcagacaattgtggaaaaagtaggaatggagataaaccatctgcatgcactctttatgagtcggaacccagacttcaaaggaggtgtctctgttgctggtcacagtttaggttctttaatattgtttgacatcctgtctaatcaaaaagatttgaatttatcaaagtgccctggacctcttgctgttgctaatggagttgtgaagcagctacattttcaggaaaagcagatgcctgagagccaaagctga

SEQ ID NO: 184445 - DNA, 1878 bp, Homo Sapiens
tttgtacaaaaaagttggccgaagattagacctttccaagtggagagacaattgttatgcacaatccaaaggttattgttcagttccagccctcctcagtgccagatgaatggggcaccacgcaagatggacagacaaggcccagggttgtaaagcgtggaattgatgataaccttgatgaaattcccgacggggagatgcctcaagttgaccatttggtgtttgtggtgcatggcattggacctgtgtgtgacttacgctttaggagcattattgagtgtgtggatgattttagggtggtttctctcaaattgctgcggacacatttcaagaaatctttagatgacgggaaagtaagcagagtggagttccttccagttcattggcatagttctttgggtggggacgccacaggtgtggacaggaatattaagaaaatcactttgccaagtattggtcgatttcgtcactttaccaatgaaactttgctagatattttattttataacagccccacctactgtcagacaattgtggaaaaagtaggaatggagataaaccatctgcatgcactctttatgagtcggaacccagacttcaaaggaggtgtctctgttgctggtcacagtttaggttctttaatattgtttgacatcctgtctaatcaaaaaagatttgaatttatcaaagtgccctggacctcttgctgttgctaatggagttgtgaagcagctacattttcaggaaaagcagatgcctgaagagccaaagctgactttggatgagtcgtatgaccttgttgttgaaaatgaagaagtcctaactttgcaagaaactctggaagcacttagcctctctgaatattttagcacttttgaaaaggaaaagattgatatggagtccctgcttatgtgtacagttgatgacctgaaggaaatggggataccccttggacccagaaagaagatagctaactttgtagaacataaagcagccaaactgaaaaaagcagcgtcagaaaagaaggcagtggcggccacttctacaaaaggacaagagcaaagtgcccagaagactaaagacatggcttccctcccctcagaatccaatgagccaaagaggaaacttccagttggtgcttgcgtgtcttctgtgtgtgtgaattatgaatcttttgaagttggcgccggacaggtttctgttgcttacaactcattagattttgaaccagagatattctttgccttggggtctccaattgctatgtttctcactattcgaggagttgataggatagatgagaattacagccttcctacctgtaaagggttcttcaatatttatcatccgcttgatccagtggcatatagattagaacctatgattgttccagatttggacctaaaagctgttctcattccacatcacaaaggcagaaaaagacttcatttagaattgaaagagagtctctctcgtatgggatctgatttgaagcagggttttattagctctctcaaaagtgcttggcagacattaaatgagtttgcccgtgctcatacgtcttcaacccagttgcaagaagaattggagaaggtggccaatcagatcaaagaagaagaagaaaagcaagtagttgaagcagaaaagttgttgaaagtccagatttttccaagggatgaggactacttaggaaaggttggaatgttaaatggaggccgccgaatttgactacgttctccaagaaaaaccaataggagagttttagtgaataccttttcgctcttcagagtcacttatgctattgggaatctgaagatactgctctgttactacttaaagaaatttatcgaacaatgaacattagtccagaacagcccc

SEQ ID NO: 184446 - DNA, 1859 bp, Homo Sapiens
ttggcgcggctcctagcggatgggtgctattgtgaggcggtggtagaagttaataaaggtatccatggagaacactgaaaactcagtggattcaaaatccattaaaaatttggaaccaaagatcatacatggaagcgaatcaatggactctggaatatccctggacaacagttataaaatggattatcctgagatgggtttatgtataataattaataataagaattttcataaaagcactggaatgacatctcggtctggtacagatgtcgatgcagcaaacctcagggaaacattcagaaacttgaaatatgaagtcaggaataaaaatgatcttacacgtgaagaaattgtggaattgatgcgtgatgtttctaaagaagatcacagcaaaaggagcagttttgtttgtgtgcttctgagccatggtgaagaaggaataatttttggaacaaatggacctgttgacctgaaaaaaataacaaactttttcagaggggatcgttgtagaagtctaactggaaaacccaaacttttcattattcaggcctgccgtggtacagaactggactgtggcattgagacagacagtggtgttgatgatgacatggcgtgtcataaaataccagtggaggccgacttcttgtatgcatactccacagcacctggttattattcttggcgaaattcaaaggatggctcctggttcatccagtcgctttgtgccatgctgaaacagtatgccgacaagcttgaatttatgcacattcttacccgggttaaccgaaaggtggcaacagaatttgagtccttttcctttgacgctacttttcatgcaaagaaacagattccatgtattgtttccatgctcacaaaagaactctatttttatcactaaagaaatggttggttggtggttttttttagtttgtatgccaagtgagaagatggtatatttggtactgtatttccctctcattttgacctactctcatgctgcagagggtactttaagacatactccttccatcaaatagaaccactatgaagctacctcaaacttccagtcaggtagttgcaattgaattaaattaggaataaataaaaatggatactggtgcagtcattatgagaggcaatgattgttaatttacagctttcatgattagcaagttacagtgatgctgtgctatgaattttcaagtaattgtgaaaaagttaaacattgaagtaatgaatttttatgatattccccccacttaagactgtgtattctagttttgtcaaactgtagaaatgatgatgtggaagaacttaggcatctgtgggcatggtcaaaggctcaaacctttattttagaattgatatacacggatgacttaactgcatttttagaccatttatctgggattatggttttgtgatgtttgtcctgaacacttttgttgtaaaaaaataataataatgtttaatattgagaaagaaactaatattttatgtgagagaaagtgtgagcaaactaacttgacttttaaggctaaaacttaacattcatagaggggtggagttttaactgtaaggtgctacaatgcccctggatctaccagcataaatatcttctgatttgtccctatgcatatcagttgagcttcatataccagcaatatatctgaagagctattatataaaaaccccaaactgttgattattagccaggtaatgtgaataaattctataggaacatatgaaaatacaacttaaataataaacagtggaatataaagaaagcaataaatgaatgggctgagctgcctgtaacttgagagtagatggtttgagcctgagcagagacatgactc

SEQ ID NO: 184447 - DNA, 989 bp, Homo Sapiens
ttggctcggtcggtacagtctctgcacctcgcgccccagcaggtaaactaacattatggatttttccaagctacccaaaatactcgatgaagataaagaaagcacatttggttatgtgcatggggtctcaggacctgtggttacagcctgtgacatggcgggtgcagccatgtatgagctggtgagagtgggccacagcgaattggttggagagattattcgattggagggtgacatggctactattcaggtgtatgaagaaacttctggtgtgtctgttggagatcctgtacttcgcactggtaaacccctctctgtagagcttggtcctggcattatgggagccatttttgatggtattcaaagacctttgtcggatatcagcagtcagacccaaagcatctacatccccagaggagtaaacgtgtctgctcttagcagagatatcaaatgggactttacaccttgcaaaaacctacgggttggtagtcatatcactggcggagacatttatggaattgtcagtgagaactcgcttatcaaacacaaaatcatgttacccccacgaaacagaggaactgtaacttacattgctccacctgggaattatgatacctctgatgttgtcttggagcttgaatttgaaggtgtaaaggagaagttcaccatggtgcaagtatggcctgtacgtcaagttcgacctgtcactgagaagctgccagccaatcatcctctgttgactggccagagagtccttgatgccctttttccgtgtgtccagggaggaactactgctatccctggagcctttggctgtggaaagacagtgatatcacagtctctatccaagtattctaacagtgatgtaatcatctatgtaggatgtggtgaaagaggaaatgagatgtctgaagtcctccgggacttcccagagctcacaatggagttgatggtaagtagagtcaattatgaagaggacagctttggta

SEQ ID NO: 184448 - DNA, 1296 bp, Homo Sapiens
tttgtacaaaaaagttggctcgaactcccgagctagatccgcctcatcaacaacgccatcaagaatgacctggccagccgcaaccccaccttcatgtgcctggccctgcactgcatcgccaacgtgggcagccgggagatgggcgaggcctttgccgctgacatcccccgcatcctggtggccggggacagcatggacagtgtcaagcagagtgcggccctgtgcctccttcgactgtacaaggcctcgcctgacctggtgcccatgggcgagtggacggcgcgtgtggtacacctgctcaatgaccagcacatgggtgtggtcacggccgccgtcagcctcatcacctgtctctgcaagaagaacccagatgacttcaagacgtgcgtctctctggctgtgtcgcgcctgagccggatcgtctcctctgcctccaccgacctccaggactacacctactacttcgtcccagcaccctggctctcggtgaagctcctgcggctgctgcagtgctacccgcctccagaggatgcggctgtgaaggggcggctggtggaatgtctggagactgtgctcaacaaggcccaggagccccccaaatccaagaaggtgcagcattccaacgccaagaacgccatcctcttcgagaccatcagcctcatcatccactatgacagtgagcccaacctcctggttcgggcctgcaaccagctgggccagttcctgcagcaccgggagaccaacctgcgctacctggccctggagagcatgtgcacgctggccagctccgagttctcccatgaagccgtcaagacgcacattgacaccgtcatcaatgccctcaagacggagcgggacgtcagcgtgcggcagcgggcggctgacctcctctacgccatgtgtgaccggagcaatgccaagcagatcgtgtcggagatgctgcggtacctggagacggcagactacgccatccgcgaggagatcgtcctgaaggtggccatcctggccgagaagtacgccgtggactacagctggtacgtggacaccatcctcaacctcatccgcattgcgggcgactacgtgagtgaggaggtgtggtaccgtgtgctacagatcgtcaccaaccgtgatgacgtccagggctatgccgccaagaccgtctttgaggcgctccaggcccctgcctgtcacgagaacatggtgaaggttggcggctacatccttggggagtttgggaacctgattgctggggacccccgctccagcccccccagtgcagttctccctgctccactc

SEQ ID NO: 184449 - DNA, 963 bp, Homo Sapiens
ttggcgcccggtccccgcttgccagcccccgctgctctgtgccctgtccggccaggcctggagccgacaccaccgccatcatgccggccgtgtccaagggcgatgggatgcgggggctcgcggtgttcatctccgacatccggaactgtaagagcaaagaggcggaaattaagagaatcaacaaggaactggccaacatccgctccaagttcaaaggagacaaagccttggatggctacagtaagaaaaaatatgtgtgtaaactgcttttcatcttcctgcttggccatgacattgactttgggcacatggaggctgtgaatctgttgagttccaataaatacacagagaagcaaataggttacctgttcatttctgtgctggtgaactcgaactcggagctgatccgcctcatcaacaacgccatcaagaatgacctggccagccgcaaccccaccttcatgtgcctggccctgcactgcatcgccaacgtgggcagccgggagatgggcgaggcctttgccgctgacatcccccgcatcctggtggccggggacagcatggacagtgtcaagcagagtgcggccctgtgcctccttcgactgtacaaggcctcgcctgacctggtgcccatgggcgagtggacggcgcgtgtggtacacctgctcaatgaccagcacatgggtgtggtcacggccgccgtcagcctcatcacctgtctctgcaagaagaacccagatgacttcaagacgtgcgtctctctggctgtgtcgcgcctgagccggatcgtctcctctgcctccaccgacctccaggactacacctactacttcgtcccagcaccctggctctcggtgaagctcctgcggctgctgcagtgctacccgcctccagaggatgcggctgtgaaggggcggctggtggaatgtctggagactgtgctcaacaagcccaggagccccc

SEQ ID NO: 184450 - DNA, 1082 bp, Homo Sapiens
actttgtacaaaaaagttgggaaattaagagaatcaacaaggaactggccaacatccgctccaagttcaaaggagacaaagccttggatggctacagtaagaaaaaatatgtgtgtaaactgcttttcatcttcctgcttggccatgacattgactttgggcacatggaggctgtgaatctgttgagttccaataaatacacagagaagcaaataggttacctgttcatttctgtgctggtgaactcgaactcggagctgatccgcctcatcaacaacgccatcaagaatgacctggccagccgcaaccccaccttcatgtgcctggccctgcactgcatcgccaacgtgggcagccgggagatgggcgaggcctttgccgctgacatcccccgcatcctggtggccggggacagcatggacagtgtcaagcagagtgcggccctgtgcctccttcgactgtacaaggcctcgcctgacctggtgcccatgggcgagtggacggcgcgtgtggtacacctgctcaatgaccagcacatgggtgtggtcacggccgccgtcagcctcatcacctgtctctgcaagaagaacccagatgacttcaagacgtgcgtctctctggctgtgtcgcgcctgagccggatcgtctcctctgcctccaccgacctccaggactacacctactacttcgtcccagcaccctggctctcggtgaagctcctgcggctgctgcagtgctacccgcctccagaggatgcggctgtgaaggggcggctggtggaatgtctggagactgtgctcaacaaggcccaggagccccccaaatccaagaaggtgcagcattccaacgccaagaacgccatcctcttcgagaccatcagccctcatcatccactatgacagtgagcccaacctcctggttcgggcctgcaaccagctgggccagttcctgcagcaccgggagaccaacctgcgctacctggccctggagagcatgtgcacgctggccagctccgagttctcccatgaagccgtcaagacgcacattgacaccgtcatcaatgccctcaagacggagcggga

SEQ ID NO: 184451 - DNA, 1441 bp, Homo Sapiens
actttgtacaaaaaagttggtcctcatggaggagatccgcttcccgccgcccctcaaaacagaggaggactacattccatacccgagcgtgcacgaggtcttggggcgagaaggacccttccccctcatcctgctgccccagtttgggggctactggattgagggcaccaaccacgaaatcaccagcatccccgagacagagccactgcagtcgcccacaaccaaggtgaagctcgagtgcaaccccacagcccgcatctaccggaagcactttctcggcaaggagcatttcaattactactcactggacgctgccctcggccaccttgtcttctcactcaagtacgatgtcatcggggaccaagagcacctgcggctgctgctcaggaccaagtgccggacataccatgatgtcatccccatctcctgcctcaccgagttccctaatgttgtccagatggcaaagttggtgtgtgaagacgtcaatgtggatcggttctatcctgtgctctaccccaaggcttcccggctcatcgtcacctttgacgagcatgtcatcagcaataacttcaagtttggcgtcatttatcagaagcttgggcagacctccgaggaagaactcttcagcaccaatgaggaaagtcccgctttcgtggagttccttgaatttcttggccagaaggtcaaactgcaggactttaaggggttccgaggaggcctggacgtgacccacgggcagacggggaccgaatctgtgtactgcaacttccgcaacaaggagatcatgtttcacgtgtccaccaagctgccatacacggaaaggggacgcccagcagttgcagcggaagcggcacatcgggaacgacatcgtggctgtggtcttccaggatgagaacactcctttcgtgcccgacatgatcgcgtccaacttcctgcatgcctacgtcgtggtgcaggctgagggcgggggccctgatggccccctctacaaggtctctgtcactgcaagagatgatgtgcccttctttggaccccccctcccggaccccgctgtgttcaggaaggggcctgagttccaggaatttttgctgacaaagctgatcaatgctgaatatgcctgctacaaggcagagaagtttgccaaactggagcgggtcatccggagccgcagccagtccatggatgccatggggctgagcaacaataagcccaacaccgtgtccaccagccacagcgggagcttcgcgcccaacaaccccgacctggccaaggcggctggaatatcactgattgtccctgggaagagccccacgaggaagaagtcgggcccgttcggctcccgccgcagcagcgccattggcatcgagaacatacaggaggtgcaggataagagggagagccctccggctggtcagaagacccccgacagcgggcacgtctc

SEQ ID NO: 184452 - DNA, 1745 bp, Homo Sapiens
  misc_feature (529)..(848): n is a, c, g, or t
  misc_feature (1258)..(1408): n is a, c, g, or t
ttggcttcctctttcgcattctctctcggctcgagctggctgagatttttctaaattgaaaacacgcccccctccccacacctccaggaactccactcccagtcttagagctgccttcccctcagcctctccccacaccacccacccagctgctgtcattccgctcactgagctcttcttcattctcaccctgatccctgggggactcaaagccaaaactgcccaaagaggaaagattgaatcctaaaggggatccttgcccccatgggaggccccctactagaaggacgtgaaagcagcttttgggggaaactgaggcagtggggaagacagagcagaatgagccctcaccctggctgggggtccagcacaggctgtatctgcagagggtcccagaggaacgctggagccaagagaagccctgggaaggaggggtggggaacgacatgcatgtgagggatggcacactgatgtgtttatgcacctgtacacaggagcgcatggccatggctttggaaaggagaatggnnnnnnnnnnnnnnnnnnnnnnnnnnnnnnnnnnnnnnnnnnnnnnnnnnnnnnnnnnnnnnnnnnnnnnnnnnnnnnnnnnnnnnnnnnnnnnnnnnnnnnnnnnnnnnnnnnnnnnnnnnnnnnnnnnnnnnnnnnnnnnnnnnnnnnnnnnnnnnnnnnnnnnnnnnnnnnnnnnnnnnnnnnnnnnnnnnnnnnnnnnnnnnnnnnnnnnnnnnnnnnnnnnnnnnnnnnnnnnnnnnnnnnnnnnnnnnnnnnnnnnnnnnnnnnnnnnnnnnnnnnnnnnnnnnnnnnnnnnnnnnnnnnnnnnnnnnnnnnnnggaaaaaaaaggaaaataggagaaggtggaaatgggtgaagagagaagtcccctcactagctgcatgagaaatctatcttactgtggttctccatgggcagcaggaccatttttcagaatcaagagggaggacagtgtgagaaggcgatgatccaaagaagacagagaggtcagccccacccgatccctcaaatgggctcttggaggcacccccaggggcagcccatttctcaaagtccagaaaattagggtcccagaagggggcagcagcaggctgggagttaggagggagagcagggtgccggccctgccaccaagttgagagctggaggggaggtggggagagaacatcacagagcagccagccctggttcactcctggcagtttcttctcaagctccttccctagnnnnnnnnnnnnnnnnnnnnnnnnnnnnnnnnnnnnnnnnnnnnnnnnnnnnnnnnnnnnnnnnnnnnnnnnnnnnnnnnnnnnnnnnnnnnnnnnnnnnnnnnnnnnnnnnnnnnnnnnnnnnnnnnnnnnnnnnnnnnnnnnnnnnnnnaaaatccttccctagagctagtatcctaaagctgcagagctagcccagacctcattggtttccttgtccttggggtgcttttcctgaatctttgggggtgaagggagtgttgctcccagtccagaggcctgattctgttcggactgggttctcaagacacgaccaggttctcaagacacgagtccccttgttcctccccattaaagggggtttgtcaaagcaagaacagcccctctccccagtcacagcctgaagggaggccccgagagcttcctccttcccccacctgctccttaccttctctgccctgctttttagaactgcagttcattgtttt

SEQ ID NO: 184453 - DNA, 1966 bp, Homo Sapiens
ccattctcctttccaaagccatggccatgcgctcctgtgtacaggtgcataaacacatcagtgtgccatccctcacatgcatgtcgttccccacccctccttcccagggcttctcttggctccagcgttcctctgggaccctctgcagatacagcctgtgctggacccccagccagggtgagggctcattctgctctgtcttccccactgcctcagtttcccccaaaagctgctttcacgtccttctagtagggggcctcccatgggggcaaggatcccctttaggattcaatctttcctctttgggcagttttggctttgagtcccccagggatcagggtgagaatgaagaagagctcagtgagcggaatgacagcagctgggtgggtggtgtggggagaggctgaggggaaggcagcccccccaggggggcctaaccgtggaatcactgcaatttcctctgagatcccgacttggacaaccaggacagggattgaccattcccttcccattccactcggactgtgtccaagcgggggctgtccactgcgggggctgcctccccatcgggtcctaacagctctaagactgggagtggagttcctggaggtgtggggaggggggcgtgttttcaatttagaaaaatctcagccagctcgagccgagagagaatgcgaaagaggaagttcggaaggagcgaggaatggggtgggtggcagcgggggcggctcagtcgctgtcgctcttgtccaccagcacggcgtccgactcctcggtgatctccagcagcgcgtgcacgtcggggctgctcccgcgccgcaggtcgccggcctccccgcgctccgcgccgccctcgtcgtcgtcggcgcccacctccaccatctcggtggccttgagcacttccacctggccctcgcggatcttcttgacgtggaaggtgaagggtggcaccttgtagaccgcggtcttggagcgcgcgtacaccacgtggtcgggcgtgaaggatttgcgcaacttgtcccgcgacgtcttcagtttctcgcgccgctcggcgggcaccaggcgcgtgcccagcttgttcatgcgcttctccagggtgtgccgcgtcttctccaggttttccttggtcttgaggcgcgtcttctccaggttctcgcgggtacgcaccttggtcttctccatcttctccttggagaaggccttcttgaagtcgtccacgcgccgcaggccgctgcgcttgatacgctctgcgcgggactcctcaataacctcctcaacctccaccgcctcgtccgacgaaagctccagcgccgctgcgtcctcctcgggccgctcgccctcgcccagctcctcgccctccttctctggcagcgcctccgactctttcagcgatttgctgatgctcagtttggccggcagcttcacttcatcctggtagatcatgactttaaagttgcggcgccgcagcagctcggcctcgttgacctccagcttcttgatctgccccgcctggcgctccaggctgccgcgcacggtcttcacgttgacgctgaccttgcgcaccttctccagcagcttgctcaccgtattgctcgtggtggcgtgcgccttgcccagcttgctcagctcgccctggatgctctgcactgcgccctccatctccgcctgccgctcctccagctgtgcttgagtcagctggatctggtctacggccccgatgattttgtccaggaggctcagcaccagcacgccgttcacctggtccgacttgatcagctcttctgagccggcccccgacggctcctccgctgcctgagccccagcggaggaaggctccggggcctcggcgtcggggtacccgggaagcggccgctcgacaatatagagcgtggggtcctccatggctacccggagccgtgcgccaacttttttgtacaaagttggctaaaatggaaaaagcattgct

SEQ ID NO: 184454 - DNA, 1861 bp, Homo Sapiens
ttggcaagtatttatccgagtacctactataatacagtagctaacatgtattgagcacagattttttttggtaaaactgtgaagagctaggatatatacttggtgaaacaaaccagtatgttccctgttctcttgagcttcgactcttctgtgcgctactgctgcgcactgctttttctacaggcattacatcaactcctaaggggtcctctgggattagttatgcagatattaaatcacccgaagacactaacttacagaagacacaactccttccccagtgatcactgtcataaccagtgctctaccgtatcccatcactgaggactgatgttgactgacatcattttctttatcgtaataaacatgtggctctattagctgcaagctttaccaagtaattggcatgacatctgagcacagaaattaaggcaaaaaaccaaagcaaaacaaatacatggtgctgaaattaacttgatgccaagcccaaggcagctgatttctgtgtatttgaacttagggcaaatcagagtctacacagacgcctacagaaagtttcaggaagaggcaagatgcattcaatttgaaagatatttatgggcaacaaagtaaggtcaggattagacttcaggcattcataaggcaggcactatcagaaagtgtacgccaactaagggacccacaaagcaggcagaggtaatgcagaaatctgttttgttcccatgaaatcaccaatcaaggcctccgttcttctaaagattagtccatcatcattagcaactgagatcaaagcactcttccactttacgtgattaaaatcaaacctgtatcagcaagttaaatggttccatttctgtgatttttctattatttgaggggagttggcagaagttccatgtatatgggatctttacaggtcagatcttgttacaggaaatttcaaaggtttgggagtggggagggaaaaaagctcagtcagtgaggatcattttatcacattagactggggcagaactctgccaggatttaggaatattttcagaacagattttagatattatttctatccatatattgaaaagaataccattgtcaatcttatttttttaaaagtactcagtgtagaaattgctagcccttaattcttttccagcttttcatattaatgtatgcagagtctcaccaagctcaaagacactggttgggggtggagggtgccacagggaaagctgtagaaggcaagaagactcgagaatcccccagagttatttttctccataaagaccatcagagtgcttaactgagctgttggagactgtgaggcatttaggaaaaaaatagcccactcacatcattccttgtaagtcttaagttcattttcattttacgtggaggaaaaaaatttaaaaagctattagtatttattaatgaattttactgagacatttcttagaaatatgcacttctatactagcaagctctgtctctaaaatgcaagttggccttttgcttgccacatttctgcattaaacttctatattagcttcaaaggcttttaatctcaatgcgaacattctacgggatgttcttagatgcctttaaaaagggggcagatctaattttatttgaaccctcactttccaacttcaccatgacccagtactagagattagggcacttcaaagcattgaaaaaaatctactgatacttactttcttagacaagtagttcttagttaaccaccaatggaaactgggttcattctgaatcctggaggagcttcctcgtgccacccagtgtttctgggccctctgtgtgagcagccaggtgtgagctgttttagaagcagcgtgttgccttc

SEQ ID NO: 184455 - DNA, 1312 bp, Homo Sapiens
  misc_feature (1058)..(1076): n is a, c, g, or t
ctttgtacaaaaaagttggcttctatatccatacattacaaaggcttttaaactcaatgcgaacattctacgggatgttcttagatgcctttaaaaagggggcagatctaattttatttgaaccctcactttccaacttcaccatgacccagtactagagattagggcacttcaaagcattgaaaaaaatctactgatacttactttcttagacaagtagttcttagttaaccaccaatggaactgggttcattctgaatcctggaggagcttcctcgtgccacccagtgtttctgggccctctgtgtgagcagccaggtatgagctgtttttgaagcagcgtgttgccttcatctctcccgtttcccaaaagaacaaaggataaaggtgacagtcacactcctgggttaaaaaaagcattccagaaccacttctctttatgggcacaacaaagaaacgaaggctgaagttcgcctacccaaaatgaaaagtaggctttacagtcaaaagtacttctgttgattgctaaataacttcattttcttgaaatagagcaactttgagtgaaatctgcaacatggataccatgtatgtaagatactgctgtacagaagagttaaggcttacagtgcaaatgaggcgtcagctttgggtgctaaaattaacaagtctaatattattaccatcaatcaggaagagaataataaatgtttaaacaaacacagcagtctgtataaaaataccgtgtatcatttactctttctgcagctctatacgataggcaggagaggcttatgtggcagcacaagccaggtggggattttgtaaagaagtgataaaacatttgtaagtaatccaagtaggtgtattaaggcaccaaaagtaacatggcacccaacacccaaaaataaaaatatgaaatatgagtgtgaactctgagtagagtatgaaacaccacagaaagtcttagaaatagctctggagtggctctcccaggacagtttccagttgctgaatagtcttttggcactgatgttctacttcttcacattcatctnnnnnnnnnnnnnnnnnnntcaaaattaaaatctgagtcagtccgcctgcctcggttctcattagtttaattcttaatgccttgcactttccggcaatcattcaatcaaaagagtgaaatgaagcacattaacaaagcaggaggcgccacggaccgcctccctccacaccgctccttccgccttcattccttgcccacaggcttgcactggaagctgaataagaatccccaaaactcaaacttcctacggatgcc

SEQ ID NO: 184456 - DNA, 1659 bp, Homo Sapiens
  misc_feature (251)..(259): n is a, c, g, or t
  misc_feature (297)..(369): n is a, c, g, or t
  misc_feature (383)..(435): n is a, c, g, or t
ttggcacaaacctcgcattgatggtctggttaaggtgggcacactgaaaaaacgacttgataaatttaatgaggtagtcagtgtgttgaaagatggaaaacccgagatgaataaacagatcaagaatctggaaatttctattgatactttgatggccaaaattaagtccactatgatgacgcaggaacaaatccagaaagaatatgatgcactggttaaaagctcagaggaactcctcagtgcattacagnnnnnnnnncagcaggaagaggaagcagaaaggctgaggcgtattcnnnnnnnnnnnnnnnnnnnnnnnnnnnnnnnnnnnnnnnnnnnnnnnnnnnnnnnnnnnnnnnnnnnnnnnnngcggatgaaacttnnnnnnnnnnnnnnnnnnnnnnnnnnnnnnnnnnnnnnnnnnnnnnnnnnnnntgatgaaaaacgcattcaagctgaagtggaggcacagctggcccgacagaaggaggaggaatcccaacagcaagcagttctggagcaggagcgcagggaccgggagctggccctgaggattgcccagagtgaagccgagctcatcagtgatgaggcccaggccgacctggcgctgcggagcttggattcctatccggtaacttctaaaaatgatggaacaagacccaaaatgacaccaggtcctgctgtactagccaccaaagcagctgctggtactaagaaatatgatcttagtaaatggaaatatgcagaactacgtgataccatcaatacttcttgtgatattgagctcctggcagcttgcagagaagaatttcataggagactaaaagtgtatcatgcttggaaatctaagaacaagaagagaaatactgaaacagagcaacgtgctccaaagtctgttactgattatgctcagcaaaacccagcagctcagattcctgccaggcagcgggagattgaaatgaaccgacagcaacgcttcttccgcatcccattcatccgccctgccgaccagtacaaagaccctcagagtaagaaaaaaggctggtggtatgcccattttgatggaccatggattgcccggcaaatggaactccatcctgacaagccacccatcctacttgtggctggtaaggacgacatggagatgtgtgagctgaatcttgaggagactggcctgactcggaagcgtggtgctgagatcttgccaagacagtttgaagaaatctgggaacgctgtggaggcatccagtaccttcagaatgcgattgagagcagacaggctcggcccacctatgcaacagccatgctgcagagtctgttaaagtagatgttgcacaccagccttacagctgggagcctttgccatggtacttaggtagggtgtgtgcccccagatttaaccattccataatcatgttagagttacttctataaagtgaacagattttattaatcacggcttttggtgaatttgtttaagttaattatggtagcaaattttggacctaaacattattttttctgtatcccgctgtaattcccaaaactctcattattctctaactattacacatgggcatattctgatgtttctcatcctttgccagaggactacctacatccatcgtaaattgttctctaggaaaagagaattttttt

SEQ ID NO: 184457 - DNA, 1968 bp, Homo Sapiens
  misc_feature (373)..(416): n is a, c, g, or t
  misc_feature (985)..(997): n is a, c, g, or t
  misc_feature (1057)..(1068): n is a, c, g, or t
ttgggctggaaatttttaatttatttggccatcttttagtatgccattcttaatctcatctgtcaaagaaacaaaaattatgtttttctagtagctgtttccggttttcaaacttatgcatgctttcttgcctctttagtcaatgttttcttcatgtttctggtttaaacatgcaaaaatgtgtaataattacagaggtcctgctgtactagccaccaaagcagctgctggtactaagaaatatgatcttagtaaatggaaatatgcagaactacgtgataccatcaatacttcttgtggtaagtgtttggagaagatcaaaaatagaaaatgttcatagtgataggtgataaatacctagattagggtgagnnnnnnnnnnnnnnnnnnnnnnnnnnnnnnnnnnnnnnnnnnnnatgtacatataatacctatattatctgaatcttttggtccatgaatgcacagtaacaaatggcaatgcagtgctttctttttaaggctatttttcttcccacagaacaattagagtaaaatactatatccagaggatcccacatagttgtgttcttatttaaatcacagtgtttgagttcagaaaactatgagtaggaacgatgaattcagaaaactatgactagaaacaaaagtatcataattgtacataatttctcactacactttcctccattgagtatatctgcataattataaaaaatgtcttgcttgtaaatctagtttgtattttatcacagtgactttttattctattgtcaagacttgttgccttcgacaaattgcttaatgtttctgatgcaattccttcatataaaagacctgtttagttcagagttcttctgtggagcagatgatataagatagtaacactgtgtaaagaaatgatctgtgaatttgaacaataatattataaaatgcttatccttatgaataattagcttacttttgattttgtaccattaatttnnnnnnnnnnnnntctccttatgcgacagaataattatatcattatgttagacgaataaattaacatgtcaannnnnnnnnnnngctcaatgtaatcaatagatattgagctcctggcagcttgcagagaagaatttcataggagactaaaagtgtatcatgcttggaaatctaagaacaagaagagaaatactgaaacagagcaacgtgctccaaagtctgttactgattatgctcagcaaaacccagcagctcagattcctgccaggcagcgggagattgaaatgaaccgacagcaacgcttcttccgcatcccattcatccgccctgccgaccagtacaaagaccctcagagtaagaaaaaaggctggtggtatgcccattttgatggaccatggattgcccggcaaatggaactccatcctgacaagccacccatcctacttgtggctggtaaggacgacatggagatgtgtgagctgaatcttgaggagactggcctgactcggaagcgtggtgctgagatcttgccaagacagtttgaagaaatctgggaacgctgtggaggcatccagtaccttcagaatgcgattgagagcagacaggctcggcccacctatgcaacagccatgctgcagagtctgttaaagtagatgttgcacaccagccttacagctgggagcctttgccatggtacttaggtagggtgtgtgcccccagatttaaccattccataatcatgttagagttacttctataaagtgaacagattttattaatcacggcttttggtgaatttgtttaggttaattatggtagcaaattttggacctaaacattatttttctgtatcccgctgtaattctcaaaactctcattattctctaactattacacatgggcatattctgatgtttctcatcctttgccagagactaccttacatccatcgtagttgttctctaggaaaagagaacttttttc

SEQ ID NO: 184458 - DNA, 955 bp, Homo Sapiens
tctgttcactttatagaagtaactctaacatgattatggaatggttaaatctgggggcacacaccctattaagtaccatggcaaaggctcccagctgtaaggctggtgtgcaacatctactttaacagactctgcagcatggctgttgcataggtgggccgagcctgtctgctctcaatcgcattctgaaggtactggatgcctccacagcgttcccagatttcttcaaactgtcttggcaagatctcagcaccacgcttccgagtcaggccagtctcctcaagattcagctcacacatctccatgtcgtccttaccagccacaagtaggatgggtggcttgtcaggatggagttccatttgccgggcaatccatggtccatcaaaatgggcataccaccagtcttttttcttactctgagggtctttgtactggtcggcagggcggatgaatgggatgcggaagaagcgttgctgtcggttcatttcaatctcccgctgcctggcaggaatctgagctgctgggttttgctgagcataatcagtaacagactttggagcacgttgctctgtttcagtatttctcttcttgttcttagatttccaagcatgatacacttttagtctcctatgaaattcttctctgcaagctgccaggagctcaatatcacaagaagtattgatggtatcacgtagttctgcatatttccatttactaagatcatatttcttagtaccagcagctgctttggtggctagtacagcaggacctctgtaattattacacatttttgcatgtttaaaccagaaacatgaagaaaacattgactaaagaggcaagaaagcatgcataagtttgaaaaccggaaacagctactagaaaaacataatttttgtttctttgacagatgagattaagaatggcgatactaaaagccaacttttttgtacaaagt

SEQ ID NO: 184459 - DNA, 1236 bp, Homo Sapiens
ctttgtacaaaaaagttgggattttattaatcccggcttttggtgaatttgtttaaggttaattatggtagcaaattttggacctaaacattatttttctgtatcccgctgtaattcccaaaactctcattattctctaactattacacatgggcatattctgatgtttctcatcctttgccagaagactaccttacatccatcgtaattgttctctaggaaaagagaacttttttcaaaattcaaaatacttcttaaggatggcacagtaccatataactggagtaataaaacatgagcttacattcttacaataactaaaccacttaaaatgatcaaggcactaatgttttggtctgaaaagctgtgtactttatagacattttcagacatttttggaaatttccattaaaggtggaaaatctatttttttcctcctttgcagtgtcttagtttgaatgaaacacttcgaagttctagaattctagaaagagccttaatgtatttgatgtattctgtgataagaggtactaatagtatccagcacagatttgcttttctttgctagcacaatgtgtgttgctgtcagaatattctttttatattctgtggaaaaataaaggaaattcagattgtttaaatgcctaaaagttttgagataagttttgtttcaattagaaaaggaaataggttttaggtggcatagtggcttaactggactgaattcaaatattctttcaacttcatctcaatagtgatttttgtatcagaatcttgtccaagttgtttcattgatttagtaagtgttctgcttccaacatctttctttttaagaaattcctagtgtcttttttggcctttgaggttttggtaattgtagacctgtttcataagctttgtaattcagaaatccttgtatttagtaagtgcttgttttacataactgataattttaaaatgttttctttgtgtgctgttagtattgattcaaatgtcagcagctttaagcctaatatttatgactttcacatttggaatttaaagacaaaaatacatcaaggagttatgctgacataattctaaagagttttgttgtattttagaataaaattataaagtaaaatgattctctgtactgctttttcccccagtttttagagaccctaacctttgaaatgaaattccagtgatttcttttttccctagaaagattacctcagttagggaagtatttcc

SEQ ID NO: 184460 - DNA, 2140 bp, Homo Sapiens
  misc_feature (1634)..(1644): n is a, c, g, or t
  misc_feature (1682)..(1740): n is a, c, g, or t
  misc_feature (1773)..(1830): n is a, c, g, or t
ttggctttggaatattgtgctgaattactgggtttggaccaagatgatcttcgagtaagtttgaccacaagagtcatgctaacaacagcagggggcaccaaaggaacagttataaaggtacctctgaaagtggagcaagcaaacaatgctcgtgatgccctggcaaagacagtgtatagccatctttttgatcatgtggtaaacagagtaaatcagtgttttccttttgaaacatcatcctattttattggagtcctagatattgctggttttgagtactttgagcataacagttttgaacaattttgcatcaactattgcaatgaaaaacttcaacaattttttaatgaaaggattctgaaggaggaacaagaactctatcaaaaagaaggtttaggtgttaatgaagtgcattatgtggataatcaggactgtatagatttaattgaagccaaattagtgggaatactggatattttggatgaagaaaatcgccttccccagccaagtgatcaacactttacatctgcagttcaccaaaagcacaaggatcattttcgactcactattcccagaaaatctaagctggcagttcataggaatatcagagacgacgaaggcttcattatcaggcattttgcgggggcagtgtgctatgaaacaacccagtttgtggagaaaaataatgatgctttacatatgtctcttgaatccttaatatgtgaatccagagataagtttatacgggaattatttgaatcatccacaaataacaacaaagatactaaacaaaaagcaggaaaacttagcttcatcagcgtgggaaacaagtttaagacacagttaaatttgcttctggataaacttcgaagtactggagcaagctttattcgttgcatcaaacctaacttaaagatgacaagccaccactttgaaggtgctcaaattctgtctcagcttcagtgttcagggatggtgtctgttttggacttgatgcagggtggttacccatcacgagcttcatttcatgaactctacaacatgtacaaaaagtatatgccagataaacttgcaagattggatccaagactattttgtaaggctttgtttaaagctttgggcttaaatgaaaatgactacaagtttgggttaaccaaagtattttttagacctggcaagtttgcagaatttgatcagatcatgaagtctgaccctgaccacttagcagagttggttaaaagagtcaatcactggctcacatgcagtcgctggaagaaagttcagtggtgctcactctcagtcatcaaattgaaaaacaaaataaaatatcgagctgaagcctgcattaaaatgcaaaaaactattcgaatgtggctttgcaagaggagacacaaacctcgcattgatggtctggttaaggtgggcacactgaaaaaacgacttgataaatttaatgaggtagtcagtgtgttgaaagatggaaaacccgagatgaataaacagatcaagaatctggaaatttctattgatactttgatggccaaaattaagtccactatgatgacgcaggaacaaatccagaaagaatatgatgcactggttaaaagctcagaggaactcctcagtgcattacnnnnnnnnnnncagcaggaagaggaagcagaaaggctgaggcgtattcnnnnnnnnnnnnnnnnnnnnnnnnnnnnnnnnnnnnnnnnnnnnnnnnnnnnnnnnnnngaagaggaggaaaggcggatgaaacttgagatnnnnnnnnnnnnnnnnnnnnnnnnnnnnnnnnnnnnnnnnnnnnnnnnnnnnnnnnnncgcattcaagctgaagtggaggcacagctggcccgacagaaggaggaggaatcccaacagcaagcagttctggagcacgagcgcagggaccgggagctggccctgaggattgcccagagtgaagccgagctcatcagtgatgaggcccaggccgacctggcgctgcggagcttggattcctatccggtaacttctaaaaatgatggaacaagacccaaaatgacaccggaacaaatggccaaagaaatgtcagaatttttgagtagaggtcctgctgtactagccaccaagcagctgctggtactaagaa

SEQ ID NO: 184461 - DNA, 1432 bp, Homo Sapiens
ttggctccttcgggctctcctcgcgtcactggagccatggcgttcgccgagacctacccggcggcatcctccctgcccaacggcgattgcggccgccccagggcgcggcccggaggaaaccgggtgacggtggtgctcggtgcgcagtggggcgacgaaggcaaagggaaggtggtggacctgctggcgcaggacgccgacatcgtgtgccgctgccagggaggaaataatgctggccatacagttgttgtggattctgtggaatatgattttcatctcttacccagtggaataattaatccaaatgtcactgcattcattggaaatggtgtggtaattcatctacctggattgtttgaagaagcagagaaaaatgttcaaaaaggaaaaggactagaaggctgggaaaaaaggcttattatatctgacagagctcatattgtatttgattttcatcaagcagctgatggtatccaggaacaacagagacaagaacaagcaggaaaaaatttgggtacaacaaaaaagggcattggcccagtttattcgtccaaagctgctcggagtggactcaggatgtgcgaccttgtttctgactttgatggcttctctgagaggtttaaagttctagctaaccaatacaaatctatataccccactttggaaatagacattgaaggtgaattacaaaaactcaagggttatatggaaaagattaaaccaatggtgagagatggagtttattttctatatgaggccctacatggaccaccaaagaaaatcttggtagaaggtgcaaatgcagcactattagatattgattttgggacttacccttttgtaacctcttcaaattgtactgttggaggtgtttgtactggtttgggtatgccacctcaaaatgttggagaagtgtatggagttgtgaaagcttatacaactagagttggtattggtgcctttcctacagagcaagacaatgaaattggagaattattacaaacaaggggtagagagtttggtgtaactactggaaggaaaagaagatgtggctggttggacctcgttttgctcaaatatgctcatatgatcaatggatttactgcgttggcacttaccaagttggatattttggacatgtttacggaaatcaaagttggagttgcttacaagttagatggtgaaatcatacctcatatcccagcaaaccaagaagtcttaaataaagttgaagttcaatataagactctcccaggatggaacacagacatatcaaatgcaagggcgtttaaagaactacctgttaatgcacaaaactatgttcgatttattgaagatgagcttcaaattccagttaagtggattggtgttggtaaatccagagaatctatgattcaactcttttaatgattgccagtaatgcaagaaacac

SEQ ID NO: 184462 - DNA, 2571 bp, Homo Sapiens
  misc_feature (2149)..(2159): n is a, c, g, or t
  misc_feature (2405)..(2414): n is a, c, g, or t
ttggctcttatgtaaatgacagttactgtagcttgacctatttttctctttcattttttaatatagaaaagaattttagatggcttacattagtgctgaggttttgtaatttttctgcttcaacccacattgttttcagatctaaatgagtgtggcctgaagccccggccctgtaagcacaggtgcatgaacacttacggcagctacaagtgctactgtctcaacggatatatgctcatgccggatggttcctgctcaagtgccctgacctgctccatggcaaactgtcagtatggctgtgatgttgttaaaggacaaatacggtgccagtgcccatcccctggcctgcagctggctcctgatgggaggacctgtgtagatgttgatgaatgtgctacaggaagagcctcctgccctagatttaggcaatgtgtcaacacttttgggagctacatctgcaagtgtcataaaggcttcgatctcatgtatattggaggcaaatatcaatgtcatgacatagacgaatgctcacttggtcagtatcagtgcagcagctttgctcgatgttataacgtacgtgggtcctacaagtgcaaatgtaaagaaggataccagggtgatggactgacttgtgtgtatatcccaaaagttatgattgaaccttcaggtccaattcatgtaccaaagggaaatggtaccattttaaagggtgacacaggaaataataattggttcctgatgttggaagtacttggtggcctccgaagacaccatatattcctcctatcattaccaacaggcctacttctaagccaacaacaagacctacaccaaagccaacaccaattcctactccaccaccaccaccacccctgccaacagagctcagaacacctctaccacctacaaccccagaaaggccaaccaccggactgacaactatagcaccagctgccagtacacctccaggagggattacagttgacaacagggtacagacagaccctcagaaacccagaggagatgtgttcattccacggcaaccttcaaatgacttgtttgaaatatttgaaatagaaagaggagtcagtgcagacgatgaagcaaaggatgatccaggtgttctggtacacagttgtaattttgaccatggactttgtggatggatcagggagaaagacaatgacttgcactgggaaccaatcagggacccagcaggtggacaatatctgacagtgtcggcagccaaagccccagggggaaaagctgcacgcttggtgctacctctcggccgcctcatgcattcaggggacctgtgcctgtcattcaggcacaaggtgacggggctgcactctggcacactccaggtgtttgtgagaaaacacggtgcccacggagcagccctgtggggaagaaatggtggccatggctggaggcaaacacagatcaccttgcgaggggctgacatcaagagcgtcgtcttcaaaggtgaaaaaaggcgtggtcacactggggagattggattagatgatgtgagcttgaaaaaaggccactgctctgaagaacgctaacaactccagaactaacaatgaactcctatgttgctctatcctctttttccaattctcatcttctctcctcttctcccttttatcaggcctaggagaagagtgggtcagtgggtcagaaggaagtctatttggtgacccaggtttttctggcctgcttttgtgcaatcccaatgaacagtgataccctccttgaaatacaggggcatcgcagacacatcaaagccatctgtgggtgttgccttccatcctgtgtctctttcaggaaggcattcagcatgcgtgagccataccatcctccatcctgattacaaggtgctccttgtagcaaattatgagagtgagttacgggagcagtttttaaaagaaatctttgcagatggctatgatgttatgtgttcggtgttgtaccatgagtagtattgacttcccttgagatatgatgtacaatgtgcttgtgaaattgacttaccctcttcacttaagttagttctggcctgacctgaactctgacttttactgccattcactttataaaataagggtgtgtaacatatcaagatacatttatttttatctgnnnnnnnnnnncctgttaaagacaattatgtagagtgggcacgtaatccctccttagtagtattgtgttttgtgtaaatgtgctattgatattaagtatttacatgttccaaatatttacagactctagttgcaaggtaaagggcagcttgtgatctcaaaaaaatacatggtgaaatgtcatccagttccatgaccttatattggcagcagtagaaattggcagaagtgttgggttgtggtaacggagtgatgaannnnnnnnnnaatggccttgagttagatctctgcaaaggataggaaacctttaaggaagacaagaaactgcagttaatttagaactgtcactgtttcaagttacactttaaaaccacagctttacaatcataacatggctctggtaatatgtagaagctttataaaa

SEQ ID NO: 184463 - DNA, 1164 bp, Homo Sapiens
  misc_feature (980)..(989): n is a, c, g, or t
aattgatgagcaatgctttccttataaaagcgcaactttgtacaaaaaagttggcaatatctgacagtgtcggcagccaaagccccagggggaaaagctgcacgcttggtgctacctctcggccgcctcatgcattcaggggacctgtgcctgtcattcaggcacaaggtgacggggctgcactctggcacactccaggtgtttgtgagaaaacacggtgcccacggagcagccctgtggggaagaaatggtggccatggctggaggcaaacacagatcaccttgcgaggggctgacatcaagagcgtcgtcttcaaaggtgaaaaaaggcgtggtcacactggggagattggattagatgatgtgagcttgaaaaaaggccactgctctgaagaacgctaacaactccagaactaacaatgaactcctatgttgctctatcctctttttccaattctcatcttctctcctcttctcccttttatcaggcctaggagaagagtgggtcagtgggtcagaaggaagtctatttggtgacccaggtttttctggcctgcttttgtgcaatcccaatgaacagtgataccctccttgaaatacaggggcatcgcagacacatcaaagccatctgtgggtgttgccttccatcctgtgtctctttcaggaaggcattcagcatgcgtgagccataccatcctccatcctgattacaaggtgctccttgtagcaaattatgagagtgagttacgggagcagtttttaaaagaaatctttgcagatggctatgatgttatgtgttcggtgttgtaccatgagtagtattgacttcccttgagatatgatgtacaatgtgcttgtgaaattgacttaccctcttcacttaagttagttctggcctgacctgaactctgacttttactgccattcactttataaaataagggtgtgtaacatatcaagatacatttatttttatctgnnnnnnnnnncctgttaaagacaattatgtagagtgggcacgtaatccctccttagtagtattgtgttttgtgtaaatgtgctattgatattaagtatttacatgttccaaatatttacagactctagtttgcaaggtaaagggcagcttgtgatctcaaaaaaatacatggtgaaatgtcatcc

SEQ ID NO: 184464 - DNA, 2204 bp, Homo Sapiens
  misc_feature (105)..(114): n is a, c, g, or t
  misc_feature (361)..(369): n is a, c, g, or t
  misc_feature (1635)..(1647): n is a, c, g, or t
ttggcttaagttagttctggcctgacctgaactctgacttttactgccattcactttataaaataagggtgtgtaacatatcaagatacatttatttttatctgnnnnnnnnnncctgttaaagacaattatgtagagtgggcacgtaatccctccttagtagtattgtgttttgtgtaaatgtgctattgatattaagtatttacatgttccaaatatttacagactctagttgcaaggtaaagggcagcttgtgatctcaaaaaaatacatggtgaaatgtcatccagttccatgaccttatattggcagcagtaggaaattggcagaagtgttgggttgtggtaacggagtgatgaannnnnnnnnaatggccttgagtttgatctctgcaaaggataggaaacctttaggaagacaagaaactgcagttaatttagaactgtcactgtttcaagttacactttaaaaccacagcttttaccatcataacatggctctggtaatatgtaggaagctttataaaagttttggttgattcagaaaaaggatcctgttgcagagtgagaggaagcatagggggaaactccattggaacagattttcacacaacgttttaaattgatataagtttaggcagttgtagttcataacttatgttgctcatgttgtgctgtgtcaggatgggataggaagcaagtcccatgcttagaggcatgggatgtgttggaacgggatttacacacactggaggagcagggcaagttggaattctaagatccatgaacccccaactgtatttcctccctgcatattttaccaatatattaaaaaacaatgtaacttttaaaaggcatcattcctgaggtttgtcttaatttctgattaagtaatcagaatattttctgctatttttgccaggaatcacaaagatgattaaagggttggaaaaaaagatctatgatggaaaattaaaggaactgggattattgagcctggagaagagaagactgaggggcaaaccattgatggttttcaagtatatgaagggttggcacagagagggtggcgaccagctgttctccatatgcactaagaatagaacaagaggaaactggcttagactagagtataagggagcatttcttggcaggggccattgttagaatacttcataaaaaaagaagtgtgaaaatctcagtatctctctctctttctaaaaaattagataaaaatttgtctatttaagatggttaaagatgttcttacccaaggaaaagtaacaaattatagaatttcccaaaagatgttttgatcctactagtagtatgcagtgaaaatctttagaactaaataatttggacaaggcttaatttaggcatttccctcttgacctcctaatggagagggattgaaaggggaagagcccaccaaatgctgagctcactgaaatatctctcccttatggcaatcctagcagtattaaagaaaaaaggaaactatttattccaaatgagagtatgatggacagatattttagtatctcagtaatgtcctagtgtggcggtggttttcaatgtttcttcatggtaaaggtataagcctttcatttgttcaatggatgatgtttcagannnnnnnnnnnnnaagagatccttcaaggaacacagttcagagagattttcatcgggtgcattctctctgcttcgtgtgtgacaagttatcttggctgctgagaaagagtgccctgccccacaccggcagacctttccttcacctcatcagtatgattcagtttctcttatcaattggactctcccaggttccacagaacagtaatattttttgaacaataggtacaatagaaggtcttctgtcatttaacctggtaaaggcagggctggagggggaaaataaatcattaagcctttgagtaacggcagaatatatggctgtagatccatttttaatggttcatttcctttatggtcatataactgcacagctgaagatgaaaggggaaaataaatgaaaattttacttttcgatgccaatgatacattgcactaaactgatggaagaagttatccaaagtactgtataacatcttgtttattatttaatgttttctaaaataaaaaatgttagtggttttccaaatggcctaataaaaacaattatttgtaaataaaaacactgttagt

SEQ ID NO: 184465 - DNA, 955 bp, Homo Sapiens
tttgtacaaaaaagttggctaagaatacttaaaaaaggaaactggcttagactagagtataagggagcatttcttggcaggggccattgttagaatacttcataaaaaaagaagtgtgaaaatctcagtatctctctctctttctaaaaaattatataaaaatttgtctatttaagatggttaaagatgttcttacccaaggaaaagtaacaaattatagaatttcccaaaagatgttttgatcctactagtagtatgcagtgaaaatctttagaactaaataatttggacaaggcttaatttaggcatttccctcttgacctcctaatggagagggattgaaaggggaagagcccaccaaatgctgagctcactgaaatatctctcccttatggcaatcctagcagtattaaagaaaaaaggaaactatttattccaaatgagagtatgatggacagatattttagtatctcagtaatgtcctagtgtggcggtggttttcaatgtttcttcatggtaaaggtataagcctttcatttgttcaatggatgatgtttcagattttatcttctgaaagagatccttcaaggaacacagttcaaagagattttcatcgggtgcattctctctgcttcgtgtgtgacaagttatcttggctgctgagaaagagtgccctgccccacaccggcagacctttccttcacctcatcagtatgattcagtttctcttatcaattggactctcccaggttccacagaacagtaatattttttgaacaataggtacaatagaaggtcttctgtcatttaacctggtaaaggcagggctggagggggaaaataaatcattaagcctttgagtaacggcagaatatatggctgtaaatccaattttaatggttcatttcctttatgggtcatataactgcacagctgaagatgaaaggggaaaaat

SEQ ID NO: 184466 - DNA, 1231 bp, Homo Sapiens
ttggagagagggtttgcaacttttctcccaggctggggctcgccctgcttggctaacccccaagagccactgccgtcccgcagcgcccctgcccccgagttgcctgccccgctgggcccccgggaggagcggagcgcgctcacccttcgcccggggctgggagggcggcgagtcgggcgcacgcgcaccccctgcccgcccctggcgcccctccccgcgggcggtgcagctacccctgcagcgcctcccctagctagaagggagcgggagggggctccgggcgccgcgcagcagacctgctccggccgcgcgcctcgccgctgtcctccgggagcggcagcagtagcccgggcggcgagggctgggggttcctcgagactctcagaggggcgcctcccatcggcgcccaccaccccaacctgttcctcgcgcgccactgcgctgcgccccaggacccgctgcccaacatggattttctcctggcgctggtgctggtatcctcgctctacctgcaggcggccgccgagttcgacgggaggtggcccaggcaaatagtgtcatcgattggcctatgtcgttatggtgggaggattgactgctgctggggctgggctcgccagtcttggggacagtgtcagcctgtgtgccaaccacgatgcaaacatggtgaatgtatcgggccaaacaagtgcaagtgtcatcctggttatgctggaaaaacctgtaatcaagatctaaatgagtgtggcctgaagccccggccctgtaagcacaggtgcatgaacacttacggcagctacaagtgctactgtctcaacggatatatgctcatgccggatggttcctgctcaagtgccctgacctgctccatggcaaactgtcagtatggctgtgatgttgttaaaggacaaatacggtgccagtgcccatcccctggcctgcagctggctcctgatgggaggacctgtgtagatgttgatgaatgtgctacaggaagagcctcctgccctagatttacgcaatgtgtcaacacttttgggagctacatctgcaagtgtcataaaggcttcgatctcatgtatattggaggcaaatatcaatgtcatgacatagacgaatgctcacttggtcagtatcagtgcagcagctttgctcgatgttataacgtacgtgggtcctacaagtgcaaatgtaaagaaggataccagggtgatggactgacttgtgtgta

SEQ ID NO: 184467 - DNA, 1754 bp, Homo Sapiens
  misc_feature (1561)..(1581): n is a, c, g, or t
cccactttgtacaaaaaagttggatcaaaagccagataaatgtttcttctagaacacagttacccccttgcttcatctattgctagaactatctcattgctatctgttatagactagtgatacaaactttaagaaaacaggataaaaagatacccattgcctgtgtctactgataaaattatcccaaaggtaggttggtgtgatagtttccgagtaagaccttaaggacacagccaaatcttaagtactgtgtgaccactcttgttgttatcacatagtcatacttggttgtaatatgtgatggttaacctgtagcttataaatttacttattattcttttactcatttactcagtcatttctttacaagaaaatgattgaatctgttttaggtgacagcacaatggacattaagaatttccatcaataatttatgaataagtttccagaacaaatttcctaataacacaatcagattggttttattcttttattttacgaataaaaaatgtatttttcagtatccttgagatttagaacatctgtgtcacttcagataacattttagtttcaagtttgtatggtagtgtttttatagataagatacgtctattttttcaaaattcatgattgcagtttaaatcatcatatgacgtgtgggtgggagcaaccaaagttatttttacagggactttattttttgatctttatttgagattgttttcatatctatctaaattattaggagtgtgtgtatcagaagtaattttttaatgtcttctaaggatggtcttccaggcttttaaactgaaaagcttaattcagatagtagcttttggctgagaaaaggaatccaaaatattaataaatttagatctcaaaaccactatttttattatttcattatttttcagaggccttaaaattctggataagagaatggaggaaaatactcagagtacttgattattttatttccttttattaaaaaattacttctatgtttttattgtctcttgagccttagttaagagtagtgtagaaatgcatgaacttcatcctaataaggataaaacttaaggaaaaccacaataaaccatgaaggtgtacacatcttataacacagataaagttttggtgtgctacctattcttgagagagtgagtgagtgtatgtgtttaaaggaaacaaaatgggagaaataagttttaaaaaaatcctcattttgttaatattcaaaagatggactgagcttccacttgggttttatcttgttttaattgtttttgtatcaaaacttgaaattcctctatttctattgggatataaaagccttccccttcagtgaagaaaacatttattttttatttgattcctaggatttagtaaactctagctgtctatttaaaatgtactgaggcacaacaagtattatactggaagacttgccaaactggcaaagctttaagttcatcagcattctatgtggttcagagctgtgatttttgcaaagtattttaccaacctcctcgatggctttgataaaggttagatttgatgnnnnnnnnnnnnnnnnnnnnncttactccactaaactataaagaaaataattacttagaaactccattttaaataatcatttcctagaaattcttaaatatatacagaattttaaagaaaacatttcatctgatttagttagcatccacatatcattgaggaattaaagtgtgggacagtcattattaaaaaaa

SEQ ID NO: 184468 - DNA, 1736 bp, Homo Sapiens
  misc_feature (154)..(212): n is a, c, g, or t
ttggctgcaacctccaaccccttctttctgaccaaccgggaccagagcagtgctggggccggggcgggtcaccgggactccccgccaggcctccccgccactctccgcggcgcattccgggaggcagcggccgcagcggcctcgccatgtcccnnnnnnnnnnnnnnnnnnnnnnnnnnnnnnnnnnnnnnnnnnnnnnnnnnnnnnnnnnnacccatgagcatgtcagtgaaaaaaccagtgaatcgccttccaaaccaggagaaaagaaaggatcagatgagaaaaaagcagcaagcctcggcagcagtcaatcctccagaacctatgctggtggaacagcctcggccaccaaggtgtcagcttcctctggtgcaaccagcaagtcttccagtatgaatcccacagaaaccaaggctgtaaaaacagaacctgagaagaagtcacagtcaaccaagctgtctgtggttcatgagaaaaaatcccaagaaggaaagccaaaagaacacacagagccaaaaagcctacccaagcaggcatcagatacaggaagtaacgatgctcacaataaaaaagcagtttccagatcagctgaacagcagccatcagagaaatcaacagaaccaaagactaaaccacaagacatgatttctgctggtggagagagtgttgctggtatcactgcaatatctggcaagccgggtgacaagaaaaaagaaaagaaatcattaacccccagctgtgccagttgaatctaaaccgggataaaccatcgggaaagtcaggcatgggatgctgctttggatgacttaatagatactttaggaggacctgaagaaactgaagaagaaaatacaacgtatactggaccagaagtttcagatccaatgagttccacctacatagaggaattgggtaaaagagaagtcacaattcctccaaaatatagggaactattggctaaacccatagggccagatgatgctatagacgccttgtcatctgacttcacctgtgggtcgcctacagctgctggaaagaaaactgaaaaagaggaatctacagaagttttaaaagctcagtcagcagggacagtcagaagtgctgctccaccccaagagaagaaaagaaaggtggagaaggatacaatgagtgatcaagcactcgaggctctgtcggcttcactgggcacccggcaagcagaacctgagctcgacctccgctcaattaaggaagtcgatgaggcaaaagctaaagaagaaaaactagagaagtgtggtgaggatgatgaaacaatcccatctgagtacagattaaaaccagccacggataaagatggaaaaccactattgccagagcctgaagaaaaacccaagcctcggagtgaatcagaactcattgatgaactttcagaagattttgaccggtctgaatgtaaagagaaaccatctaagccaactgaaaagacagaagaatctaaggccgctgctccagctcctgtgtcggaggctgtgtctcggacctccatgtgtagtatacagtcagcaccccctgagccggctaccttgaagggcacagtgccagatgatgctgtagaagccttggctgatagcctggggaaaaaggaagcagatccagaagatggaaaacctgtgatggataaagtcaaggagaagccaaagaagaagaccgtgaaaagcttggtgaaaaagagaaacaattcctccttgattata

SEQ ID NO: 184469 - DNA, 2010 bp, Homo Sapiens
ttggctccaagcggaaaccgcgggagccgagcccagctaggaatgcagacctcctgaaaaccaagccgaggactgcggggtccggtgtccacgcagagtgtcagcttcctctggtgcaaccagcaagtcttccagtatgaatcccacagaaaccaaggctgtaaaaacagaacctgagaagaagtcacagtcaaccaagctgtctgtggttcatgagaaaaaatcccaagaaggaaagccaaaagaacacacagagccaaaaagcctacccaagcaggcatcagatacaggaagtaacgatgctcacaataaaaaagcagtttccagatcagctgaacagcagccatcagagaaatcaacagaaccaaagactaaaccacaagacatgatttctgctggtggagagagtgttgctggtatcactgcaatatctggcaagccgggtgacaagaaaaaagaaaagaaatcattaaccccagctgtgccagttgaatctaaaccggataaaccatcgggaaagtcaggcatggatgctgctttggatgacttaatagatactttaggaggacctgaagaaactgaagaagaaaatacaacgtatactggaccagaagtttcagatccaatgagttccacctacatagaggaattgggtaaaagagaagtcacaattcctccaaaatatagggaactattggctaaaaaggaagggatcacagggcctcctgcagactcttcgaaacccatagggccagatgatgctatagacgccttgtcatctgacttcacctgtgggtcgcctacagctgctggaaagaaaactgaaaaagaggaatctacagaagttttaaaagctcagtcagcagggacagtcagaagtgctgctccaccccaagagaagaaaagaaaggtggagaaggatacaatgagtgatcaagcactcgaggctctgtcggcttcactgggcacccggcaagcagaacctgagctcgacctccgctcaattaaggaagtcgatgaggcaaaagctaaagaagaaaaactagagaagtgtggtgaggatgatgaaacaatcccatctgagtacagattaaaaccagccacggataaagatggaaaaccactattgccagagcctgaagaaaaacccaagcctcggagtgaatcagaactcattgatgaactttcagaagattttgaccggtctgaatgtaaagagaaaccatctaagccaactgaaaagacagaagaatctaaggccgctgctccagctcctgtgtcggaggctgtgtgtcggacctccatgtgtagtatacagtcagcaccccctgagccggctaccttgaagggcacagtgccagatgatgctgtagaagccttggctgatagcctggggaaaaaggaagcagatccagaagatggaaaacctgtgatggataaagtcaaggagaaggccaaagaagaagaccgtgaaaagcttggtgaaaaagaagaaacaattcctcctgattatagattagaagaggtcaaggataaagatggaaagccactcctgccaaaagagtctaaggaacagcttccacccatgagtgaagacttccttctggatgctttgtctgaggacttctctggtccacaaaatgcttcatctcttaaatttgaagatgctaaacttgctgctgccatctctgaagtggtttcccaaaccccagcttcaacgacccaagctggagccccaccccgtgatacctcgcagagtgacaaagacctcgatgatgccttggataaactctctgacagtctaggacaaaggcagcctgacccagatgagaacaaaccaatggaagataaagtaaaggaaaaagctaaagctgaacatagagacaagcttggagaaagagatgacactatcccacctgaatacagacatctcctggatgataatggacaggacaaaccagtgaagccacctacaaagaaatcagaggattcaaagaaacctgcagatga

SEQ ID NO: 184470 - DNA, 1232 bp, Homo Sapiens
  misc_feature (1041)..(1059): n is a, c, g, or t
ttggataataaattaataacagcccaagaggagatatgtgcccaatgtacaatatcttatgtttggctgctaataataaattaataacaggtaacctggacaaaccaggaagcaccaaaccccttttcagtttgaactcttctttgccaggtgtgaggacttctgcatcttacagtcagcacagaacacactgagacttgaatcaagtcagcaacagagcaaaataaaggttagataagtccttgtgtagcaaatttcgagcataagaaataaaatctaattaattcttagggtactcatctgacttgaactctgttggtttactgtgttagtaaactgtgctttctattatctatacataaaacctgagcagcaactgtgtctttagagctattgccacattagcctttgcactgtatagcatctggctttatggaacttaagtttaccaaatataaaaagaaacttctgcttttaaaaaaattatatatatatattaaatttgaaacctgcatttctcccacagcaatgtaagaagtaggctctgatgtcctaccactttgaatggttttctaatatcttaatgaatagttcctgaacattgcactgatatcatcgattagaattttgatatttaatttcatctttatttcctggtagagaatgcaggaaaagatgtcaggtacataacataaaacagattgggaatttattgtttccaaagggcatggccttccttagcatcagtttgaagcttttgttatgacttagctgacttgtggcagcggagcaagcaaaaacaataacactgcttataaatggcaccacatcttgttaacctcccccccaaatactctctgaaagtcatgcacatacctatgggattttacacaccaccagcttaaaatgctatgtctctatccatcagaaatagtcattattctatttttaaggcagcaacaagaaaagaaaaaacacttttcctgagggatttctaaccatgtatctaatcctcccatttgggcagtataggtgtttgcnnnnnnnnnnnnnnnnnnnaagaaaaaccttgaaacctttgacactgacagatgtgtttgcaaggatacggctgcagtattactaatttccatgtgtatctggaagtatttttaaatggcataccaaaatccagaagtttaaagatgcctataaagtaaacacattttatttaaaaagaactctgaatatgc

SEQ ID NO: 184471 - DNA, 2248 bp, Homo Sapiens
  misc_feature (1018)..(1034): n is a, c, g, or t
ttggaaatgatttcatgccatgtgttttcccccccggataggataaagatggaaagccactcctgccaaaagagtctaaggaacagcttccacccatgagtgaagacttccttctggatgctttgtctgaggacttctctggtccacaaaatgcttcatctcttaaatttgaagatgctaaacttgctgctgccatctctgaagtggtttcccaaaccccagcttcaacgacccaagctggagccccaccccgtgatacctcgcagagtgacaaagacctcgatgatgccttggataaactctctgacagtctaggacaaaggcagcctgacccagatgagaacaaaccaatggaagataaagtaaaggaaaaagctaaagctgaacatagagacaagcttggagaaagagatgacactatcccacctgaatacagacatctcctggatgataatggacaggacaaaccagtgaagccacctacaaagaaatcagaggattcaaagaaacctgcagatgaccaagaccccattgatgctctctcaggagatctggacagctgtccctccactacagaaacctcacagaacacagcaaaggataagtgcaagaaggctgcttccagctccaaagcacctaagaatggaggtaaagcgaaggattcagcaaagacaacagaggaaacttccaagccaaaagatgactaaagaaatacaagttaaggtatctggtatctgcatgtaaaatcttcagctggtggatggtgacttttgaagaacaaaaggctttggcaacagaaaacaattgttctgggtgatttctagaatggtttttgttgagtctctgaacatcctaaatattggtttgttattcttttccagaaagaaaatgaatttgactggttcacctgtgtactgagtattgataaactttgaatttttttaattgccttcaattgggagagaaagctttatatttgtaagaaatatatttgataaagtttcttaaagcaacaccnnnnnnnnnnnnnnnnngctaagtgaatttttgcacattctacacacagtgcctgtaaatctcatttgtattttcagtttgcccttaattttttttgttagtgtttagaaaacaatgttttaaacattcttcagtgttctgatttcttattaccccctttcctcttgggcttttgaactgtatttgatgttgctttgggataatgtttataagtcaaacataagatattgtacattgggcacatatctcctcttgggctgctaataataaattaataacaggtaacctggacaaaccaggaagcaccaaaccccttttcagtttgaactcttctttgccaggtgtgaggacttctgcatcttacagtcagcacagaacacactgagacttgaatcaagtcagcaacagagcaaaataaaggttagataagtccttgtgtagcaaatttcgagcataagaaataaaatctaattaattcttagggtactcatctgacttgaactctgttggtttactgtgttagtaaactgtgctttctattatctatacataaaacctgagcagcaactgtgtctttagagctattgccacattagcctttgcactgtatagcatctggctttatggaacttaagtttaccaaatataaaaagaaacttctgcttttaaaaaaattatatatatatattaaatttgaaacctgcatttctcccacagcaatgtaagaagtaggctctgatgtcctaccactttgaatggttttctaatatcttaatgaatagttcctgaacattgcactgatatcatcgattagaattttgatatttaatttcatctttatttcctggtagagaatgcaggaaaagatgtcaggtacataacataaaacagattgggaatttattgtttccaaagggcatggccttccttagcatcagtttgaagcttttgttatgacttagctgacttgtggcagcggggcaagcaaaaacaataacactgcttataaatggcaccacatcttgttaacctcccccccaaatactctctgaaagtcatgcacatacctatgggattttacacaccaccagcttaaaatgctatgtctctatccatcagaaatagtcattattctatttttaaggcagcaacaagaaaagaaaaaacacttttcctgagggatttctaaccatgtatctaatcctcccattttgggcagtataatgtttgc

SEQ ID NO: 184472 - DNA, 955 bp, Homo Sapiens
ttggctagtaatttgaatatagacacaatgcactttattgcactttcaattcttataaagcaacaataatattaaggtccttgactatgtgtacaatgttttcacatatatagtttcatttaatcatttcaaagttaatctctgccatctcgctaaatcatcagtctcggctcttctgaaatagaaggtgcctgatcttcctaataattctgcctattttcatttgctttaaacaggcgccctattttctttctagttgtggctgcgcaaaaacatttatctcccaaataagatgtgctgcttaccgaggtatcacggggtggggctccagcttgggtcgttgaagctggggtttgggaaaccacttcagagatggcagcagcaagtttagcatcttcaaatttcttttattgaaaaaaattttattagtaacatgttgtatataaaattatgagcacaatgccatcacttaactataactcttaaagatagcttaatgactgtttattctcttgaccaaatagactcataataacatataattttaaaagaaatttaaattctttcttctctattgtattattttatacaatttgctatttctatttccttctcatattgattattctaaatactatgcaataatataacttagagttccacggtttgtttacacatttcctgttgtacatttaggttattcaaagttttcagctcttttaaattgctctgaataagttctagtgagtgagttatggtgctggctatattttgctaaactgccctctcaaatgttgctaggattcatactgcgaaaagcaatgaataagcatgcctgttttcccatggccttgcttgccagaatttgacttttattatgatatagtgtaaaatgatgaactactactgctgcgttgaatattgtggtatacggtgtcagtttcaggtttttttc

SEQ ID NO: 184473 - DNA, 1440 bp, Homo Sapiens
  misc_feature (1044)..(1089): n is a, c, g, or t
ccaactttgtacaaaaaagttggggcaggccgcgcagaaggttcttggttttaatggataggctgaattggattaagaaaagttgaatgccacctatggtaatctatttgtgattttcttctaaattatgtattataaattcgtagagctatagaaagcaatgagtgtgtaatttggagtgattttatatatggcataaactttgttttaacataattagtactgttttcccccaaaagtacaagtttttgagtagcaatgtcaggttaagtaaagaaacttcatcacatcttataggtagtgtgtggccaattgacttaaaaaatacaaataacatttaggaagcaaatagattaaacacaaaaataaaactaaagcataggaattatgtttttgagatacctttgggcttagattggcattgttttattctaaaaacccaactcagtggtgtagagaaacttgtgtaccaaaattttagtttctgcagatgctagtgtttttttggatacaattttgacaaccaagttagtaaacaaaatatcttaacagtttgatgacacaagctactgatgagggtttggaatattaattcagaaggtagtttctcttgtgttcaaaatagctgccatggggctgttacttttaaagtcaaaattttcttctgaaggctcattttggtatttgatcttaaccaagtgattattagagaaatgtatcaactccatgccatctcccaaaataattgtctaagaaaacttgaaagtgtaaggttttaacctttaatttatttctcttaaatacatcttttgatattgttgttgtgacatttctttttctggttagtgggctttccagactttgtaccactgcttctgtttattcatttatatgcttttgtgtcccataaattatttcagaaaatgctgataaaactcaggatattgacatttttgttgagactaaaaaatggcagtcgctaaagtagggactctagagtctggcttacgtcagtgttggtagtttagattgtctttgtcaacnnnnnnnnnnnnnnnnnnnnnnnnnnnnnnnnnnnnnnnnnnnnnnagcacagttctagctcaaatttgtgtattttttgtgtgcctgggctggagatgagagactgagtcataactgatttaaaagtttgtgttatcaggtatcttatttgaacatggtcatttttggccacattgctgtttcatactaggacttgggatgatgtagccagaataaaactcaagttgcaccctccggttggtggaagattgctgaccgtgccgtttctgggcacgagaagacatcatggtgtccagcaactcagcaaagccattcttaagagtcgtgaggtccttctgaatgtaaaactggagctcaggagaagctgtcccaggagggctgttaactctctataga

SEQ ID NO: 184474 - DNA, 1689 bp, Homo Sapiens
  misc_feature (146)..(190): n is a, c, g, or t
ttggcccataaattatttcagaaaatgctgataaaactcaggatattgacatttttgttgagactaaaaaatggcagtcgctaaagtagggactctagagtctggcttacgtcagtgttggtagtttagattgtctttgtcaacgnnnnnnnnnnnnnnnnnnnnnnnnnnnnnnnnnnnnnnnnnnnnnagcacagttctagctcaaatttgtgtattttttgtgtgcctgggctggagatgagagactgagtcataactgatttaaaagtttgtgttatcaggtatcttatttgaacatggtcatttttggccacattgctgtttcatactaggacttgggatgatgtagccagaataaaactcaagttgcaccctccggttggtggaagattgctgaccgtgccgtttctgggcaggagaagacatcatggtgtccagcaactcagcaaagccattcttaagagtcgtgaggtccttctgaatgtaaaactggagcccaggagaagctgtcccaggagggctgttaactccctatagagccaggagacaggataggggtttctagggtccaacaccagcttaccttggagtatgaatctacccatgaaggatgagagatgttttgaaaaactagccaggacacacccacaggatcctactggctccttagcagctgattggtgttacataattaacttaattggagatgcattaggtcacttgaatgtataagcaagcacctatggtaggcgctacagacatttaaatctcttgggaattcgatgctcccatggaatttataccagttatatgaattgacttaagtatcttgaaaaagaaactttagagaaagcatcaggggtgtgtactcagtatttcaaatcagaacacaagattggaacttttggaaaaatgggttcaagctttcctattagccatggaaatgcaaagtttagcagaagcaagcaattaggcagagaacaaaaatgttaagcatggtgttgtctatcttattgaagtggttggaaatgaaagcttttaatttgatagatttatcagtataaaattagggaaaccacgtgtggggaatgaatcaatttagagcttcgggaattgtgaggtgacttttgtaacttttgttctgtgtgtgacctgtgaaccactaggatgtgatctgcccttgtgggcaggtccagcatagttaggagttaggctttagcataaatttctagctgcatctgagtctcctgggatgggtgctctttggctggttttggctgcggatggtgagatcagagcagctcttcctgctgctggcccctgcaatcagttgttgggatgccagtgcagatcactaagtagtaagattttaatcaaacacgaccaggtccgaaatgcaggtcatgagtgtgaaattctcaaatttacataaaaagtagaagtatagacagtttaacatttggtattaaaggagaggaaattgtagcagcttttcacgtttcccagtccccattagagggcttgagaccttgtacctgaacaacccattttgcactcagtgctttctgatgccttttgagaattgttttgtttcacaaaagctgggaaggaagaggtccattctgcagctgttagatctgcctctcacgaaaaagtactaacctggttccttttgttcctggcttt

SEQ ID NO: 184475 - DNA, 801 bp, Homo Sapiens
ctttgtacaaaaaagttggcggagagatttttcttaaggaagcagaagcggcgtttgcggccgctgcaggcgccgggccctgccggccacactatgcgcgagccggccccgggctgctgaggcgcggggacgcggaagcggaggccgagcgcgccgggctcccgcgctcgcgagcgagttttgtccgcccggcggcggtggcggggggatggagcccgcgaccgcgccccggcccgacatggcgccggagctgaccccggaggaggagcaggctaccaagcagtttctcgaagagattaacaagtggacagttcagtacaatgtttccccgctgtcttggaatgtggctgtcaagttcctcatggcaaggaagtttgatgtgctccgtgccatagaattgttccactcctacagagaaactcgaaggaaggaaggcattgtaaagctgaaacctcatgaggaacctcttcgttctgagatcctcagtggaaaattcaccatcttaaatgttcgggacccaacaggagcctccattgccctctttactgccaggttgcatcatccccacaagtcagtccaacatgtggtacttcaggctctgttttacttgctagacagagctgtggatagctttgaaactcagaggaatggactggtgtttatctatgacatgtgtggttctaattatgcaactttgagctggatcttggcaagaaagtcctaaacctgctgaagggagcatttcaagctcgtttgaagaaagtgctgattgtgggggcacccatatggttccgagtgccc

SEQ ID NO: 184476 - DNA, 1112 bp, Homo Sapiens
actttgtacaaaaaagctgctcaccaactggatgtccatctgtctgtataccttcgtgagggactccgtaggggagcctctgtacatgctctttcgagggattaagcaccaagtggataaggggccagtggacagtgtgacaggcaaggccaaatacaccttgaacgacaaccgcctgctcagagaggatgtggagtaccgtcccctgaccttgaatgcactattggctgtggggcctggggcaggagaggcccagggcgtgcccgtgaaggtcctagactgtgacaccatctcccaggcaaaggagaagatgctggaccagctttataaaggagtgcctctcacccagcggccagaccctcgcacccttgatgttgagtggcggtctggggtggccgggcacctcattctttctgacgaggatgtcacttctgaggtccagggtctgtggaggcgcctgaacacactgcagcattacaaggtcccagatggagcaactgtggccctcgtcccctgcctcaccaagcatgtgctccgggaaaaccaggattatgtccctggagagcggaccccaatgctggaggatgtagatgaggggggcatccggccctggcacctggtgaagccaagtgatgagccggagccgcccaggcctcggaggggcagccttcggggcggggagcgtgagcgcgccaaggccatccctgagatctacctgacccgcctgctgtccatgaagggcaccctgcagaagttcgtggatgacctgttccaggtgattctcagcaccagccgccccgtgccgctcgctgtgaagtacttctttgacctgctggatgagcaggcccagcagcatggcatctccgaccaggacaccatccacatctggaagaccaacagcttgcctctgaggttctggatcaatataataaaaaacccgcagtttgtgttcgacgtgcaaacatctgataacatggatgcggtgctccttgtcattgcacagaccttcatggacgcctgcaccctggccgaccacaagctgggccgggactcccccgatcaacaaacttctgtatgcacgggacattccccggtacaagcgggatggtgga

SEQ ID NO: 184477 - DNA, 1456 bp, Homo Sapiens
  misc_feature (1039)..(1054): n is a, c, g, or t
actttgtacaaaaaagttggcaggaaaccctgtgcagggagcgccgccatcttggaccagcccgaggaagatactgagggagcacaggagcagtcaccgctgccactgctactgccgctactgctgccggcgcgtctgcacctctcggcctgccagtgtacctgccggcgcctcggtcgaccgcccccgccccctctcccgctgcgtccgcactcctgttcctggtcctgacgcccccctcccgcccggaaagctgcccagccaccagcaaccccccagtgccaccatggcaactgcaccatacaactactcttacatctttaaatatattattattggggacatgggagtaggaaaatcttgcttgcttcatcaatttacagaaaaaaaatttatggctgattgtcctcacacaattggtgttgaatttggtacaagaataatcgaagttagtggccaaaaaataaaactgcagatttgggatacggcaggacaggagcgatttagggctgttacacggagctactacagaggagctgcgggagctcttatggtctatgatatcactagaagaagtacatataaccacttaagcagctggttgacagatgcaaggaatctcaccaatccaaatactgtaataattctcataggaaataaagcagatttggaggcacagagagatgttacatatgaagaagccaaacagtttgctgaagaaaatggcttattgttcctcgaagcgagtgcaaaaacgggagagaatgtagaagatgccttccttgaggctgccaagaaaatctatcagaacattcaggatggaagcttggatctgaatgctgctgagtctggtgtacaacacaaaccttcagccccgcagggaggccggctaaccagtgaaccccaaccccagagagaaggctgtggctgctagtgacctctttgctgtggcccctcatttgacctttcacctctgtctgttggaagcagtactttttactgcctcattgtcttctgtacatcttactgggtttaattnnnnnnnnnnnnnnnnctctgttgtaaaaacagtttaacacaatactaaactgctaaacaactagatgtaatcaggttatcaaaggcaagtagagtaataaatctctcctgcatggtaaatctagactttttttcccccttgtcctcgtgataagtatgtcaccaatatatgatttaaaccgagcactgatgctggacttcatgatttttaccctccctttggcaaggctttgtctcactgtacggtttaatttggtgatatcttaagcctttcttcccatccttaactgttcaagtatgtctgttgtaaccaataagtttattgctgtgaaattacttctgatggtagagaaggggttctataactgcttttgttttgttttggataaatttcctgttgtgtggggtggcatttttc

SEQ ID NO: 184478 - DNA, 1009 bp, Homo Sapiens
tttgtacaaaaaagttggctttatcttccctcggaatggtcagattctgaactggacagtcagaaccacaggtctgctgttaagggattttaaattgtgcatttttaaccctacagtgaaataacttaagatatccctgtgttcacagtgtgaggggctgttttatgtcatgttggcataaattgttttgtaaaagggaaagtgtttctaaaggtgtttcagcgcttgtgctgatacaaagtaagttattactttgcaccaggtggtttggccactgaattaatactgtatagcaagagaaacaatcttatttttttggacaacatgttttattaagttcttcatttctgttgattttttttattgcatttatgattcagtggctgggaattgagaatttatttgaaatagaataggtaacacctcagcgtactatagaaaatgcactcagctcaactgctgtgtttaaaatacacattttaaatccctctttacagacactaacataaaagtacatctttctgggttgtaaacatgtggtagtaccagagtattgtatagtcaatgttaaataaaagccaaaactggaatgtgcagaaagtaggctttggttaatttgtggattcatttttatttttgtctttgtttaactttttaaaaaataagatttctggagtagattggtatattctgttaaagacttacagtgatccattttgcttacactgttgcatcacaagggactcacccagggaccatgacctgctggtgtgtgtgtatatttacaaaaacaaaacaaacaaaccacccattgggatataaggtagcaatcacaaactaaagactgcggcttgttgaggtgcaataccctgactcccaaagttagttacagtgggttttattgtttttgtgactgaaggatttattcagactgctgtactcttcatttgatgtaacaaaatgctattaatctaaatatttgtaaataaagtacctgtatctagattaa

SEQ ID NO: 184479 - DNA, 2218 bp, Homo Sapiens
  misc_feature (326)..(341): n is a, c, g, or t
ttggatttttaggcttattgttcctcgaagcgagtgcaaaaacgggagagaatgtagaagatgccttccttgaggctgccaagaaaatctatcagaacattcaggatggaagcttggatctgaatgctgctgagtctggtgtacaacacaaaccttcagccccgcagggaggccggctaaccagtgaaccccaaccccagagagaaggctgtggctgctagtgacctctttgctgtggcccctcatttgacctttcacctctgtctgttggaagcagtactttttactgcctcattgtcttctgtacatcttactgggtttaattnnnnnnnnnnnnnnnnctctgttgtaaaaacagtttaacacaatactaaactgctaaacaactagatgtaatcaggttatcaaaggcaagtagagtaataaatctctcctgcatggtaaatctagactttttttcccccttgtcctcgtgataagtatgtcaccaatatatgatttaaaccgagcactgatgctggacttcatgatttttaccctccctttggcaaggctttgtctcactgtacggtttaatttggtgatatcttaagcctttcttcccatccttaactgttcaagtatgtctgttgtaaccaataagtttattgctgtgaaattacttctgatggtagagaaggggttctataactgcttttgttttgttttggataaatttcctgttgtgtgggtggcatttttcttaacgagatttgcttctgtcttagcctcacacagggaaaatatccatttatcttctctctcgtgcttaattaatagctttatctttttttataccattttatccttttctctttaacagaaagtaaatatgtataaaatttgaaggaatcgaactaacaatacattctgtgtatattattttaatgaagaaaataaattgattactggcattggaacagtataaaataccagtttgtacagtatgacctatatgtgaccatgttactcccttccatttcacacaaagaaatagacacaactgcagttcacaagtagtactggctccaccccttggtgctggcagtgtttggggacattatgctggaaagagctcctagcatcagaggattaacactagcagattctgttccatctttgcactgttgcttacctgctgattttcttaactgttcttgtgcaatcgacaatgtgctaacctgcttttctctttttgtaaacgtttttgcattacaggctgcattcttgccttactgtatagaaaaagaaaaaaggctgggtttactattgcacattttaagcttttatacctttatcttcttggaatggtcagattctgaactggacagtcagaaccacaggtctgctgttaagggattttaaattgtgcatttttaaccctacagtgaaataacttaagatatccctgtgttcacagtgtgaggggctgttttatgtcatgttggcataaattgttttgtaaaagggaaagtgtttctaaaggtgtttcagcgcttgtgctgatacaaagtaagttattactttgcaccaggtggtttggccactgaattaatactgtatagcaagagaaacaatcttatttttttggacaacatgttttattaagttcttcatttctgttgattttttttattgcatttatgattcagtggctgggaattgagaatttatttgaaatagaataggtaacacctcagcgtactatagaaaatgcactcagctcaactgctgtgtttaaaatacacattttaaatccctctttacagacactaacataaaagtacatctttctgggttgtaaacatgtggtagtaccagagtattgtatagtcaatgttaaataaaagccaaaactggaatgtgcagaaagtaggctttggttaatttgtggattcatttttatttttgtctttgtttaactttttaaaaaataagatttctggagtagattggtatattctgttaaagacttacagtgatccattttgcttacactgttgcatcacaagggactcacccagggaccatgacctgctggtgtgtgtgtatatttacaaaaacaaaacaaacaaaccacccattgggatataacgtagcaatcacaaactaaagactgcggcttgttgaggtgcataccctgactcccaaagttagttacagtgggttttattgtttt

SEQ ID NO: 184480 - DNA, 1547 bp, Homo Sapiens
  misc_feature (1040)..(1055): n is a, c, g, or t
ttgggcccattgcgagggtgacaggaaaccctgtgcagggagcgccgccatcttggaccagcccgaggaagatactgagggagcacaggagcagtcaccgctgccactgctactgccgctactgctgccggcgcgtctgcacctctcggcctgccagtgtacctgccggcgcctcggtcgaccgcccccgccccctctcccgctgcgtccgcactcctgttcctggtcctgacgcccccctcccgcccggaaagctgcccagccaccagcaaccccccagtgccaccatggcaactgcaccatacaactactcttacatctttaaatatattattattggggacatgggagtaggaaaatcttgcttgcttcatcaatttaccgaaaaaaaatttatggctgattgtcctcacacaattggtgttgaatttggtacaagaataatcgaagttagtggccaaaaaataaaactgcaaatttgggatacggcaggacaggagcgatttagggctgttacacggagctactacagaggagctgcgggagctcttatggtctatgatatcactaaaagaagtacatataaccacttaagcagctggttgacagatgcaaggaatctcaccaatccaaatactgtaataattctcataggaaataaagcagatttggaggcacagagagatgttacatatgaagaagccaaacagtttgctgaagaaaatggcttattgttcctcgaagcgagtgcaaaaacgggagagaatgtagaagatgccttccttgaggctgccaagaaaatctatcagaacattcaggatggaagcttggatctgaatgctgctgagtctggtgtacaacacaaaccttcagccccgcagggaggccggctaaccagtgaaccccaaccccagagagaaggctgtggctgctagtgacctctttgctgtggcccctcatttgacctttcacctctgtctgttggaagcagtactttttactgcctcattgtcttctgtacatcttactgggtttaattnnnnnnnnnnnnnnnnctctgttgtaaaaacagtttaacacaatactaaactgctaaacaactagatgtaatcaggttatcaaaggcaagtagagtaataaatctctcctgcatggtaaatctagactttttttcccccttgtcctcgtgataagtatgtcaccaatatatgatttaaaccgagcactgatgctggacttcatgatttttaccctccctttggcaaggctttgtctcactgtacggtttaatttggtgatatcttaagcctttcttcccatccttaactgttcaagtatgtctgttgtaaccaataagtttattgctgtgaaattacttctgatggtagagaagggttctataactgcttttgttttgttttggataatttcctgttgtgtgggtggcatttttcttaacgagatttgcttctgtcttagcctcacacagggaaaatatccatttatcttctctctcgtgcttaattaatagctttatctttttttta

SEQ ID NO: 184481 - DNA, 1206 bp, Homo Sapiens
  misc_feature (628)..(761): n is a, c, g, or t
ttgggtgtttgatcagcagaaccctggacaggctcaggatttggaggcaccaggtccgtgtgaaaaaattcatgatgaaaatctacgaaaacagtatgagaagagctctcgtttcatgaaagttggctatgagagagattttttgcgatacttacagagcttacttgcagaagtagaacgtaggatcagacgaggccatgctcgtttggcattatctcaaaaccagcagtcttctggggccgctggcccaacaggcaaaaatgaagaaaaaattcaggttctaacagacaaaattgatgtacttctgcaacagattgaagaattagggtctgaaggaaaagtagaagaagcccaggggatgatgaaattagttgagcaattaaaagaagagagagaactgctaaggtccacaacgtcgacaattgaaagctttgctgcacaagaaaaacaaatggaagtttgtgaagtatgtggagcctttttaatagtaggagatgcccagtcccgggtagatgaccatttgatgggaaaacaacacatgggctatgccaaaattaaagctactgtagaagaattaaaagaaaagttaaggaaaagaaccgaagaacctgatcgtgatgagcgtctnnnnnnnnnnnnnnnnnnnnnnnnnnnnnnnnnnnnnnnnnnnnnnnnnnnnnnnnnnnnnnnnnnnnnnnnnnnnnnnnnnnnnnnnnnnnnnnnnnnnnnnnnnnnnnnnnnnnnnnnnnnnnnnnnnnnnngaagtcgttcacgaagtagacactcaagccgaacatcagacagaagatgcagcaggtctcgggaccacaaaaggtcacgaagtagagaaagaaggcggagcagaagtagagatcgacgaagaagcagaagccatgatcgatcagaaagaaaacacagatctcgaagtcgggatcgaagaagatcaaaaagccgggatcgaaagtcatataagcacaggagcaaaagtcgggacagagaacaagatagaaaatccaaggagaaagaagataagattattggactgactactagtcctctacgggacaacaagacgactcttcctcattgaagctacctgtgcaccggagaagctcataacgcacaaagggaggactttctcacaagaaaagaggggatctgatgataaaaaaagtagtgtgaagtccggtagtcgagaaaagcaga

SEQ ID NO: 184482 - DNA, 1743 bp, Homo Sapiens
  misc_feature (134)..(206): n is a, c, g, or t
ttgggcaaaacattttgaggtacattgttttgtctcagctattttgtagcagactcgtgcccccattagtgtgcctctttggaaattatcgcccacatttgtaatatagtcgccattgaaaagttaattatccnnnnnnnnnnnnnnnnnnnnnnnnnnnnnnnnnnnnnnnnnnnnnnnnnnnnnnnnnnnnnnnnnnnnnnnnnggtattaagtccatcttgtgttggtacattggcagagacatatgctttaaaaacttaaatatttcggaggcacatgttggactactttgttttaattaaactgctagtatttctttgtcaaggatgtttctagttttttgctttattgccttgcattctaatgcagtttgttctgtaactcgagagccagtagcattggattgatggaagtgtagggtttatgaattattgcagctgactaccatacctcacacagcgttggtgttgtgagcggcccatgaaaagccaaattaaaaatcaaggattcagtcaaactaagcaggtactcatgccaggtactcctttctctacccacatccatgtttgaatgctattgcctgtgatctttacgcttaactgttgtgtatcttttttgttctttacaagaagtgcagaggggttttttgtgtattgcgtgaaaacttataaaacaaatgttaacagaatggaattttttttcaactgtatgtagggctgcagtggtggccagaattagatatctttaaagaattttaaatacaataaacacttcatattattcgccttgttacactcaatgcaattctcaagtctataagaggtatgtgcttaatatttcctactgtgtaggagaatttgcagtcagccataggtatgtaggaatagtcactcactggctgatacatttaaagcagcagtgtgaatagcaaggacagacaccttcaatttgtgaaatcaaagaactgatgcactatatagaacgaatttgggtttttaaagaaatattaaaagttaggtactgtaagtgttcttaaaacctgtaaacttcattctgtgggctagtggtgtgggacaaaatattcctaatgaaaggaagtaccaattagttgatttgttggtggcattccccttttgggaaagcaatgtaaggttatgtctgtgtatgtcattcacacttaggcaagcatacacaggcacatggctttaagaaccacactgatgccttgataattaaaaagaatacaagcattccatgtacacatgttaattagcagttagtgactgggccaacactttctcataaaaattggccttttacatgttgtctaattatcatttttccccaaattttgcgttgtaggactactgttcgaagatttttggaagaatactgagaacggcataaagtgaagatcgacatttaaaaaatgaggtgaaagaaagctatagtggcatagaaaaagtataaagctcagttagtttttttattattattattattaaaagttaattcaggactgatgtgacctaccagatttcagaacatgtgttaatagtatatatgccactgaaaacttacgtcctgtatcatacttttttctttaagactttttaagaaatattacttaaacatgtggcttgctcagtgtttaattgcaagttttcaatcttggactttgaaaacaggattaacgttagtattcgtgtgaatcagactaagtgggatttcatttttaca

SEQ ID NO: 184483 - DNA, 1977 bp, Homo Sapiens
  misc_feature (883)..(1021): n is a, c, g, or t
  misc_feature (1637)..(1711): n is a, c, g, or t
acaaaaaagttgggtcttgtcggctcctgtgtgtaggagggatttcggcctgagagcgggccgaggagattggcgacggtgtcgcccgtgttttcgttggcgggtgcctgggctggtgggaacagccgcccgaaggaagcaccatgatttcggccgcgcagttgttggatgagttaatgggccgggaccgaaacctagccccggacgagaagcgcagcaacgtgcggtgggaccacgagagcgtttgtaaatattatctctgtggtttttgtcctgcggaattgttcacaaatacacgttctgatcttggtccgtgtgaaaaaattcatgatgaaaatctacgaaaacagtatgagaagagctctcgtttcatgaaagttggctatgagagagattttttgcgatacttacagagcttacttgcagaagtagaacgtaggatcagacgaggccatgctcgtttggcattatctcaaaaccagcagtcttctggggccgctggcccaacaggcaaaaatgaagaaaaaattcaggttctaacagacaaaattgatgtacttctgcaacagattgaagaattagggtctgaaggaaaagtagaagaagcccaggggatgatgaaattagttgagcaattaaaagaagagagagaactgctaaggtccacaacgtcgacaattgaaagctttgctgcacaagaaaaacaaatggaagtttgtgaagtatgtggagcctttttaatagtaggagatgcccagtcccgggtagatgaccatttgatgggaaaacaacacatgggctatgccaaaattaaagctactgtagaagaattaaaagaaaagttaaggaaaagaaccgaagaacctgatcgtgatgagcgtcnnnnnnnnnnnnnnnnnnnnnnnnnnnnnnnnnnnnnnnnnnnnnnnnnnnnnnnnnnnnnnnnnnnnnnnnnnnnnnnnnnnnnnnnnnnnnnnnnnnnnnnnnnnnnnnnnnnnnnnnnnnnnnnnnnnnnnnnnnntcgttcacgaagtagacactcaagccgaacatcagacagaagatgcagcaggtctcgggaccacaaaaggtcacgaagtagagaaagaaggcggagcagaagtagagatcgacgaagaagcagaagccatgatcgatcagaaagaaaacacagatctcgaagtcgggatcgaagaagatcaaaaagccgggatcgaaagtcatataagcacaggagcaaaagtcgggacagagaacaagatagaaaatccaaggagaaagaaaagaggggatctgatgataaaaaaagtagtgtgaagtccggtagtcgagaaaagcagagtgaagacacaaacactgaatcgaaggaaagtgatactaagaatgaggtcaatgggaccagtgaagacattaaatctgaagcgtaagtatgcacagatgaagatggaactaagccgagtaagaagacatacaaaagcctcttctgaaggaaaagacagtgtagtcctgcaaaacattttgaggtacattgttttgtctcagctattttgtagcagactcgtgcccccattagtgtgcctctttggaaattatcgcccacatttgtaatatagtcgccattgaaaagttaattatcnnnnnnnnnnnnnnnnnnnnnnnnnnnnnnnnnnnnnnnnnnnnnnnnnnnnnnnnnnnnnnnnnnnnnnnnnnnggtattaagtccatcttgtgttggtacattggcagagacatatgctttaaaaacttaaatatttcggagagcacatgttggactactttgttttaattaaactgctagtatttctttgtcaaggatgtttctagttttttgctttattgccttgcattctaatgcagtttgttctgtaactcgagagccagtagcatttggattgatgggaagtgtagggtttatgaattattgcagctgactaccataacctcacacagcgttgg

SEQ ID NO: 184484 - DNA, 967 bp, Homo Sapiens
  misc_feature (543)..(551): n is a, c, g, or t
aaaaagttgggtgtgtcttaacctttataaaaatttgggatacaaagtatttattttacaatgggtgggcgggggaaacttttccagaaagtttccaatatgacgttttcataagttgaaaaaactctccttagtgcttattttctaacttaaaattcacctggaactttaaatgggaaaggattcttttaattgtggattataggcataatactgtttgcatctgaattttctgtaagtgaataatagtttaatagaggaactcatgatttgtactattgaatgattaaactaagtatgaagtgataccattcagcatggcatcaggtcattgcagttttagttctgtgtaacacaagcactcactgaaattccagtttctaggattagtgtaggagcctaacgtgcttctactgttttaatgggttaatcctggattacttaacaatttatgtcaattgcactggtttaatttgttgctaaagaaataatgccctgggtttagtaacaaatacagctcaactattcttgaatatattttgnnnnnnnnntgtatgtaacttaccttttgtaaacgttccatttcttttttccctcatttttgactcttaaaggtgcaatttattactgaattgggatttctggcagcacagaactgctttttattttggggtctgtgagtttcttaggtattagcaatcttgcttataaaataagaacaccttttaattaatgagtgggtcattcctggtgcaattgtgatttttctttagccagaatgaatggcaaactctatttagagcaaagtaagtattagaaaaccctaggaactcttaatcaacgtttattacactttcattaaggcaactacgtgaaagagccttggggaagttggcccatatcttaccaagttgatcagatcttctcgttgggctggaaatgttttcctgttgtatattttaaagta

SEQ ID NO: 184485 - DNA, 578 bp, Homo Sapiens
ttggcggccccccgagagaagaggtacggtcgaagccaggagccaggccgagcgggagctgaccaggcttgactcgggtacagaacgaggcaccagtccccttgcgaaccgaagggcctcgcagtggatggaggaggcccagccctgaggtcaacgccaaccaggctagcctggcacggggcctacagggtgggtaggcgggcgtgccgcagccgtccagggccttccctcaggtcccgggcgaggggcctacgctgcggcccggcaacaaggcccgactcggcccctcgggaccagagccccacccgatcggaagcggatcctttaccagggccataggccagtgactaggccgggcctgggcctcccatcggggccggactaggacgaggccccggggaggcccctggcctaccagacccttttctcaggccgacagccgccaggaagatgcaacgtgccctgccaggcgcccgccagcacttgggggccattctggccagcgccagcgtggtggtgaaggctctgtgtgcggcggtactattcctcaacctgctctccttcgccgtggacacagg

SEQ ID NO: 184486 - DNA, 1814 bp, Homo Sapiens
  misc_feature (18)..(27): n is a, c, g, or t
gagacactgtcccaaggnnnnnnnnnngtgttggggggtagttcttaagcgttgaagatttcctttttggaaagtatttaaaggtagaaatattaataatttttcctaaaacatctccctaagaagtcactgataattataattagtttaaatttattcttacactacttaagaaaaatttcatttagaaaaggctaccatgagatcttttgactatatggagtagactgcatacagatctctttatttctattatgaatattttagcgattataatcagctattccactgagtattagatttggtcactaagtaactcatgtttttctttagtcaatcattcattcattcactaaaacatttgttgagagttggctaaactctagattctgtgccaggcactgtacagggtgatggagatcactcataagaaggcctcttgctcttagccagatcatatgtaatactaaatttaaattttttgcattaaaaggctaaaaaatcatttgtttttgttaattatatactggttgatttatagatgtaattagcacatattcataagagacaaatatatacaatgagttactatacatatacaaagtgattttagctgtataaagtgatattgcaaaaaactacagctaatgtttcttgctgggtaattattagcataaatatcaggttcttagaggtctttaagagaatactttagagctaccaaaattagcagcagtgatgtaatatcaccctgaaataccaggagcagaggtgccccagagtgcttcacagctatgatcaggaaacttgacctgccccattgctacagcaacggcataaggactaggaaggtccactagctggggaggtcttggaaccctccgagccagaaagaagcattccagcatgattcctcagatgcaatgaggaaggtttacagaattttcacagggcaacagagatcaagtggtatgaaaaggtaggagttttaagctcaagtctcaaagataacctacctttacattctcagtcagaatttgacccagaaagaggaagtttcttcaggaacagaccgtacgttgatgaagtagaagtcatttcagtaaaaacggagtacagaacttggtcataatatcttgcattttatagatttattaaagattagtttcaagttcacattcgctattcagttgtaaaccgaatggatgggaggggagaaaatacaagctctccacacaggtatgctcctctcttttctgagagagaaggcatgggattttcagcataaattccatgttatgtgagtgctgtttgagttctgaagttcctatcaatatctgttcctgcaagtgatctctgtaagaccaccttacatgctggtcttagttattgttaaaattgcaaggtttcttcacaccctctttgataagaagtgtttagctggcagagctttcccttgacttctgagtctagtgtgggttggcccatgacagtgggaagaaatccaacatgttacatggagaccttgtatgtaaacaaactctgtagcctttgaaagtggaactgctttttacagttaaagggctgctaaatggcttgcagatgagatcttctggctcaccttgatcttcacatgaacccattgtgacctatctggatttcctaggacctgtagtttccatttgggttatattagtgcctcacgaatgtgtcactactggtcaagcaatactcagaaattcacgctgtgaggggttagattagaggaaagtaatttaatgagctatccagagctttcaacctcacgtttatag

SEQ ID NO: 184487 - DNA, 1755 bp, Homo Sapiens
  misc_feature (1391)..(1400): n is a, c, g, or t
aattgatgagcaatgcttcctttataatcgccaactttgtacaaaaaagttggcttctacatccgcctctgcgccggctgccacccgcgctccctccgccgccgccgccttgctgctgctcaaagctgctgccgccccttgggctaaaaggttttcaaatggaacattttgatgcatcacttagtacctatttcaaggcattgctaggccctcgagatactagagtaaaaggatggtttcttctggacaattatatacccacatttatctgctctgtcatatatttactaattgtatggctgggaccaaaatacatgaggaataaacagccattctcttgccgggggattttagtggtgtataaccttggactcacactgctgtctctgtatatgttctgtgagttagtaacaggagtatgggaaggcaaatacaacttcttctgtcagggcacacgcaccgcaggagaatcagatatgaagattatccgtgtcctctggtggtactacttctccaaactcatagaatttatggacactttcttcttcatcctgcgcaagaacaaccaccagatcacggtcctgcacgtctaccaccatgcctcgatgctgaacatctggtggtttgtgatgaactgggtcccctgcggccactcttattttggtgccacacttaatagcttcatccacgtcctcatgtactcttactatggtttgtcgtcagtcccttccatgcgtccatacctctggtggaagaagtacatcactcagggcagctgcttcagtttgtgctgacaatcatccagaccagctgcggggtcatctggcccgtgcacattccctcttggttggtgtatttccagattggatacatgatttccctgattgctctcttcacaaacttctacattcagacctacaacaagaaaggggcctcccgaaggaaagaccacctgaaggaccaccagaatgggtccatggctgctgtgaatggacacaccaacagcttttcacccctggaaaacaatgtgaagccaaggaagctgcggaaggattgaagtcaaagaattgaaaccctccaaaccacgtcatctgattgtaagcacaatatgagttgtgccccaatgctcgttaacagctgctgtaactagtctggcctacaatagtgtgattcatgtaggacttctttcatcaattcaaaacccctagaaaacgtatacagattatataagtagggataagatttctaacatttctgggctctctgacccctgcgctagactgtggaaagggagtattattatagtatacaacactgctgttgccttattagttataacatgataggtgctgaattgtgattcacaatttaaaaacactgtaatccaaacnnnnnnnnnnaactgtagatcatgcatgtgattgtaaatgtaaatttgtacaatgttgttatggtagagaaacacacatgccttaaaatttaaaaagcagggcccaaagcttattagtttaaattagggtatgtttcaagtttgtattaatttgtaatagctctgtttagaaaaaatcaaagaccatgatttatgaaactaatgtgacataatttccagtgacttgttgatgtgaaatcagacacggcaccttcagttttgtactattggctttgaatcaagcagctcaaatctagtggaacagtcagtttaactttttaacagatcttatttttttattttgagtgccactattaatgtaaaaa

SEQ ID NO: 184488 - DNA, 1714 bp, Homo Sapiens
  misc_feature (1357)..(1366): n is a, c, g, or t
tttggccaccggtgtctccttctacatccgcctctgcgccggctgccacccgcgctccctccgccgccgccgccttgctgctgctcaaagctgctgccgccccttgggctaaaaggttttcaaatggaacattttgatgcatcacttagtacctatttcaaggcattgctaggccctcgagatactagagtaaaaggatggtttcttctggacaattatatacccacatttatctgctctgtcatatatttactaattgtatggctgggaccaaaatacatgaggaataaacagccattctcttgccgggggattttagtggtgtataaccttggactcacactgctgtctctgtatatgttctgtgagttagtaacaggagtatgggaaggcaaatacaacttcttctgtcagggcacacgcaccgcaggagaatcagatatgaagattatccgtgtcctctggtggtactacttctccaaactcatagaatttatggacactttcttcttcatcctgcgcaagaacaaccaccagatcacggtcctgcacgtctaccaccatgcctcgatgctgaacatctggtggtttgtgatgaactgggtcccctgcggccactcttattttggtgccacacttaatagcttcatccacgtcctcatgtactcttactatggtttgtcgtcagtcccttccatgcgtccatacctctggtggaagaagtacatcactcaggggcagctgcttcagtttgtgctgacaatcatccagaccagctgcggggtcatctggccgtgcacattccctcttggttggttgtatttccagattggatacatgatttccctgattgctctcttcacaaacttctacattcagacctacaacaagaaaggggcctcccgaaggaaagaccacctgaaggaccaccagaatgggtccatggctgctgtgaatggacacaccaacagcttttcacccctggaaaacaatgtgaagccaaggaagctgcggaaggattgaagtcaaagaattgaaaccctccaaaccacgtcatctgattgtaagcacaatatgagttgtgccccaatgctcgttaacagctgctgtaactagtctggcctacaatagtgtgattcatgtaggacttctttcatcaattcaaaacccctagaaaacgtatacagattatataagtagggataagatttctaacatttctgggctctctgacccctgcgctagactgtggaaagggagtattattatagtatacaacactgctgttgccttattagttataacatgataggtgctgaattgtgattcacaatttaaaaacactgtaatccaaacnnnnnnnnnnaactgtagatcatgcatgtgattgtaaatgtaaatttgtacaatgttgttatggtagagaaacacacatgccttaaaatttaaaaagcagggcccaaagcttattagtttaaattagggtatgtttcaagtttgtattaatttgtaatagctctgtttagaaaaaatcaaagaccatgatttatgaaactaatgtgacataatttccagtgacttgttgatgtgaaatcagacacggcaccttcagttttgtactattggctttgaatcaagcacgctcaaatctagtggaacagtcagtttaactttttaacagatcttatttttttattttgagtgccactattaa

SEQ ID NO: 184489 - DNA, 1382 bp, Homo Sapiens
  misc_feature (195)..(204): n is a, c, g, or t
cattagtttcataaatcatggtctttgattttttctaaacagagctattacaaattaatacaaacttgaaacataccctaatttaaactaataagctttgggccctgctttttaaattttaaggcatgtgtgtttctctaccataacaacattgtacaaatttacatttacaatcacatgcatgatctacagttnnnnnnnnnngtttggattacagtgtttttaaattgtgaatcacaattcagcacctatcatgttataactaataaggcaacagcagtgttgtatactataataatactccctttccacagtctagcgcaggggtcagagagcccagaaatgttagaaatcttatccctacttatataatctgtatacgttttctaggggttttgaattgatgaaagaagtcctacatgaatcacactattgtaggccagactagttacagcagctgttaacgagcattggggcacaactcatattgtgcttacaatcagatgacgtggtttggagggtttcaattctttgacttcaatccttccgcagcttccttggcttcacattgttttccaggggtgaaaagctgttggtgtgtccattcacagcagccatggacccattctggtggtccttcaggtggtctttccttcgggaggcccctttcttgttgtaggtctgaatgtagaagtttgtgaagagagcaatcagggaaatcatgtatccaatctggaaatacaaccaaccaagagggaatgtgcacggccagatgaccccgcagctggtctggatgattgtcagcacaaactgaagcagctgcccctgagtgatgtacttcttccaccagaggtatggacgcatggaagggactgacgacaaaccatagtaagagtacatgaggacgtggatgaagctattaagtgtggcaccaaaataagagtggccgcaggggacccagttcatcacaaaccaccagatgttcagcatcgaggcatggtggtagacgtgcaggaccgtgatctggtggttgttcttgcgcaggatgaagaagaaagtgtccataaattctatgagtttggagaagtagtaccaccagaggacacggataatcttcatatctgattctcctgcggtgcgtgtgccctgacagaagaagttgtatttgccttcccatactcctgttactaactcacagaacatatacagagacagcagtgtgagtccaaggttatacaccactaaaatcccccggcaagagaatggctgtttattcctcatgtattttggtcccagccatacaattagtaaatatatgacagagcagataaatgtgggtatataatggtccagaagaaaccatcctttttgtacaaagttgg

SEQ ID NO: 184490 - DNA, 1518 bp, Homo Sapiens
  misc_feature (1344)..(1353): n is a, c, g, or t
ttggcttcctcttcccatcgcgcgggtcctagccaccggtgtctccttctacatccgccgccttgctgctgctcaaagctgctgccgccccttgggctaaaaggttttcaaatggaacattttgatgcatcacttagtacctatttcaaggcattgctaggccctcgagatactagagtaaaaggatggtttcttctggacaattatatacccacatttatctgctctgtcatatatttactaattgtatggctgggaccaaaatacatgaggaataaacagccattctcttgccgggggattttagtggtgtataaccttggactcacactgctgtctctgtatatgttctgtgagttagtaacaggagtatgggaaggcaaatacaacttcttctgtcagggcacacgcaccgcaggagaatcagatatgaagattatccgtgtcctctggtggtactacttctccaaactcatagaatttatggacactttcttcttcatcctgcgcaagaacaaccaccagatcacggtcctgcacgtctaccaccatgcctcgatgctgaacatctggtggtttgtgatgaactgggtcccctgcggccactcttattttggtgccacacttaatagcttcatccacgtcctcatgtactcttactatggtttgtcgtcagtcccttccatgcgtccatacctctggtggaagaagtacatcactcaggggcagctgcttcagtttgtgctgacaatcatccagaccagctgcggggtcatctggccgtgcacattccctcttggttggttgtatttccagattggatacatgatttccctgattgctctcttcacaaacttctacattcagacctacaacaagaaaggggcctcccgaaggaaagaccacctgaaggaccaccagaatgggtccatggctgctgtgaatggacacaccaacagcttttcacccctggaaaacaatgtgaagccaaggaagctgcggaaggattgaagtcaaagaattgaaaccctccaaaccacgtcatctgattgtaagcacaatatgagttgtgccccaatgctcgttaacagctgctgtaactagtctggcctacaatagtgtgattcatgtaggacttctttcatcaattcaaaacccctagaaaacgtatacagattatataagtagggataagatttctaacatttctgggctctctgacccctgcgctagactgtggaaagggagtattattatagtatacaacactgctgttgccttattattataacatgataggtgctgaattgtgattcacaatttaaaaacactgtaatccaaacnnnnnnnnnnaaactgtagatcatgcatgtgattgtaaatgtaaatttgtacaatgttgttatggtagagaaacacacatgccttaaaatttaaaaagcaggcccaaagcttattagtttaaattaggtatgtttcaagtttgtattaatttgtaatagctctgtttagaaaaat

SEQ ID NO: 184491 - DNA, 1190 bp, Homo Sapiens
tttgtacaaaaaagttgggttgatgtgaaatcagacacggcaccttcagttttgtactattggctttgaatcaagcaggctcaaatctagtggaacagtcagtttaactttttaacagatcttatttttttattttgagtgccactattaatgtaaaaaggggggggctctacagcagtcgtgatgaaacttaaatatatattctttgtcctcgagattttaggaagggtgtagggtgagtaggccatttttaatttctgaagtgctaagtgtttttatacagcaaacaaaaagtcaattttgctttccaccagtgcgagagaggatgtatacttttcaagagagatgattgcctatttaccgtttgacagagtcccgtagatgagcaatggggaactggttgccagggtctaaatttggattgatttatgcactgttatctgttttgacacagatttccttgtaaaatgtgcctagtttaccaaaattaacaaagggggggaaaggaccttagaactttttaaggtaaaatcaaatatagctacagcataagagaatcgagaaatttgatagaggtaacttgtttaatgtaaatctaatagtacttgtaatttctttctgcttagaatctaaagatgtgtttagaacctcttgtttaaaaataatagactgcttatcataaaatcacatctcacacatttgaggcagtggtcaaacaggtaaagcctatgatgtgtgtcattttaaagtgtcggaatttagcctctgaataccttctccattgggggaaagatattcttggaaccactcatgacatatcttagaaggtcattgacaatgtataaactaattgttggtttgatatttatgtaaatatcagtttaccatgctttaattttgcacattcgtactatagggagcctattggttctctattagtcttgtgggttttctgtttgaaaaggagtcatggcatctgtttacatttaccttatcaaacctagaatgtgtatatttataaatgtatgtcttcattgctaggtactaatttgcagatgtctttacatatttcaatacagaaactataacattcaatagtgtgctgtcaaagtgtgcttagctcacctggatatacctacattgttaaatgtctaaacagtaatcattaaaacatttttgattacctgtga

SEQ ID NO: 184492 - DNA, 1137 bp, Homo Sapiens
gagcaatgctttccttataaaaagccaactttgtacaaaaaagttggatccaaacttcttttttttaactgtagatcatgcatgtgattgtaaatgtaaatttgtacaatgttgttatggtagagaaacacacatgccttaaaatttaaaaagcagggcccaaagcttattagtttaaattagggtatgtttcaagtttgtattaatttgtaatagctctgtttagaaaaaatcaaagaccatgatttatgaaactaatgtgacataatttccagtgacttgttgatgtgaaatcagacacggcaccttcagttttgtactattggctttgaatcaagcaggctcaaatctagtggaacagtcagtttaactttttaacagatcttatttttttattttgagtgccactattaatgtaaaaaggggggggctctacagcagtcgtgatgaaacttaaatatatattctttgtcctcgagattttaggaagggtgtagggtgagtaggccatttttaatttctgaagtgctaagtgtttttatacagcaaacaaaaagtcaattttgctttccaccagtgcgagagaggatgtatacttttcaagagagatgattgcctatttaccgtttgacagagtcccgtagatgagcaatggggaactggttgccagggtctaaatttggattgatttatgcactgttatctgttttgacacagatttccttgtaaaatgtgcctagtttaccaaaattaacaaagggggggaaaggaccttagaactttttaaggtaaaatcaaatatagctacagcataagagaatcgagaaatttgatagaggtaacttgtttaatgtaaatctaatagtacttgtaatttctttctgcttagaatctaaagatgtgtttagaacctcttgtttaaaaataatagactgcttatcataaaatcacatctcacacatttgaggcagtggtcaaacaggtaaagcctatgatgtgtgtcattttaaagtgtcggaatttagcctctgaataccttctccattgggggaaagatattcttggaaccactcatgacatatcttagaaggtcattgacaatgtataaactaattgttggtttgatatttatgtaaa

SEQ ID NO: 184493 - DNA, 925 bp, Homo Sapiens
ttgtacaaaaaagttggcctgatgtcaacccagagccttcccaaaatgaacagatcatttgggatgaccctacagcaagggaggagagagcaaggcttgccagcaatttgcagtggcctagttgtcccacacaatactctgagcttcaggttggacattcaaaacttggaggattctccttttcaaaagcctttacatgattcagaaattgctaaacaggctgtctgtgatcctggaaacatacgtgtgactgaagctcccaaacacccaatctctgaagaactggaaactcccataaaagacagccacctgatccctacgcctcaagcccccagtattgcctttccactcgccaacccccctgtggctccgcaccctagagaaaagattataacgatagaggagactcatgaagaattaaaaaaacagtacatatttcagttatcatctctgaatcctcaagaacgtattgactattgtcatctgattgagaaactaggtggattggtgatagaaaagcagtgctttgatcccacctgtacacacattgttgtgggacatccacttcgaaacgagaagtatttagcctcagtggcagctgggaagtgggtgcttcatcgctcctaccttgaagcctgcaggactgctggacacttcgtgcaggaagaagactatgaatggggaagtagttccatacttgatgttctgactggaatcaatgtacagcaacgaagactagcacttgcagcaatgagatggagaaaaaaaatccagcaaagacaagaatctggcattgttgagggagcatttagtgggtggaaggtatttttacatgtggatcagtctcgagaagccaggcttcaaacgctttcttcagtcaggaggagcaaaggtgctacctggtcattctgtacctttatgtaaa

SEQ ID NO: 184494 - DNA, 1535 bp, Homo Sapiens
  misc_feature (273)..(287): n is a, c, g, or t
  misc_feature (995)..(1004): n is a, c, g, or t
ttggcaaagccagagcccaagcctaaaaaggcccctgcaaagaagggagagaaggtacccaaagggaaaaagggaaaagctgatgctggcaaggaggggaataaccctgcagaaaatggagatgccaaaacagaccaggcacagaaagctgaaggtgctggagatgccaagtgaagtgtgtgcatttttgataactgtgtacttctggtgactgtacagtttgaaatactattttttatcaagttttataaaaatgcagaattttgttttacnnnnnnnnnnnnnnnaaaagctatgttgttagcacacagaacacttcattgttgtttttgggggaaggggcatatgtcactaatagaatgtctccaaagctggattgatgtggagaaaacacctttcccttctagttttgagagacttcctcttggctcccaggaggagggattccctgactttgacacacatggccaccttggcacaaaagccttgtggtatagaaaaacaaatttgtttttatgtcctcttctccctttccatctttcagcatagacttaactcccttaagcccagacatctgttgagacctgacccctagtcattggttaccagtgtgtcaggcaatctggactttccagtgatgccactgagatggcacctgtcaaaagagcagtggttccatttctagattgtggatcttcagataaattctgccattttcatttcacttcctgaaagtcagggtcggcttgtgaaaagttgttaaacaacatgctaaatgtgaaatgtcaaccctcactctaaactttccctgttcagagcatcagatgaagacttcattgggttttatagtggctttctgatttttggtagtccattgaagaagggagtttgaaagttgttgtatactgttaacgactgtctgcccatgtcctgcctgaaataccatgattgtttatggaaagtatctttaataaagctggatacagtttgaaagnnnnnnnnnngtgtggcaatttgttttagcttgttctgtaagtacctacataatatccacgattttgcttgttaccctgcaaagcctaaaatatttactatctggccctacagaaaatgtttaagaaccctaatctagatcattaattacaaattcaaatgccttcagaagtctggcaggtcatgtaaacaaatgaaggcaataaatgataagcagtatagggatgtaatgaactggaacactcattcttacttaattcaaattgttttgaaacagcccaagtattgtacactgatgtcctaggttataaagtatgtgtacaaatgatgttcttatttatacatgtaaagtggtaagactcttgtctccatttagttactctggacaaaatatgcaatatgtaattgtaaagaaaacagaactagatgtatctattaacgttttaacttccccctttcagagtggataagtgattattcattatttaaatctaggtccaccctaaactttcagatgtgatacctagtaaatgaattcctga

SEQ ID NO: 184495 - DNA, 1486 bp, Homo Sapiens
  misc_feature (762)..(777): n is a, c, g, or t
ttggtgaatttacactcctataatctagagcaaattgataccaaactttcaaagcgacttacctgtcctatttctaactttctcgttgtctttaatagccacagagaagatccgcgaggttgtctgctgtaagtgtatgcttttgaattttcgtgcttgtccctgaaactaaaaaacatcaaaaaacaattccctttgcttccatgaattatggttagtgcctggttttgaatcattgcctctacttgggactcttgcccctttgggttttgctggttctgaaattctgatgcctgtagccaaagtgggacatttgagtgggcttctggaaatccaacattctagaagaaagccaaccacaaaaacttttgaggaggaggagaaacttctctacccttggtacttttggttggttgtgggtggttttcttcagtccattgtactgatgttcactttttcctctcttcctgccaaaaaaagaaacctgctcctccaaagccagagcccaagcctaaaaaggcccctgcaaagaagggagagaaggtacccaaagggaaaaagggaaaagctgatgctggcaaggaggggaataaccctgcagaaaatggagatgccaaaacagaccaggcacagaaagctgaaggtgctggagatgccaagtgaagtgtgtgcatttttgataactgtgtacttctggtgactgtacagtttgaaatactattttttatcaagttttataaaaatgcagaattttgttttacnnnnnnnnnnnnnnnnaaaagctatgttgttagcacacagaacacttcattgttgtttttgggggaaggggcatatgtcactaatagaatgtctccaaagctggattgatgtggagaaaacacctttcccttctagttttgagagacttcctcttggctcccaggaggagggattccctgactttgacacacatggccaccttggcacaaaagccttgtggtatagaaaaacaaatttgtttttatgtcctcttttccctttccatctttcagcatagacttaactcccttaagcccagacatttgttgagacctgacccctagtcattggttaccagtgtgtcaggcaatttggactttccagtgatgccactgagatggcacctgtcaaaagagcagtggttccatttttagattgtggattttcagataaattttgccattttcatttcacttcctgaaagtcagggttggcttgtgaaaagttgttaaacaacatgctaaatgtgaaatgtcaaccctcactttaaactttccctgttcagagcatcagatgaagacttcattgggttttatagtggctttttgatttttggtagtccattgaagaagggagtttgaaagttgttgtatactgttaacgattgtttgcccatgtcctgcctgaaataccatgattgtttatggaaagtatttttaataaagctggatacagtttggcttgg

SEQ ID NO: 184496 - DNA, 1578 bp, Homo Sapiens
tggcaagaagtttgccttcaaaaatatgatcgcaacaccttggtggccatcgtggtgggtgtggggcgcctcatcactggcatggaccgacgcctcatgggcatgtgtgtcaacgagcggcgacgcctcattgtgcctccccacctgggctatgggagcatcggcctggcggggctcattccaccggatgccaccctctacttcgatgtggttctgctggatgtgtggaacaaggaagacaccgtgcaggtgagcacattgctgcgcccgccccactgcccccgcatggtccaggacggcgactttgtccgctaccactacaatggcaccctgctggacggcacctccttcgacaccagctacagtaagggcggcacttatgacacctacgtcggctctggttggctgatcaagggcatggaccaggggctgctgggcatgtgtcctggagagagaaggaagattatcatccctccattcctggcctatggcgagaaaggctatgggacagtgatccccccacaggcctcgctggtctttcacgtcctcctgattgacgtgcacaacccgaaggacgctgtccagctagagacgctggagctcccccccggctgtgtccgcagagccggggccggggacttcatgcgctaccactacaatggctccttgatggacggcaccctcttcgattccagctactcccgcaaccacacctacaatacctatatcgggcagggttacatcatccccgggatggaccaggggctgcagggtgcctgcatgggggaacgccggagaattaccatccccccgcacctcgcctatggggagaatggaactggtaggggcgttccccagccaccacctcagctcctcctccgaactgcccattgtgtctaggccaccccctcccacagtgggattccaggcaccgctcggcccctctcatcacaaaaacatgcatgcagcttacatctggtcaccccatctgattcctgccacacagactccatcggtttcctccagggcagcgccccacttcgccccttccgcagtggagaagggcagccaagtttggggagggagggtggttatggaaaaacagaaccagcatacccccaggacccagctgtgctgggagcctcagtgtcctcacctgtcaagtgggcaagccatgctgatccgcagggtaagttactgggagtttgcaagacggtgagtggaaaagggctttcttactggaaagctgccttcccctgccccctgccccagtgaaagtttgttagaattgactctggacaaacatcccgtcccatcctcctttggatcctcagggtcgggaaggggtatcaggtctggggacctccatggagagacctcaagtagcctctcctagtgctctgagctgaccacactcccccattctggcctcaggagacaagatccctggctctgccgtgctaatcttcaacgtccatgtcattgacttcccacaaccctgcggatgtggtggaaatcaggacactgtcccggccatctgagacctgcatgagaccaccaagcttggggactttgttc

SEQ ID NO: 184497 - DNA, 1603 bp, Homo Sapiens
ttgggtctggactggaacctctgggcccacatgccatggacaatattaccaggcagaaccaattctacgatacccaagtcatcaaacaagaaaacgagtcaggctacgagaggagaccactggaaatggagcagcagcaggcctatcgtccagaaatgaagacagagatgaagcaaggagcacccaccagcttcctcccgcctgaagcttctcaactcaagccagacaggcagcaattccagagtcgaaagaggccttatgaagaaaaccggggacgggggtactttgagcaccgagaggataggaggggccgctctcctcagcctcctgctgaagaggatgaagatgactttgatgatacccttgttgctattgacacctataactgcgacctccacttcaaggtggcccgagatcggagtagtggctatccgctcacaattgagggctttgcatacctgtggtcaggagcccgtgccagctatggggtcagaaggggccgtgtatgcttcgagatgaagatcaatgaggaaatctccgtgaagcaccttccgtctacagagcctgacccccacgtggtccgtatcggctggtccctggactcctgcagcacccagctaggcgaagagcctttctcctatggctatggaggcactgggaagaagtccaccaatagccggtttgaaaactacggagacaagtttgcagagaacgatgtgattggctgctttgcggattttgaatgtggaaatgacgtggaactgtcttttaccaagaatggaaagtggatgggcattgctttccgaatccagaaggaagccttggggggtcaggccctctatcctcatgtcctggtgaagaattgcgcagtggagttcaacttcggacagagagcagagccctactgttctgtcctcccggggtttaccttcatccagcaccttccccttagtgagcgtatccggggcaccgttggaccaaagagcaaggcagaatgtgagattctgatgatggtgggcctgcctgctgctggcaagaccacatgggccatcaaacatgcagcctccaacccttccaagaagtacaacatcctgggtaccaatgccatcatggataagatgcgggtgatgggcctacgccggcagcggaactatgctggccgctgggatgtcctgatccagcaggccacccagtgcctcaaccgcctcatccagattgctgcccgcaagaaacgcaactatatcctagatcagacaaatgtttatgggtcagcccagagacgaaaaatgagaccatttgaaggcttccagcgcaaagctattgtaatttgtcccactgacgaggacctaaaagaccgaacaataaagcgaaccgacgaggaagggaaggatgtcccagatcatgcggtcttagaaatgaaagccaacttcacgttgccagatgttggggacttcctggatgaggttctgttcattgagctgcagcgggaggaagcggacaagctagtgaggcagtacaacgaggaaggccgcaaggctgggccaccccctgaaaagcgctttgacaaccgaggtggtggtggcttccttttttgcgggggtgg

SEQ ID NO: 184498 - DNA, 1513 bp, Homo Sapiens
  misc_feature (1172)..(1227): n is a, c, g, or t
aaaagttgggtaatggctgctggaaagaggaagcgaggggacctgagtgaagcctggatcatttcagttcactgggtggctgttcagtggctggttgggcatgcctgcctttgctgtcctccacccccactgcactgtcctctcccccacagtgtctttgagctgcagcagctggttgaggggcaccaagaatcctacctcctctgctgggaccagtcacaaaaccaggtacaggtagttctgaaccagaaggcaggccccaagaccatcctaagggccgccacacatgggctgatgcttggggccctgcagggagatggaccccttccagcagagctggaggagctgaggaaccgggtgcgggcaggtcctaagaaagagagctgggtcgtcgtcaaggagacacacgaagtgttggacatgctgttcccaaagttcttgaaaggactgcaggatgccggctggaagaccgagaagcaccagctagaggtggatgagtggagggccacatggcttctgtctcccgaaaagaaggtcttgtgagcagcccagacggaggcccaagcccagggcaggaacctggagcaaggacactttggccacagcaggacaggggaaaggcagctttatttttccttagggcaactgcagcgggtgggccaggccctcatgggaagtgactgccaatcagatgcagtgggccccaggcagaggaaggccgggagaaggggagccaggaccttctcaccccactgccccttccccttttctggggagcaccgcaggctcctcacccccacttcctgtgaggctgtggcttatggtgtccaacgcagttggtcttaggcatagaagccccagaggaacacggccactgccatcatgagcagggcattgaggttgaccacacgggcccagctcgggtcctcgctgatgtcctccagccgcctggctgctgccgctgcctcctcctgggtaaggggcggaggactgcccaccccacctctgctcattccacaaaaccagagcaggcactggcggaagaggcttggtgccggggcctggggctctgagggaaattgaggccctgcagttagtttgcgggaactcagctcctccagccccacctcccagcatggtgccctaccattcatctccatggcactctctgnnnnnnnnnnnnnnnnnnnnnnnnnnnnnnnnnnnnnnnnnnnnnnnnnnnnnnnntcccgttcctccttgctatgccggagactgaagaccaggcggtggagctggggagggtgggagcacgaacgaggtgggagttctgtccccccatgcctggccctaaagtctcttgcacaccagctcgtcactgcctgccctacccacctctgtccagtctacacacccagcccaggcttaactcatgccaactccaccctacatggctgccctgtgccctcgggataaaccccaagcgcatgagcttgtgtttaaagccgttgggcttgctcccccagctttgtca

SEQ ID NO: 184499 - DNA, 1296 bp, Homo Sapiens
  misc_feature (702)..(728): n is a, c, g, or t
ttggatccagtcctctgtgcctgaggaatgagcctgtgcctttctcacagcctataaagacctgcagtctcgggaggagactcgaaacgctgcctggaggaagagaggctgggatgaaaatgtctactatacagtccccctggtgcgacacatggagtctaggatcatgatccccttgaagatctcgcctctgcagtgatgctgcctacacctccacctccttccccttctccctcaggcaaccccgacagacagtggcactcctggtcctgctgtcttggttttgtcttggctctgggaggactctgaggggcagtgctcagttcagacaagggggaactgaaggctgacaagttctgaggattacagctctgcccaggccctttctactttccctgcctgcctccctccccctgctagaagtagtttctgatttccctgaatgaaagatagtgatcttttaggccttcatatatcttctaaaattcctcatctcaaggccaccagtccccagttatcacccttggaaatcctctgtttagcttagttgcacaaaaggtagtatgtccagtggctagaggtggggtgggaagagaggaggccaggccaggccctcaggaattccctggtttccactgggccacccacttgctggacagtctgagccaagtccctcctgctggagaaaagcctggaactgcnnnnnnnnnnnnnnnnnnnnnnnnnnncctcgtcaccacggtcaggaggaggttcagacattctgcccagaggggctggggaaagggatgggagccaggaaagatttaggggcaggagacagacacgtaacaggaactcggaaggtagaacttagaattcagaacttgggtttcaattgtagaatttggaatctggaatacagaattgggaagaagaacagagatgacaaaagaccacttgaagagaggttcctaatactagacagatggagagtggcttggctgtttccccctgcatattggggttgaaaacttaaatgtgtagttccagtccttctatgcagagtctctcctgccctccctccttcctgcaggcaaatatacaagctagaccctgttccctcaccctgtatcctgtctcccctaattgacattctatcagcccaaccctcattctgcagggccacctggtgtgtggaggtggcgggaggggtcagtgactctgggggtctcctcagtgacccccatacctcatcatgaacccttgggtagcttgattctgcctaccatccaggaaaacttgtgctggaattgc

SEQ ID NO: 184500 - DNA, 2356 bp, Homo Sapiens
ccaactttgtacaaaaaagttggcggacccggaattggcgccctgggctcgcggcggtgccgcggggatggcgggagccggagctggagccggagctcgcggcggagcggcggcgggggtcgaggctcgagctcgcgatccaccgcccgcgcaccgcgcacatcctcgccaccctcggcctgcggctcagccctcggcccgcaggatggatggcgggtcagggggcctggggtctggggacaacgccccgaccactgaggctcttttcgtggcactgggcgcgggcgtgacggcgctcagccatcccctgctctacgtgaagctgctcatccaggtgggtcatgagccgatgccccccacccttgggaccaatgtgctggggaggaaggtcctctatctgccgagcttcttcacctacgccaagtacatcgtgcaagtggatggtaagatagggctgttccgaggcctgagtccccggctgatgtccaacgccctctctactgtgactcggggtagcatgaagaaggttttccctccagatgagattgagcaggtttccaacaaggatgatatgaagacttccctgaagaaagttgtgaaggagacctcctacgagatgatgatgcagtgtgtgtcccgcatgttggcccaccccctgcatgtcatctcaatgcgctgcatggtccagtttgtgggacgggaggccaagtacagtggtgtgctgagctccattgggaagattttcaaagaggaagggctgctgggattcttcgttggattaatccctcacctcctgggcgatgtggttttcttgtggggctgtaacctgctggcccacttcatcaatgcctacctggtggatgacagcttcagccaggccctggccatccggagctataccaagttcgtgatggggattgcagtgagcatgctgacctaccccttcctgctagttggcgacctcatggctgtgaacaactgcgggctgcaagctgggctccccccttactccccagtgttcaaatcctggattcactgctggaagtacctgagtgtgcaggtgagcaagcactggacggcggaggcctttcctgttctttgctacatccttcagctgaaatggttttgtggatgcttcattgcatgcaaagataagtggtttcatggaattcaatattgtgaggagatacttggtatctataaggcatttaagttttcatcttacataatttcagaaaggatttgaggtggctaagtgtgggtttattttaagattatacatcagacaagaccttttcttctttgagtcttaaagactcttaggataaggataagagaactctggcccaggtggcaggtggtaaagcccaagaactgcttctccttcaagtaacatgggctgaaaattcgaggtctgtaaccagttgagctgagttcctgggttgttagggcggctggcattggaaaccgactcctccctcctgcaggacattcctgggcccaggagagcctgtgggtggggctgggccacgtggggaactggcagcagtaccaaccttgggttctcgtgttctgtaccgaagctacctctccgtagctggagctcttgggcccagcagtcaggggtccaggctttggccgagggcagaaccttgccttttcctggccttgatttgcctcgcagtgaaatggggcagtggcccggagggagccagaactctgagtggcctcgaggctgagaagaggacagatgggagggaagcagggaggagagccgcagttcttcccagtggccctggtcagcgtgagtgtgtctcgtcctccctatgagcactgaaagagtcctagaccacttgggctctgaagcaagaggggcaatgagcctcctctctagggctctcctacagagtagccccaaagacacccctgggcaggaaatgaaccgctcccttctgcttcaacacaggcagattctgccctccagggatgtaggccgaggccgtccaccccggagctgggtctttgagctcctggacccttctttgcctgacactggccttcctctcggagggacaaggaagcgtggcctccctttcactcaccttacttttccttctggtccagggccagctcttccgaggctccagcctgcttttccgccgggtgtcatcaggatcatgctttgccctggagtaacctgaatcatctaaaaaacacggtctcaacctggccaccgtgggtgaggcctgaccaccttgggacacctgcagacgactccaacccaacaacaaccagatgtgctccagctcagccggcttcagttccatatttgccatgtgtctgtccagatgtgggg

SEQ ID NO: 184501 - DNA, 1427 bp, Homo Sapiens
ttggcaagaaacagcaagacaaggcctgaaagtatctgcagtgtaaccccttccactcatgacaagacattaggacccggagcggaggagaaacggaggtccatgagagatgacacaatgtggcagctctacgaatggcagcagcgtcagttttataacaaacagagcaccctccctcgacacagtactttgagtagtcccaaaaccatggtaaatatttctgaccagacaatgcactctattcccacatcaccttcccacgggtcaatagctgcttatcagggatactcccctcaacgaacttacagatcggaagtgtcttcaccaattcagagaggagatgtgacaatagaccgcagacacagggcccatcaccctaagcatgtctatgtgcctgacagaaggtcagtgccagctggcctgactttacagtctgttagtccccagagcctccaagggaaaacgctgtcacaagatgaaggtagaggcacattatacaaatacagacctgaagaagtagatattgatgccaagttaagccgattatgtgaacaagataaagtggtgcatgctctggaagagaaacttcagcaactccacaaggagaaatacacgcttgagcaagctttgctatcagccagccaagagatagaaatgcatgcagataacccagcagccattcagacagtggtgttacaaagggatgatttacaaaatggactgcttagtacgtgtcgagaactttctcgagccactgccgaattggaacgagcatggagagaatatgataagttagaatacgatgtaactgttaccaggaaccagatgcaagagcagctggatcaccttggtgaagttcagacggaatcagcaggaattcagcgtgcacagattcagaaagaactttggcgaattcaggatgtcatggaagggctgagtaaacataagcagcaaagaggtactacagaaataggtatgataggatcaaagcctttctcaacagttaagtacaaaaatgagggtccagattatagactctacaagagtgaaccagagttaacaacagtggcagaagttgatgaatctaatggagaagaaaaatcagaacctgtttcagagatagaaacttcagttgttaaaggttcccactttcctgttggagtagtccctccaagagcaaaatcaccaacacccgaatcttcgacaatagcttcctatgtaaccttgaggaaaactaagaagatgatggatctaagaacggaaagaccaagaagtgcagtggaacagctctgtttggctgaaagtactcgaccaaaggatgactgtggaagagcaaatggaaagaataagaagacatcaacaagcgtgcctgagggagaaggaaaaaacggttaaatgttatcggtgcttcagaccagtcaccctta

SEQ ID NO: 184502 - DNA, 3536 bp, Homo Sapiens
ttgggttactgctgaaatgattgattcattggaactaaaaacaagctgaatagcaacaagagaaatctatagtggtttcaagttcatttcatgctatatatatcagaattacatgtgaagggaactgagttttaattctctttccacagtctatattcaagagctcaccactgatgggctgctttctctttggcctgccactgggtgtcatcagtatcatgtgctatggaatctacacagccgacacagatggaggttatatagaagaacgatatgaagtgtctaaaagtgaaaatgaaaaccaagaacagatagaagagagcaaagaacagcaggagcccagcagtggaggatctgtagtgcctacagtgcaggagcccaaggatgtattagaaaagaagaaagattgagacttgatgactataaaatatttgttaggacttcaaattattaaagagtctatttattgaatttagacatttaatcatgatctttacagaaaagaacatgttattcgtattttgctaatatcaactgcatggattaaagtagtccctccatacatggggaagtgtttggagcaaagagatgaacagtttgtctgaaacaaacacagagcactccatcaaaatttacctgatctttgtgattagaacagaacaattctatttgcatgtttctctatctgaatattctgtgacaaaaagttaagattcttgggcagaatatttaaattggtcagtcacgtagaagatacatgtgtgatatagaaaaataatgcctctcctgctgccatccgtttccctcatatattttggacaagatttatatgggacaaaattaagtctttaaaatttaggcactttaaggagaactaataactttttccatgtatcaagattatgaggttaaaaataatgtggttttatatagcatagtggttttattttgttagttatttttaaaggagaagaaatgttactttttaactttatactcagttgcattatcataaaattttcatatatgcctagataatggggaaaaaaaagtcttgtgattgactttcgcaaaataaacaggatttactgagtagaggtttcagcccattccttggaatactaacaggtatttcatcagtcattgtaggttgggaagggtctctgttaatcctactctgctttagccagaatagcctagtattttatttctattttatatattgagatttcttctaacatttcctttgataaaaatcttctgctttttgaaaagtggtatgtatcatatttttatgtttctggtgtgtgaactttatggtaacttctactctagaatacgtacgtatgcacccacagacacacacagtttattgacacatctattatgtaatgctgtagacctgtccgtgtctgcttcataaggagtaacgactgacattagcatgtccagtgacaagtcacatccggtgtaaaaaaaagagatcagccagttaccttctccattgtcttagttctgtcacccatttcgtcaagtgacctctcatcttctataaactaatacaggaattctttccaaagcaatgtctaaaaactcttttttttaaagtaacagtttggtatgtttattgtagataaattatttttgaggccttcattttagctaagtttagaatttatattaggcaactatgatttgagtggttattcattgagtaattttccactataaagaattttattgaacatttattaaaaaataatgtaatgcatggtcaaaaaatatgtaattcatggtctggacactgacgttgtttagggatttagtcatcaaggacagccctctgttgtttctaatgccgtactaatcaagactgtatggacacttgcatcttaagtactaaggaattactagtgattgttttattttatccatgtactcttttagtatttaataattaaatacctattcttagtgtttgacactccatatttcttttttttggaaatgaaacaaatatgcagtccaaaattcaggaactactagagtgaaatgatattaagtggaaaccagagataaatgctgttaatttaacaagtagattcttctccaaagaatgatgagtgattcttgggaagataaatgttaatgttcccaatagtcaagcttgttttgcagtagtgaaaagcttagatgagtacggatacctcatttgaaactcagcctagtaaggaagtgaaaacttagcagtcagtgacatggggaaatagttatagaaaatgtcactgaattttttcatatttataattagtcatttacatatttttgtcttgttgatcattacctgtaaatgaaagaccttaataggaaaaaaagagtaaagctcagtgtgaatgcaaacatccacaaaatatgatcttcgtttatattctgtgatgttgtttataaatgaatgcctcagttctctgctacccttttcacagctttgtactgtttgccttatattctatttgtgcttttaaagtgtgtctgttgggaaaacaaaatgtgtaggtggtttgtaagtgaataatttttatttcttcttgtattaaaattttgtttttttctctactttgggagatgtttatttacattgtcagactattcacaaaacagattctaaaatttgtttgctcgtatgctgttcccttcaatgtgatatcagagattactatgaatgttagtttcattccgtgaaacattacttccatataaagacagatctcttaataagtgaatctagtggaagaacataggtatcattctaattccatggtaaattttgtcatgattctatatgaataatggggtccttcaggaagttggaatttttgccttctcttttaattgcagtgaagttctctttataacttctaaaattcggaattctagatccttgcttttgcagaatttggtgctcagacaatatttaaggacatttcagcgagacaaagtgcatgtttttatcgagtaccctgtgcaccacattatatctggcaattctttttgtttcattatgtgcatcaatatttttctcagctactattacctgaaacttgtttaacatgtattagacctagaattttcattttctttctcacatagttgcttcctggtatctgatttagaaataacatttaaatgccaagtatctgggggattgaaggaagggtctatatgagcaggtgaattagcagtactgtttttgtttagtggatattgttagtgactttttgtgtgtgttttgctttgggacctttttattttggtgttgcaaaaagtaacatattttcatcattgcttcatacgacatggagttaggacagggaaaaatcattcaacactccttatgcattaaatgatcaaataaaccagtgtaggatattaagactatcaattggtggggataggcttgacattttatttttataaatatatattttttctgaatgtgtctgagtccagagtggggcaaaaaataattttctactttg

SEQ ID NO: 184503 - DNA, 1805 bp, Homo Sapiens
ttggcgcggtgcttctcttccgctccgggtcggctccgtttccctttccgggcgggcaggcggcggaccccagtgtctttatccctcttttgcacagtcagcttctgcagctctcccgggctagcatggcagcgtggaagagttggacggccctgcggctctgcgccacagttgttgtacttgatatggtcgtctgtaaaggatttgtagaagatttagatgaatcgtttaaagaaaatcgaaatgatgacatttggcttgtagatttttatgcgccatggtgtggccattgtaaaaagctggaaccaatttggaatgaagttggtcttgagatgaaaagcattggttctccagttaaggttggaaagatggatgctacttcctattctagcattgcttcagagtttggagttcgaggttatccaacaattaagctattaaaaggggacttggcatataattatagaggaccacgaacaaaagatgatattattgagtttgctcacagagtatctggggctctaattcggccacttccaagtcaacaaatgtttgaacatatgcagaagagacaccgtgtatttttcgtttatgtaggtggagaatcacctttgaaagagaaatacatagatgctgcttcagaattgattgtatatacatacttcttttctgcctcagaagaagtggttcctgagtatgtgacactaaaagagatgccagctgtgcttgttttcaaagatgaaacttactttgtttatgatgagtatgaagatggtgatctgtcatcatggatcaacagggaaaggtttcagaattaccttgctatggatggcttcctcttgtatgaacttggagacacaggaaagcttgtggctcttgcagttattgatgagaaaaatacatcagttgaacataccagattgaagtcaattattcaggaagttgcaagagattacagagacctcttccatagggattttcagtttggccacatggatggaaatgactacataaataccttgctgatggatgaattgacagtcccaactgtagttgtactgaatacttcaaaccagcaatatttcttgctagatagacagattaagaatgttgaagacatggtccagtttattaataacattttggatggcacagtagaagcccaaggaggtgatagcattttgcagagattgaaaagaatagtatttgatgccaaatctactattgtgtctatattcaagagctcaccactgatgggctgctttctctttggcctgccactgggtgtcatcagtatcatgtgctatggaatctacacagccgacacagatggaggttatatagaagaacgatatgaagtgtctaaaagtgaaaatgaaaaccaagaacagatagaagagagcaaagaacagcaggagcccagcagtggaggatctgtagtgcctacagtgcaggagcccaaggatgtattagaaaagaagaaagattgagacttgatgactataaaatatttgttaggacttcaaattattaaagagtctatttattgaatttagacatttaatcatgatctttacagaaaagaacatgttattcgtattttgctaatatcaactgcatggattaaagtagtccctccatacatggggaagtgtttggagcaaagagatgaacagtttgtctgaaacaaacacagagcactccatcaaaatttacctgatctttgtgattagaacagaacaattctatttgcatgtttctctatctgaatattctgtgacaaaagttaagattcttgggcagaa

SEQ ID NO: 184504 - DNA, 2030 bp, Homo Sapiens
  misc_feature (123)..(133): n is a, c, g, or t
  misc_feature (1951)..(1960): n is a, c, g, or t
ttggctcagacatctctcaccaaatgaagtcttacaagtctgagaataaattttctctcccagatcccatgaagctctaacaagttctagtctgaatcattctgattactggccacagcctcnnnnnnnnnnnccttctttcttcatcctctttagatgtatggtggcatgagaggcatgaagggattggtctatgaaacatcagttcttgatcctgatgagggcatccgtttccgaggctttagtatccctgaatgccagaaactgctacccaaggctaagggtggggaagaacccctgcctgagggcttattttggctgctggtaactggacatatcccaacagaggaacaggtatcttggctctcaaaagagtgggcaaagagggcagctctgccttcccatgtggtcaccatgctggacaactttcccaccaatctacaccccatgtctcagctcagtgcagctgttacagccctcaacagtgaaagtaactttgcccgagcatatgcacagggtatcagccgaaccaagtactgggagttgatttatgaagactctatggatctaatcgcaaagctaccttgtgttgcagcaaagatctaccgaaatctctacagagaaggcagcggtattggggccattgactctaacctggactggtctcacaatttcaccaacatgttaggctatactgatcatcagttcactgagctcacgcgcctgtacctcaccatccacagtgaccatgagggtggcaatgtaagtgcccataccagccatttggtgggcagtgccctttccgacccttacctgtcctttgcagcagccatgaacgggctggcagggcctctccatggactggcaaatcaggaagtgcttgtctggctaacacagctgcagaaggaagttggcaaagatgtgtcagatgagaagttacgagactacatctggaacacactcaactcaggacgggttgttccaggctatggccatgcagtactaaggaagactgatccgcgatatacctgtcagcgagagtttgctctgaaacacctgcctaatgaccccatgtttaagttggttgctcagctgtacaagattgtgcccaatgtcctcttagagcagggtaaagccaagaatccttggcccaatgtagatgctcacagtggggtgctgctccagtattatggcatgacggagatgaattactacacagtcctgtttggggtgtcacgagcattgggtgtactggcacagctcatctggagccgagccttaggcttccctctagaaaggcccaagtccatgagcacagagggtctgatgaagtttgtggactctaagtcagggtaaaactggagactgggggaaagtgactaccagaaagtgaggaagcctataaaaagtatacttttgtttcgggggcctttaaagacttaagattaaattatatctgaggcactgataatatgtttgaggttaaaatataaattaagactttaaaagatgaaaaatggtcccttcttccctaatcagctcctttcccctgcctggtatgagttgcccatcacaggcatggtcctggaggatgaccaggactaatgcatgtggtatgagtaggtttggccccctcactatctctagagtgagaatctggctcctgtttccatggctcaaagccggttgcagagaatctgcagtcacttcggagctttagcttcttctctgccaagccctcaataagccagcaaaccaggactctgccccttctgtttccataggaatcatgttggatagtcagctgtaccaagccccttggccttcccatgcacacaaacacctcctagcaagacctgttggttagctggacatgctttggcaatttttttatactgccaagtgaccataaaggcatggcatttgttgtgactggcacccaatgtttgannnnnnnnnnaaactatccaattaaaattaaagtctgggagtgttctgtttcccattactttaatactcaccccctccca

SEQ ID NO: 184505 - DNA, 3791 bp, Homo Sapiens
ttgggtaaagggaagtagtgttcgtgttaaactgaggaaaagcccatagtcaaagcaatccagatgaatacgtggaatcatagtgggattggttatggaaggtaatgatagttcctgtggggctagtcttgcaagaggatttctaacctgctggagacctgccttgctactcctcaggcatcaataacctgcaggacgtgtgggagacgagtgaaggcgagtgcaatgtcatgctggaatcccgctttgagaagatgtatgagaagatcgacttgactctgctcaacaggctgctgcgcctcatcgtggaccacaacatagccgactacatgacagccaagaacaacgtcgtcatcaactataaggacatgaaccatacgaattcatatgggatcatcagaggcctgcagtttgcctcattcatcgtgcagtattatggcctggtgatggatttgcttgtattgggattgcaccgggccagtgagatggctgggccccctcagatgccaaatgactttctcagtttccaggacatagccactgaggctgcccaccccatccgtctcttctgcagatacattgatcgcatccatatttttttcaggttcacagcagatgaggctcgggacctgattcaacgttacctgacagagcaccctgaccccaataatgaaaacatcgttggctataataacaagaagtgctggccccgagatgcccgcatgcgcctcatgaaacatgatgttaacttaggccgggcggtattctgggacatcaagaaccgcttgccacggtcagtgactacagttcagtgggagaacagcttcgtgtctgtgtacagtaaggacaaccccaacctgctgttcaacatgtgtggcttcgagtgccgcatcctgcctaagtgccgcaccagctatgaggagttcacccacaaggacggggtctggaacctgcagaatgaggttactaaggagcgcacagctcagtgtttcctgcgtgtggacgatgagtcaatgcagcgcttccacaaccgcgtgcgtcagattctcatggcctctgggtccaccaccttcaccaagattgtgaataagtggaatacagctctcattggccttatgacatactttcgggaggctgtggtgaacacccaagagctcttggacttactggtgaagtgtgagaacaaaatccagacacgtatcaagattggactcaactccaagatgccaagtcggttccccccggttgtgttctacacccctaaggagttgggtggactcggcatgctctcaatgggccatgtgctcatcccccaatccgacctcaggtggtccaaacagacagatgtaggtatcacacactttcgttcaggaatgagccatgaagaagaccagctcattcccaacttgtaccgctacatacagccatgggagagcgagttcattgattctcagcgggtctgggctgagtacgcactcaagaggcaagaggccattgctcagaacagacgcctgactttagaagacctagaagattcatgggatcgtggcattcctcgaatcaataccctcttccagaaggaccggcacacactggcttatgataagggctggcgtgtcagaactgactttaagcagtatcaggttttgaagcagaatccgttctggtggacacaccagcggcatgatgggaagctctggaacctgaacaactaccgtacagacatgatccaggccctgggcggtgtggaaggcattctggaacacacactctttaagggcacttacttccctacctgggaggggcttttctgggagaaggccagtggctttgaggaatctatgaagtggaagaagctaactaatgctcagcgatcaggactgaaccagattcccaatcgtagattcaccctctggtggtccccgaccattaatcgagccaatgtatatgtaggctttcaggtgcagctagacctgacgggtatcttcatgcacggcaagatccccacgctgaagatctctctcatccagatcttccgagctcacttgtggcagaagatccatgagagcattgttatggacttatgtcaggtgtttgaccaggaacttgatgcactggaaattgagacagtacaaaaggagacaatccatccccgaaagtcatataagatgaactcttcctgtgcagatatcctgctctttgcctcctataagtggaatgtctcccggccctcattgctggctgactccaaggatgtgatggacagcaccaccacccagaaatactggattgacatccagttgcgctggggggactatgattcccacgacattgagcgctacgcccgggccaagttcctggactacaccaccgacaacatgagtatctacccttcgcccacaggtgtactcatcgccattgacctggcctataacttgcacagtgcctatggaaactggttcccaggcagcaagcctctcatacaacaggccatggccaagatcatgaaggcaaaccctgccctgtatgtgttacgtgaacggatccgcaaggggctacagctctattcatctgaacccactgagccttatttgtcttctcagaactatggtgagctcttctccaaccagattatctggtttgtggatgacaccaacgtctacagagtgactattcacaagacctttgaagggaacttgacaaccaagcccatcaacggagccatcttcatcttcaacccacgcacagggcagctgttcctcaagataatccacacgtccgtgtgggcgggacagaagcgtttggggcagttggctaagtggaagacagctgaggaggtggccgccctgatccgatctctgcctgtggaggagcagcccaagcagatcattgtcaccaggaagggcatgctggacccactggaggtgcacttactggacttccccaatattgtcatcaaaggatcggagctccaactccctttccaggcgtgtctcaaggtggaaaaattcggggatctcatccttaaagccactgagccccagatggttctcttcaacctctatgacgactggctcaagactatttcatcttacacggccttctcccgtctcatcctgattctgcgtgccctacatgtgaacaacgatcgggcaaaagtgatcctgaagccagacaagactactattacagaaccacaccacatctggcccactctgactgacgaagaatggatcaaggtcgaggtgcagctcaaggatctgatcttggctgactacggcaagaaaaacaatgtgaacgtggcatcactgacacaatcagaaattcgagacatcatcctgggtatggagatctcggcaccgtcacagcagcggcagcagatcgctgagatcgagaagcagaccaaggaacaatcgcagctgacggcaacacagactcgcactgtcaacaagcatggcgatgagatcatcacctccaccaccagcaactatgagacccagactttctcatccaagactgagtggagggtcagggccatctctgctgccaacctgcacctaaggaccaatcacatctatgtttcatctgacgacatcaaggagactggctacacctacatccttcccaagaatgtgcttaagaagttcatctgcatatctgacctttggggcccaattgcaggatacctatatggggtgagcccaccagataacccccaggtgaaaggagatccgctgcattgtgatggtgccgcagtggggcactcaccagaccgtgcacctgcctgggcc

SEQ ID NO: 184506 - DNA, 3967 bp, Homo Sapiens
  misc_feature (2401)..(2433): n is a, c, g, or t
ttgggtttgaatatcaaatgagcctggaacctattaagcagacgtgctgttcatctcggcagcacaattcatgcacaacagaaaacaaaaatgagccatgcggggctcgttttggaactgcaattgctgctgtaaaagacctcaatcttgatggatttaatgacatcgtgataggagctccgctggaagatgatcacgggggagctgtgtacatttatcatggaagtggcaagactataaggaaagagtatgcacaacgtattccatcaggtggggatggtaagacactgaaattttttggccagtctatccacggagaaatggatttaaatggtgacggtctgacagatgtgactattgggggccttggtggtgctgccctcttctggtcccgagatgtggccgtagttaaagtgaccatgaattttgagccaaataaagtgaatattcaaaagaaaaactgccatatggagggaaaggaaacagtatgcataaatgctacagtgtgttttgatgtgaaattaaagtctaaagaagacacgatttatgaagctgatttgcagtaccgtgtcaccctagattcactaagacaaatatcacgaagttttttctctggaactcaagagagaaaggttcaaaggaacatcacagttcgaaaatcagaatgcactaagcactccttctacatgttggacaagcatgactttcaggactctgtgagaataacgttggactttaatcttaccgatccagaaaatgggcctgttcttgatgattctctaccaaactcagtacatgaatatattccctttgccaaagattgtggaaataaggaaaaatgtatctcagacctcagcctgcatgtcgccaccactgaaaaggacctgctgattgtccgatcccagaatgataagttcaacgttagcctcacagtcaaaaatacaaaggacagtgcctataacaccaggacaatagtgcattattctccaaatctagttttttcaggaattgaggctatccaaaaagacagttgtgaatctaatcataatatcacatgtaaagttggatatcccttcctgagaagaggagagatggtaactttcaaaatattgtttcagtttaacacatcctatctcatggaaaatgtgaccatttatttaagtgcaacaagtgacagcgaagaacctcctgaaaccctttctgataatgtagtaaacatttctatcccggtaaaatatgaagttggactacagttttacagctctgcaagtgaataccacatttcaattgctgccaatgagacagtccctgaagttattaattctactgaggacattggaaatgaaattaatatcttctacttgattagaaaaagtggatcttttccaatgccagagcttaagctgtcaatttcattccccaatatgacatcaaatggttaccctgtgctgtacccaactggattgtcatcttctgagaatgcaaactgcagaccccatatctttgaggatcctttcagtatcaactctggaaagaaaatgactacatcaactgaccatctcaaacgaggcacaattctggactgcaatacatgtaaatttgctaccatcacatgtaatctcacttcttctgacatcagccaagtcaatgtttcgcttatcttgtggaaaccaacttttataaaatcatatttttccagcttaaatcttactataaggggagaacttcggagtgaaaatgcatctctggttttaagtagcagcaatcaaaaaagagagcttgctattcaaatatccaaagatgggctaccgggcagagtgccattatgggtcatcctgctgagtgcttttgccggattgttgctgttaatgctgctcattttagcactgtggaagattggattcttcaaaagaccactgaaaaagaaaatggagaaatgaaatattttacgaaagaaaataataacaattattcaataatctatcctcaggtttgcctcaaatatgtgacaagaaatgtataattcatgacatagtcatgtaactatgtaatccatcagggattcattacttggaaaatgacaggtcatgcattatccaaaaacaataccaaaaagacatattttataaaatgacaaaaaatattttacataattactcatttttgttgagtaagcaaaattacaaagtgtttttaaaaaaacctgtacaaatatgtttatgtattaaatcaccatccaaaatatttaaggaatatataaaaagatttttatgatcatagaaacatctattttcaaaacaatataaattaagcttttccccttgattcctgttggatatccatgttcagcatgacagtcagcactcgtaaatgccaagaaaagaattacctgaaaaagatnnnnnnnnnnnnnnnnnnnnnnnnnnnnnnnnntcggtagaatccatatacaatatggattgaaaattaagtcacgaagaatacatttagcatctttgtgttgggttctatacctaaaaattttccctcccggcccaaggtgattggaaagtactgcaattgggctaaaattttatctaggatggaaaatcaggatagactcgtttaaaaacaagtatattaaatgggttaaattaagcttttacagaacatgcttaattctgatattgagctctaaatgcaaaacccttttatactgaaaaaacacttaaagcagttttgtgtggcatcacagtgatttgtcatgaaaagccatatatgggggacatgctaaaatggcttctgaatgaaatacgacagcagagaaagatgccactgaaatgctgaaattatctttgctgagcagcttttgaatgctaagggttccagtatgtgacccaaagaaggagttgtctcaactccttggtacagggttcattcaaacccccaagctgtgagagtgtgtttatttttaattttttaaaaggtatttaatttccaaccacacttcttatttttttgaaaagacaattttccatttcagtattacattttaccaagaagtcactgctttttaggtgtgttgcatcaatatttaaataaaatcccagaaatgtattttaaagaatttcaggtttgaaaactcaaaccaacagaaagatatcacacctttgtatgtgcttctttgttcttgaagtagtcattatggttcattggaatctactgtagcataagctcctaggttgctccatttcttaggaaaatagcaatgaatgaatgtatagtagttgcttgtgtgaactactgctgtaaagtttgctgacatttctgcaacaacatttctccatctgatttaccagaacctgtaacaagaccagaacatgtatttatccagaaactcctgggctctgctttgttcaaagaggagcaaatccacatagaaattaaatgttataaatttatttttttcaaactaatttccaaagaatttagctgaagactcagagtcagcctacctcttgactctccacatctgcatctaagatcctgaaggccaaaggaatgtgcctgtgggatgccaaagccatcagtagctggaagaaagaatacctctttctagaggtttggtgtcctcttgctggcctgtcattatttggaaatacgcgcttttggaatttccttcattttcgctatttccaggttcagaaatcatacctaccacttgttctttctttgcccagtaaaactcagggtttctcttattcagagttaccatgttgcacacccccagtgctcagcctgcccagaagcccttctctgatctcagcaagatcttagtagtaaagctaacggatccattgaaattcatactcagcatctgtgactactagacaaagcccatttactgaaccataagtgtgcactttttaaactaaattattaactgaaagggaaaaaatagaaatgagggcatttttgaaagtttttt

SEQ ID NO: 184507 - DNA, 2117 bp, Homo Sapiens
  misc_feature (1656)..(1668): n is a, c, g, or t
  misc_feature (1700)..(1757): n is a, c, g, or t
  misc_feature (1793)..(1804): n is a, c, g, or t
  misc_feature (1827)..(1836): n is a, c, g, or t
actttgtacaaaaaagttggggtggacccacagctgatgcgcttggacaacatgcttctggcagagggtgtggctgggcccgagaaagggggcggctcagcagcagcagctgcagccgctgcagcctctggtggtggtgtgtcccctgacaactccatcgaacactcggactatcgcagcaaacttgcccagatccgtcacatataccactcggagctggagaagtatgagcaggcatgtaatgagttcacgacccatgtcatgaacctgctgagggagcagagccgcaccaggcccgtggcccccaaagagatggaacgcatggtgagcatcatccatcgaaagttcagcgccatccagatgcagctgaagcagagcacctgcgaggctgtgatgatcctgcgctcccgtttcctggatgccagacgaaagcgccgtaacttcagcaaacaggccactgaggtcctaaatgagtatttctactcccacctgagtaacccatatcctagtgaggaggccaaggaggagcttgccaagaagtgtggcatcaccgtgtctcaggtctccaactggtttggcaacaagaggattcgctataagaaaaacatcggaaagttccaagaggaggcaaacatctatgctgtcaagaccgccgtgtcagtcacccaggggggccacagccgcaccagctccccgacacccccttcctctgcaggctctggcggctctttcaatctctcaggatctggagacatgtttctggggatgcctgggctcaacggagattcctattctgcttcccaggtggaatcactccgacactcgatggggccagggggctatggggataacctcgggggaggccagatgtacagcccacgggaaatgagggcaaatggcagctggcaagaggctgtgaccccctcttcagtgacatccccaacggagggaccagggagtgttcactctgatacctccaactgatcttgcccctcagggtcacaggggtgggggctctcacaaggcgacttgaagaggacgcaggcttccagaggacaaaccccaatacaggagaagcacaagacagagaagggccaatggggtcatcccctccctaacgagactctctgtgctgggggtgctaattacatggcaggaagaatggggcctctaaggggagtgtggggtctgtctctcccttttttccatctttttcctctctcgctttctttcttacacagaaacatacacataccgagaaacctatttctcagacccctttttctcctctgtctttctctctccctctcccacacctcacacacacatactcccacttgcaactattctgtttctctcctgggctcccccactttcccttccccaccccacttgtatgctctggaatctgtggagacgccagccctgcccaatcagagatgccaaaaatggggacatgacttctggacagaggacatgggccacgcccccatgcatccccacccccgcccctccggacggcttacttacctcatacgcagctcatcttaaaccaatagaatcgctcggtggacgagagtgtctgactcagatatctacctcggagggagtttctgctactttagggaattattgactgggctttggggttgaacnnnnnnnnnnnnnaaagaaagaaaaagaaaccctgggatccatcnnnnnnnnnnnnnnnnnnnnnnnnnnnnnnnnnnnnnnnnnnnnnnnnnnnnnnnnnntcttaatttttaatttagtttggggaagtagcttgnnnnnnnnnnnnataaatatgttgatttcttgtcnnnnnnnnnnatttcttactttcccatattaggggtgatagccaaaggggttctggtaagagaaagggggacaaacagaactggtaaagaggcccccctggctccaggcctgtccatcaggaagtaaattttacagggcaccaagctttgccccctaaaatcccttaggtgttctttgttcatgcaggcaggtttctgccgcatttgatgtggaaggaagtgaaagggttgcccgtgctggcctctcatcccccttcttcccacaacccttgggcagggctggcactcatt

SEQ ID NO: 184508 - DNA, 1844 bp, Homo Sapiens
ttgggcattttacacagttgcacacctattgcaggggggtaacttgcatggacaggcagagtctccgctgggcattagaccgcaacagatgaccaaggaagtttgggattatgttttcttcaaggaggctccatttcctaagactcagattgcaaaggaaaaattagatcagttaaagcaggagtttgaattctggtatcctgttgatcttcgcgtctctggcaaggatcttgttccaaatcatctttcatattacctttataatcatgtggctatgtggccggaacaaagtgataaatggcctacagctgtgagagcaaatggacatctcctcctgaactctgagaagatgtcaaaatccacaggcaacttcctcactttgacccaagctattgacaaattttcagcagatggaatgcgtttggctctggctgatgctggtgacactgtagaagatgccaactttgtggaagccatggcagatgcaggtattctccgtctgtacacctgggtagagtgggtgaaagaaatggttgccaactgggacagcctaagaagtggtcctgccagcactttcaatgatagagtttttgccagtgaattgaatgcaggaattataaaaacagatcaaaactatgaaaagatgatgtttaaagaagctttgaaaacagggttttttgagtttcaggccgcaaaagataagtaccgtgaattggctgtggaagggatgcacagagaacttgtgttccggtttattgaagttcagacacttctcctcgctccattctgtccacatttgtgtgagcacatctggacactcctgggaaagcctgactcaattatgaatgcttcatggcctgtggcaggtcctgttaatgaagttttaatacactcctcacagtatcttatggaagtaacacatgaccttagactacgactcaagaactatatgatgccagctaaagggaagaagactgacaaacaacccctgcagaagccctcacattgcaccatctatgtggcaaagaactatccaccttggcaacataccaccctgtctgttctacgtaaacactttgaggccaataacggaaaactgcctgacaacaaagtcattgctagtgaactaggcagtatgccagaactgaagaaatacatgaagaaagtcatgccatttgttgccatgattaaggaaaatctggagaagatggggcctcgtattctggatttgcaattagaatttgatgaaaaggctgtgcttatggagaatatagtctatctgactaattcgcttgagctagaacacatagaagtcaagtttgcctccgaagcagaagataaaatcagggaagactgctgtcctgggaaaccacttaatgtttttagaatagaacctggtgtgtccgtttctctggtgaatccccagccatccaatggccacttctcaaccaaaattgaaatcaagcaaggagataactgtgattccataatcaggcgtttaatgaaaatgaatcgaggaattaaagacctttccaaagtgaaactgatgagatttgatgatccactgttggggcctcgacgagttcctgtcctgggaaaggagtacaccgagaagacccccatttctgagcatgctgttttcaatgtggacctcatgagcaagaaaattcatctgactgagaatgggataagggtggatattggcgatacaataatctatctggttcattaaactcatgcacattggagatttatcctggtttcttagaatactactactctgattgtgtctactgattggctatcagaaccttagctggacctaaatagattgatttcatttc

SEQ ID NO: 184509 - DNA, 808 bp, Homo Sapiens
ttggcgactcgtcgccattcccggagcaggtcggcctcggcccaggggcgagtatccgttgctgtgtcggagacactagtccccgacaccgagacagccagccctctcccctgcctcgcggcgggagagcgtgtccggccggccggccggcggggctcgcgcaacctccctcgcctccccttcccccgcagcctccgccccgccaggcccggcccggactcccgagccccggcctcctcgtcctcggtcgccgctgccgccgggcttaacagccccgtccgccgcttctcttcctagtttgagaagccaaggaaggaaacagggaaaaatgtcgccatgaaggccgagaaccgctgccgccgccgacccccgccggccctgaacgccatgagcctgggtccccgccgcgcccgctccgctccgactgccgtcgccgccgaggcccccgttgatgccgctgagctcccccaacgccgccgccaccgcctccgacatggacaagaacagcggctccaacagctcctccgcctcttcgggcagcagcaaagggcaacagccgccccgctccgcctcggcggggccagccggcgagtctaaacccaagagcgatggaaagaactccagtggatccaagcgttataatcgcaaacgtgaactttcctacccccaaaaatgaaagttttaacaaccagtccccgtcgctccagttcacagaaaagcaagacttttaacaagatgcctcctcaaaggggcggcgccagcaacaaactctttagctcttcttttatgggtggagacgagatgaggt

SEQ ID NO: 184510 - DNA, 1164 bp, Homo Sapiens
acaaattgatgagcaatgctttactattaaaaaggcacactttgtacaaaaaagttggcgcttcaagacccgcgccttctcggagcgccagggaagcaccatcggcgtcgacttcaccatgaagacgctggagatccagggcaagcgggtcaagctgcagatctgggacacggccggccaggagcggttccgcaccatcacccagagctactaccgcagtgccaatggggccatccttgcctacgacatcaccaagaggagctccttcctgtcggtgcctcactggattgaggatgtgaggaagtatgcgggctccaacattgtgcagctgctgatcgggaacaagtcagacctcagcgagcttcgggaggtctccttggctgaggcacagagcctggctgagcactatgacatcctgtgtgccattgagacgtctgccaaggactcgagcaacgtggaggaggccttcctgagggtggccacggagctcatcatgcggcacgggggccccttgttcagcgagaagagccccgaccacatccagctgaacagcaaggacatcggagaaggctggggctgcgggtgctgaccaggggccgggccggcagactgggggttccccacctccttgctctccccagcctgccaagcccagccctccagagccagccctcctgggtaccggcaactacagcagccgggtgaagctctggagctctgcatcctgtggcctggctgcgggatggaggctctccttgaggaaggggaagcaggataccctggcgggccaccctgccagccagcagctggccctccaccatcttcacattccaagactggcctgaacccgccggtgtgggccacagtgggaggggccagcagtcctccctgtcccatgcctgctggctctgaccgtttcctctcatgggtttgctttacctgtggcagcaggttgctgctttccagggatgtgtccagtgccctgggttcttcccggtcatcctggggctctgcacagagcagcagagctagagccatgagacccacagacttggtgcctgagcgcagctcccagggaagccccagccccttccaggcggggaacctgcttcctgccttcactgcccccgcagcactcacagacatctcccctggggtctggct

SEQ ID NO: 184511 - DNA, 889 bp, Homo Sapiens
ttggcctcctttcactttccctacccctcaggacacacaggacagccatggctccaaagccgaagccctgggtacagactgagggccctgagaagaagaagggccggcaggcaggaagggaggaggaccccttccgctccaccgctgaggccctcaaggccatacccgcagagaagcgcataatccgcgtggatccaacatgtccactcagcagcaaccccgggacccaggtgtatgaggactacaactgcaccctgaaccagaccaacatcgagaacaacaacaacaagttctacatcatccagctgctccaagacagcaaccgcttcttcacctgctggaaccgctggggccgtgtgggagaggtcggccagtcaaagatcaaccacttcacaaggctagaagatgcaaagaaggactttgagaagaaatttcgggaaaagaccaagaacaactgggcagagcgggaccactttgtgtctcacccgggcaagtacacacttatcgaagtacaggcagaggatgaggcccaggaagctgtggtgaaggtgagatggccaaggaaggtgggcaggccctggactgagggaggggactcgttggagagttcccgctggttgggctctgccactgcccagctgcgcagcctcagccacagaactcccctctggcctcacgctggctggtctctgtctggtgtcacgccctgccccgctgctcctgcccacatgtgccctctatcttcagtggacagaggcccagtgaggactgtgactaagcgggtgcagccctgctccctggacccagccacgcagaagctcatcactaacatcttcagcaaggagatgttcaagaacaccatggctctcatggacctggatgtgaagaa

SEQ ID NO: 184512 - DNA, 1088 bp, Homo Sapiens
  misc_feature (124)..(146): n is a, c, g, or t
ttggcccccaaaccagggccatctatgatatatatgggaagagaggactggaaatggaaggatgggaggttgtggaaaggaggagaacccctgctgaaattcgagaggagtttgagcggctgcnnnnnnnnnnnnnnnnnnnnnnnttgcagcagcgaaccaatcccaagggaacgatcagcgttggagtagatgccaccgacctttttgatcgctatgatgaggagtatgaagatgtgtccggcagtagctttccgcagattgaaattaataaaatgcacatatcccagtccattgaggcacccttgacagcgacagacacagccatcctctctggaagcctctcaacccagaatggaaatggaggaggttccattaactttgcgctcagacgagtaacttcggcaaagggatggggagagttggaatttggagctggagacctacaggggcctttgttcggtctcaagctgttccgtaatctcacaccaagatgctttgtgacaacaaactgtgctctgcagttttcatcccgtggaatccgacccggcctgaccactgtcctagctcggaacctagacaagaacaccgtgggctacctgcagtggcgatggggtatccagtcagccatgaacactagcatcgtccgagacactaaaaccagccacttcactgtggccctgcagctgggaatccctcactcctttgcactgatcagctatcagcacaaattccaagatgacgatcagactcgtgtgaaaggatccctcaaagcaggcttctttgggacggtggtggagtacggagctgagaggaagatctccaggcacagcgttttgggtgcagctgtcagcgttggagttccacagggcgtttctctcaaagtcaagctcaacagggccagtcagacatacttcttccctattcacttgacggaccagcttctgcccagcgccatgttctatgccaccgtggggcctctagtggtctactttgccatgcaccgtctgatcatcaaaccatacctcagggctcagaaagagaaggaattggagaagcagagggaaagcgccgccaccgatgtgctg

SEQ ID NO: 184513 - DNA, 1639 bp, Homo Sapiens
ctttgtacaaaaaagttggctcagcagactttggccgcacctggcatgtgtaccgatatttctcctatgactgtggggctgacttcccaggagtcccactagcacccccacggcactgggatgatgtagtctgtgagtcccgctactcagagattgagccatccactgaaggcgaggtcatctatcgtgtgctggaccctgccatccctatcccagacccctacagctcacggattcagaacctgttgaagatcaccaacctacgggtgaacctgactcgtctacacacgttgggagacaacctactcgacccacggagggagatccgagagaagtactactatgccctctatgagctggttgtacgtggcaactgcttctgctacggacacgcctcagagtgtgcacccgccccaggggcaccagcccatgctgagggcatggtgcacggagcttgcatctgcaaacacaacacacgtggcctcaactgcgagcagtgtcaggatttctatcgtgacctgccctggcgtccggctgaggacggccatagtcatgcctgtagaagtgtgagtgccatgggcacacccacagctgccacttcgacatggccgtatacctggcatctggcaatgtgagtggaggtgtgtgtgatggatgtcagcataacacagctgggcgccactgtgagctctgtcggcccttcttctaccgtgacccaaccaaggacctgcgggatccggctgtgtgccgctcctgtgattgtgaccccatgggttctcaagacggtggtcgctgtgattcccatgatgaccctgcactgggactggtctccggccagtgtcgctgcaaagaacatgtggtgggcactcgctgccagcaatgccgtgatggcttctttgggctcagcatcagtgaccgtctgggctgccggcgatgtcaatgtaatgcacggggcacagtgcctgggagcactccttgtgaccccaacagtggatcctgttactgcaaacgtctagtgactggacgtggatgtgaccgctgcctgcctggccactggggcctgagccacgacctgctcggctgccgcccctgtgactgcgacgtgggtggtgctttggatccccagtgtgatgagggcacaggtcaatgccactgccgccagcacatggttgggcgacgctgtgagcaggtgcaacctggctacttccggcccttcctggaccacctaatttgggaggctgaggacacccgagggcaggtgctcgatgtggtggagcgcctggtgacccccggggaaactccatcctggactggctcaggcttcgtgcggctacaggaaggtcagaccctggagttcctggtggcctctgtgccgaaggctatggactatgacctgctgctgcgcttagagccccaggtccctgagcaatgggcagagttggaactgattgtgcagcgtccagggcctgtgcctgcccacagcctgtgtgggcatttggtgcccaggatgatcgcatccaaggactctgcaaccacatgccaggtacttgatatttcctaatcctgtctgccttgagcctggtatctcctacaagctgcatctgaagctggtacggacagggggaagtgcccagcctga

SEQ ID NO: 184514 - DNA, 918 bp, Homo Sapiens
ttcacccgtaggttggtgatcttcaacaggttctgaatccgtgagctgtaggggtctgggatagggatggcagggtccagcacacgatagatgacctcgcctttcagtggatggctcaatctctgagtagcgggactcacagactacatcatcccagtgccgtgggggtgctagtgggactcctgggaagtcagccccacagtcataggagaaatatcggtacacatgccaggtgcggccaaagtctgctgagcgttccaccagcatggcagcagggcgaaatgtcttgaaggtcataatgaggtgtgtgaaatgaaactcagcctccaggtccagctggatggtgaccgcagggataccattctctgactgccaccaggctgcccgccgctgtggtgcaaagctggtgactacattctggatgcgatggctgtgtgggttgtctctagcagagaaggggcgccgggagtcacaaaggaagcacttcttttcgtcctgcaggtgactgacgatgcagtagggctgggggccattcaggccacaagtggatgaggcagtcagtctgtcagctcggcccaccagcaggtcgcccgtggcggggtagcagcttcccctggaacagccaggcacatccggggcaggggcctgtgccagtgtggcagccagcacgcttagcagtaggcccagtcgaagttcccagggcagaggctgtcccctccctctttcccttgaggtcagctccatcctgaagaggggaacagggataaggggaggtgaacggtctcgggcccgagccctcctccttgctttggggttccgtgtcaactctgcctgtgggtctttggcctgtttccctccaggccctctgtcagttcccaggtctgtccagcggtccctccgacagcttagagtccccaa

SEQ ID NO: 184515 - DNA, 1334 bp, Homo Sapiens
  misc_feature (399)..(409): n is a, c, g, or t
  misc_feature (1130)..(1142): n is a, c, g, or t
ttggcacaggcttcgtggccagggtgcaggaaaacattgctgatagtccaactccaccgccaccacctccaccagatgacattcccatgtttgatgactctccacctcccccaccaccaccaccagtggattatgaagatgaggaggctgcagtagttcagtataatgatccatatgcagatggggatcctgcttgggcccccaagaattatattgagaaagttgttgcaatatatgattatacaaaagacaaggatgatgagctgtcatttatggagggtgcaatcatttatgttataaagaagaatgatgatggctggtatgaaggagtctgcaatcgagtgactggtctgttccctgggaactatgttgaatcaatcatgcactatactgattaannnnnnnnnnncttttgaagtagattcttattactcagtcatactgtgggactattatggttaacagaactgtcttaatatgttttaaaatgtgcccatattttcagaacatgctgttttattggtaaattgaatgtctacctgtaagcataaatctttgaggcagtttatgtattgctgaatagcaatttatacaagaagctgtccataactgattatgcttatgtacttacttacacatttttaactttatgaccagcctaaatattctgggggaagtggggtataatatttaacgaatcatgattcagattgtaccattacatgtttcagtgcagcatggttactaacgctatgtcagactaatattaaaatcagaaaatttaaatgctggtgctggtcagactttttttgttagattctctcatttaaaaaaaatactgtttgtttaaagcatgcataaaaatttatgtattgaaatatacttaaaaattcaagatgcttcccatttgtgtaatatttacctggaggactcgtacttaggtgtcttaacgtgaattgagtctccaaggtctccatgtgaaacaaaagcagcaaaaagagaattatctgtaatgttgtaatttgtacctaagttttttaatgagtgaaatttgcattataaactttttccattcataaatacataagtgaaccaaaggtttttgtcctttccttcactgatttgctttnnnnnnnnnnnnngataatgatttattgcagaattatgattctattttctcaatatgttaacttggaaaaaaattttagccttatcttaatctgtcccaacagcaatgtgacggatttttgcagattcaaatctgcaatggttatttacaagtcaatctactgaattccttttttaaataatcttttgaaactaagaaatgtgtc

SEQ ID NO: 184516 - DNA, 2161 bp, Homo Sapiens
  misc_feature (1356)..(1366): n is a, c, g, or t
ttgggtggaaaatggcagagctgcagatgttactagaggaggagatcccgtctggcaagagggcgctgatcgagagttaccagaacctgactcgggtggcagactactgtgaaaacaactacatacaggctacagacaagagaaaagctttagaggagaccaaagcctatacaacccaatctctagctagtgttgcttatcaaataaatgcattggccaacaatgtactccagttgctggatatccaagcctctcagcttcggagaatggagtcttccatcaatcatatctcacagactgtggatattcataaggagaaagtggcacgaagagagattggtattttgacaacaaataagaatacatcaagaactcacaaaataatagcacctgcgaatatggagcgccctgtaaggtatattcggaaacctatcgattacacagttctggatgatgtgggccatggtgtcaagcatggaaataaccagcctgcaagaactggcacactgtcgagaacaaatcctcctactcagaaaccgccaagtcctcccatgtcaggccggggaacactgggacggaatactccttataaaaccctggaacctgttaaacccccaacagttcctaatgactatatgaccagtcctgctaggcttggaagtcagcatagtccaggcaggacagcatctttaaatcagagaccaaggacacacagtggaagtagtggaggaagtggaagtcgagaaaacagtggtagcagtagtattggcattcccattgctgtgcctacaccttcgccacccactattggaccagcagccccgggctcagctcctggttcccagtatggcacaatgaccaggcagatatctcgacacaactctactacttcttcgacatcttctggtggatacagacgaactccctctgtgactgctcaattttctgctcagcctcatgttaatggaggtccactttattctcaaaattcaattgctgatagtccaactccaccgccaccacctccaccagatgacattcccatgtttgatgactctccacctcccccaccaccaccaccagtggattatgaagatgaggaggctgcagtagttcagtataatgatccatatgcagatggggatcctgcttgggcccccaagaattatattgagaaagttgttgcaatatatgattatacaaaagacaaggatgatgagctgtcatttatggagggtgcaatcatttatgttataaagaagaatgatgatggctggtatgaaggagtctgcaatcgagtgactggtctgttccctgggaactatgttgaatcaatcatgcactatactgattaannnnnnnnnnncttttgaagtagattcttattactcagtcatactgtgggactattatggttaacagaactgtcttaatatgttttaaaatgtgcccatattttcagaacatgctgttttattggtaaattgaatgtctacctgtaagcataaatctttgaggcagtttatgtattgctgaatagcaatttatacaagaagctgtccataactgattatgcttatgtacttacttacacatttttaactttatgaccagcctaaatattctgggggaagtggggtataatatttaacgaatcatgattcagattgtaccattacatgtttcagtgcagcatggttactaacgctatgtcagactaatattaaaatcagaaaatttaaatgctggtgctggtcagactttttttgttagattctctcatttaaaaaaaatactgtttgtttaaagcatgcataaaaatttatgtattgaaatatacttaaaaattcaagatgcttcccatttgtgtaatatttacctggaggactcgtacttaggtgtcttaacgtgaattgagtctccaaggtctccatgtgaaacaaaagcagcaaaaagagaattatctgtaatgttgtaatttgtacctaagttttttaatgagtgaaatttgcattataaactttttccattcataaatacataagtgaaccaaaggtttttgtcctttccttcactgatttgctttaaaaaaataaagataatgatttattgcagaattatgattctattttctcaatatgttaacttggaaaaaatttta

SEQ ID NO: 184517 - DNA, 999 bp, Homo Sapiens
tgagcaatgctttttccataaaaagggactttgtacaaaaaagttgggccggagcacccgtgtttcgtgtttcggtgagtgtggcggagatggagagccgggatcccgcccagccgatgtcgcctggagaagcgacgcagagtggcgcccggcctgccgaccgctatggcctattgaagcacagtcgcgagttcttggacttcttctgggacattgcgaagcctgagcaggagacgcgacttgcggccacggagaagctgctggagtatctgcgtggcaggccgaaggggtccgagatgaaatatgccctgaagcgtctaatcacgggactcggggtcgggcgagaaacagcccggccctgctacagtttggccctggcacagctgttacagtcttttgaagacctccccttgtgcagcatcctgcagcagatacaagaaaaatatgacctgcatcaggtgaagaaggcaatgctgagacctgctctctttgcaaacctgtttggagtgctcgccctctttcagtcaggtcggctggtgaaggaccaggaggcactgatgaagtcggtgaagctgctgcaggccctggcccagtaccaaaaccacttgcaggagcagccccggaaggccctggtggacatcctctccgaggtctcgaaggccacattgcaggaaatcctgccggaggtcctcaaagccgacttgaatataatactcagctcccctgaacagctagagctcttcctcctggcccagcagaaggtgccctccaagctcaagaagctggtgggatccgtgaacctattctcagatgagaatgtccccaggctggtgaatgtgctgaagatggccgcctcctctgtgaagaagaccgcaagctgcccgccattgctctggacctgctccgcctggcgctcaaggaagacaagttcccacggttctggaaggaggtggtggacaagggctgctgaagatgcagttctggccagccagctacctg

SEQ ID NO: 184518 - DNA, 1412 bp, Homo Sapiens
actttgtacaaaaaagttggggcctattgaagcacagtcgcgagttcttggacttcttctgggacattgcgaagcctgagcaggagacgcgacttgcggccacggagaagctgctggagtatctgcgtggcaggccgaaggggtccgagatgaaatatgccctgaagcgtctaatcacgggactcggggtcgggcgagaaacagcccggccctgctacagtttggccctggcacagctgttacagtcttttgaagacctccccttgtgcagcatcctgcagcagatacaagaaaaatatgacctgcatcaggtgaagaaggcaatgctgagacctgctctctttgcaaacctgtttggagtgctcgccctctttcagtcaggtcggctggtgaaggaccaggaggcactgatgaagtcggtgaagctgctgcaggccctggcccagtaccaaaaccacttgcaggagcagccccggaaggccctggtggacatcctctccgaggtctcgaaggccacattgcaggagatcctgccggaggtcctcaaagccgacttgaatataatactcagctcccctgaacagctagagctcttcctcctggcccagcagaaggtgccctccaagctcaagaagctggtgggatccgtgaacctattctcagatgagaatgtccccaggctggtgaatgtgctgaagatggccgcctcctctgtgaagaaggaccgcaagctgcccgccattgctctggacctgctccgcctggcgctcaaggaagacaagttcccacggttctggaaggaggtggtggaacaagggctgctgaagatgcagttctggccagccagctacctgtgtttccgcctgctgggcgcggccctgcccctgctgaccaaggagcagctgcacctggtgatgcagggagacgtgatccgccattacggggagcacgtgtgcactgctaagctcccaaagcagttcaagtttgccccagagatggacgattacgtgggcaccttcctagaggggtgccaggatgaccctgagcggcagctggccgtgctagtggccttctcatctgtcaccaaccaaggcctccctgtcacgcctactttctggcgggtcgtgcggttcctgagccctccggccctgcagggctatgtggcctggctgcgggccatgtttctccagccagacctggactccttggttgacttcagcaccaacaaccagaagaagcccaggattcatcgctccacatgcctgagcgagctgtgttccggctgaggaaatggatcatctttcgattggtgagcattgtggacagcctgcacctggagatggaggaggccttgactgagcaagtggccaggttttgttgttccactcgttcttttgtcacaaagaagccca

SEQ ID NO: 184519 - DNA, 2194 bp, Homo Sapiens
gaatttagcccgggactgtcttcagctttaaggttggtttcaccaggtacccacccctatctgcctgggcatttgactgcctcctgccactatcattaactgaccgggttccacaaccccaccatccacagtgaggaagggcagggctcctgaaaatgagccagcaattctccttcaggtggatggagatacaagtcttaccagtacagtctcatgcataatcacacacagaatgtctccactttggtatctagcaatggctgaaaaagccacagcactgtgtgtgtcctctggtgtctgatgaagtatgactcctggctaaaggctgtaccacattccctatacacataaagtttctatcctgagtgtgtcctctgatgtctgataaggttggacttccgactaaagccccgtccacactttctgcaaatataaggcttctctcctgaatgtgtcctctggtgtctaatgaggtgtgactgccggctaaagccttgcccacactccctgcacacatgaggcttcccccctgcgtgtgctctctggtgtttaatgagagttaacttagcacaaaagccttgcccacactccctgcacacaaaggcacctgagtgtgccctcttgtgcctaaacaggttaggcttctgccgaaaccttctgccacactccctgcacataaaaggcttttcccctgaatgtgtcctctggtgtgaaatgagggtggacttatcattaaagcctcgtccacactcagcacatacaaatggcttctcccctgagtgtgtcctctggtgcgtgctcagggttgatttccgggtaaagcctcgcccacactccgtacatacaaatggcttctcccccgtgtgtgacctctggtgtttgttaaggtttgacttcaggctaaagcactgcccgcactccaggcagacataaggtttaacccctgagtgtgtcctctggtgtgttttgaggtttgatttccagctaaagtgacgcccacattctgtgcatacataaggcttctctcctgtgtgtgtccttaagtgtctgatgaggtgtgacttctggctaaagccttgctcacactccctgcaaatgtaaggcttctctcctgaatgtgtcctcttgtgtctgaccaggtgtgaatgctggcgaaagccacgcccacattccctgcaaacataaggcttctccccagtgtgcgccctctggtgggtaatgaggtttgacttcaggctaaagctctgcccacattccttgcacacataaggcttgagccctgagtgtgtccgctgatgtgtaaagaggttcgacttccaagtaaagcctcgtccacaatccttgcacacataaggtttctcccctgagtgtgtcctctgatgtgtgatcaggtttgacttccacgtaaagcctcgcccacattccctgcacacataaggctttcccccagagtgtgtccttgggtttttgatgaggactgacatactgccaaagctgtctccccactcagtgtacatgtaaggtgtctccccagtttgtgtcttctggaggctaaggaggtttgactccttgataaagcctggcccaaactcttcatatttgatttctccaaatcctgagacttctaaaccatgcaatactttgtctgtttcctctagatctgccctccgttcagggctggaccctatatccaccactgtgttgtcttccttggactgtgctggctgttgttcttcaggtgggctggaaagtgcctttgaagtgccatttttgcttactctcccaaacaggagtctggagtcttctccctcttgaatccattctgctttgccactaaagcagaatggatcctgctgttgtttctgatcttctggatagtgttttcccaggtggagaggatttcctgcccataaacttgaaaacagctgagagagatgactcagccacacatgttggctgagagcttgctgactggagaaaatcagagggcaggagggactaagttgaatttctggcttcgattctgctgaagaaagaacattttcagaggggccataggtagggctgtgtaggcaattttgccttgcccactggtcattcataatatatttacatatttacatcacaagctatctcccagttagacatccttcccagcatctatttttcatttcacttcatgcattacactttc

SEQ ID NO: 184520 - DNA, 1087 bp, Homo Sapiens
  misc_feature (255)..(271): n is a, c, g, or t
  misc_feature (284)..(335): n is a, c, g, or t
  misc_feature (367)..(487): n is a, c, g, or t
ttgggtgtggtgtcttcttctccctgcctagttttgaaacgccctctaggtaagggctttggttttgtttgctcttatcctccctagcagctagcctgggatattgacagtaagtaacaggtgcataaatgatgctggctcggcagagataggagaataatggtctttcactccttggtgccaaggtcacaatccaaagtagggtctagaaatctttcctacttccctcagggaagccttttgacctctcattcnnnnnnnnnnnnnnnnngagacagagtttnnnnnnnnnnnnnnnnnnnnnnnnnnnnnnnnnnnnnnnnnnnnnnnnnnnngtaactgggattacgggcatgcgccaccacannnnnnnnnnnnnnnnnnnnnnnnnnnnnnnnnnnnnnnnnnnnnnnnnnnnnnnnnnnnnnnnnnnnnnnnnnnnnnnnnnnnnnnnnnnnnnnnnnnnnnnnnnnnnnnnnnnnnnnnnatgaaccaccgggcctggccttgacctctcattctaaagtgtgggagggaaagacaggctcctgggtgagcagaggtgtgttttgtgttaaaggcgttcgtggcattcagggatgtggctgtgtacttcacccaggaggagtggaggttgttgagccctgctcagaggaccctgcacagggaggtgatgctggagacttataaccatctggtctcactggaaattccatcttctaaaccaaaactcattgctcagctggagcgaggggaagcgccctggagagaggagagaaaatgtccactggacctctgtcgcagaatcgaagccagaaattcaacttagtccctcctgccctctgattttctccagtcagcaagctctcagccaacatgtgtggctgagtcatctctctcagctgttttcaagtttatgggcaggaaatcctctccacctgggaaaacactatccagaagatcagaaacaacagcaggatccattctgctttagtggcaaagcagaatggattcaagagggagaagactccagactcctgtttgggagagtaagcaaaaatggcacttcaaaggcactttccagccc

SEQ ID NO: 184521 - DNA, 1486 bp, Homo Sapiens
ttggctcagatttaagtgaaaaattggaatatttttcttgtgatcaccaggagttactccagagagtagaaacttctgaaggcctcaattctgatttagaaatgcatgcagataaatcatcacgtgaagatattggagataatgtggccaaggtgaatgacagctggaaggagagatttcttgatgtggaaaatgagctgagtaggatcagatcggagaaagctagcattgagcatgaagccctctacctggaggctgacttagaggtagttcaaacagagaagctatgtttagaaaaagacaatgaaaataagcagaaggttattgtctgccttgaagaagaactctcagtggtcacaagtgagagaaaccagcttcgtggagaattagatactatgtcaaaaaaaaccacggcactggatcagttgtctgaaaaaatgaaggagaaaacacaagagcttgagtctcatcaaagtgagtgtctccattgcattcaggtggcagaggcagaggtgaaggaaaagacggaactccttcagactttgtcctctgatgtgagtgagctgttaaaagacaaaactcatctccaggaaaagctgcagagtttggaaaaggactcacaggcactgtctttgacaaaatgtgagctggaaaaccaaattgcacaactgaataaagagaaagaattgcttgtcaaggaatctgaaagcctgcaggccagactgagtgaatcagattatgaaaagctgaatgtctccaaggccttggaggccgcactggtggagaaaggtgagttcgcattgaggctgagctcaacacaggaggaagtgcatcagctgagaagaggcatcgagaaactgagagttcgcattgaggccgatgaaaagaagcagctgcacatcgcagagaaactgaaagaacgcgagcgggagaatgattcacttaaggataaagttgagaaccttgaaagggaattgcagatgtcagaagaaaaccaggagctagtgattcttgatgccgagaattccaaagcagaagtagagactctaaaaacacaaatagaagagatggccagaagcctgaaagtttttgaattagaccttgtcacgttaaggtctgaaaaagaaaatctgacaaaacaaatacaagaaaaacaaggtcagttgtcagaactagacaagttactctcttcatttaaaagtctgttagaagaaaaggagcaagcagagatacagatcaaagaagaatctaaaactgcagtggagatgcttcagaatcagttaaaggagctaaatgaggcagtagcagccttgtgtggtgaccaagaaattatgaaggccacagaacagagtctagacccaccaatagaggaagagcatcagctgagaaatagcattgaaaagctgagagcccgcctagaagctgatgaaaagaagcagctctgtgtcttacaacaactgacggaaagtgagcatcatgcagattt

SEQ ID NO: 184522 - DNA, 3145 bp, Homo Sapiens
ttggcaaatagaagagatggccagaagcctgaaagtttttgaattagaccttgtcacgttaaggtctgaaaaagaaaatctgacaactgaccttgttactctcttcatttaaaagtctgttagaagaaaaggagcaagcagagatacagatcaaagaagaatctaaaactgcagtggagatgcttcagaatcagttaaaggagctaaatgaggcagtagcagccttgtgtggtgaccaagaaattatgaaggccacagaacagagtctagacccaccaatagaggaagagcatcagctgagaaatagcattgaaaagctgagagcccgcctagaagctgatgaaaagaagcagctctgtgtcttacaacaactgaaggaaagtgagcatcatgcagatttacttaagggtagagtggagaaccttgaaagagagctagagatagccaggacaaaccaagagcatgcagctcttgaggcagagaattccaaaggagaggtagagaccctaaaagcaaaaatagaagggatgacccaaagtctgagaggtctggaattagatgttgttactataaggtcagaaaaagaaaatctgacaaatgaattacaaaaagagcaagagcgaatatctgaattagaaataataaattcatcatttgaaaatattttgcaagaaaaagagcaagagaaagtacagatgaaagaaaaatcaagcactgccatggagatgcttcaaacacaattaaaagagctcaatgagagagtggcagccctgcataatgaccaagaagcctgtaaggccaaagagcagaatcttagtagtcaagtagagtgtcttgaacttgagaaggctcagttgctacaaggccttgatgaggccaaaaataattatattgttttgcaatcttcagtgaatggcctcattcaagaagtagaagatggcaagcagaaactggagaagaaggatgaagaaatcagtagactgaaaaatcaaattcaagaccaagagcagcttgtctctaaactgtcccaggtggaaggagagcaccaactttggaaggagcaaaacttagaactgagaaatctgacagtggaattggagcagaagatccaagtgctacaatccaaaaatgcctctttgcaggacacattagaagtgctgcagagttcttacaagaatctagagaatgagcttgaattgacaaaaatggacaaaatgtcctttgttgaaaaagtaaacaaaatgactgcaaaggaaactgagctgcagagggaaatgcatgagatggcacagaaaacagcagagctgcaagaagaactcagtggagagaaaaataggctagctggagagttgcagttactgttggaagaaataaagagcagcaaagatcaattgaaggagctcacactagaaaatagtgaattgaagaagagcctagattgcatgcacaaagaccaggtggaaaaggaagggaaagtgagagaggaaatagctgaatatcagctacggcttcatgaagctgaaaagaaacaccaggctttgcttttggacacaaacaaacagtatgaagtagaaatccagacataccgagagaaattgacttctaaagaagaatgtctcagttcacagaagctggagatagaccttttaaagtctagtaaagaagagctcaataattcattgaaagctactactcagattttggaagaattgaagaaaaccaagatggacaatctaaaatatgtaaatcagttgaagaaggaaaatgaacgtgcccaggggaaaatgaagttgttgatcaaatcctgtaaacagctggaagaggaaaaggagatactgcagaaagaactctctcaacttcaagctgcacaggagaagcagaaaacaggtactgttatggataccaaggtcgatgaattaacaactgagatcaaagaactgaaagaaactcttgaagaaaaaaccaaggaggcagatgaatacttggataagtactgttccttgcttataagccatgaaaagttagagaaagctaaagagatgttagagacacaagtggcccatctgtgttcacagcaatctaaacaagattcccgagggtctcctttgctaggtccagttgttccaggaccatctccaatcccttctgttactgaaaagaggttatcatctggccaaaataaagcttcaggcaagaggcaaagatccagtggaatatgggagaatggtagaggaccaacacctgctaccccagagagcttttctaaaaaaagcaagaaagcagtcatgagtggtattcaccctgcagaagacacggaaggtactgagtttgagccagagggacttccagaagttgtaaagaaagggtttgctgacatcccgacaggaaagactagcccatatatcctgcgaagaacaaccatggcaactcggaccagcccccgcctggctgcacagaagttagcgctatccccactgagtctcggcaaagaaaatcttgcagagtcctccaaaccaacagctggtggcagcagatcacaaaaggtcaaagttgctcagcggagcccagtagattcaggcaccatcctccgagaacccaccacgaaatccgtcccagtcaataatcttcctgagagaagtccgactgacagccccagagagggcctgagggtcaagcgaggccgacttgtccccagccccaaagctggactggagtccaacggcagtgagaactgtaaggtccagtgaaggcactttgtgtgtcagtacccctgggaggtgccagtcattgaatagataaggctgtgcctacaggacttctctttagtcagggcatgctttattagtgaggagaaaacaattccttagaagtcttaaatatattgtactctttagatctcccatgtgtaggtattgaaaaagtttggaagcactgatcacctgttagcattgccattcctctactgcaatgtaaatagtataaagctatgtatataaagctttttggtaatatgttacaattaaaatgacaagcactatatcacaatctctgtttgtatgtgggttttacactaaaaaaatgcaaaacacattttattcttctaatttaacagctcctaaggaaaatgtagacttttgctttatga

SEQ ID NO: 184523 - DNA, 1852 bp, Homo Sapiens
gccatgttgtccaggctcaaaatatgagcattttaacacaaagtcaatatacaacatgattgatgcaattacattcctttttcatactaaatctttcaaatctaatctcaattcatattagccacatttcaagtcttaatagtcacagtagttcatggctaccatattacatagcacagagctgagaaacattgaccacactagcctctgctttttagaatttcccaagattttaggctgtttatctatgttgcccaaatgaataacgtgtttttggagaaactctgtcaccctttcattcccaggggtactttcattgaattccgaaatgggatgttaaacgtgtcccctattggaagaagctgcagccaagaagaacgcattgagttctacgaactcgataaaaaagaaaatataagacaaaagtttgtagcagatctacggaaagagtttgctggaaaaggcctcacgttttccataggaggccagatcagctttgatgtctttcctgatggatgggacaagagatactgtctgcgacatgtggaaaatgacggttataagaccatttatttctttggagacaaaactatgccaggtggcaatgaccatgagatcttcacagaccccagaaccatgggctactccgtgacagcgcctgaggacacgcgcaggatctgtgaactgctgttctcctaacgtgggagcgggaggggcggggtcccggctgacaagccagcatagggcattcggtggccagagccgagggtcctcccacacgtgctcacccacccgcagcctaggcaggctctgcatgctatgccaggcatgtgcagtctggacttccacctccagtgccagaaacttccagaaggaaggagaaaactcttgtcaagaatggcccagaggaatgcctcgcacaaaaggtcttccccacccacccccagccccctagtctaatacccaccctgatacgtgcaatcatgtagttttggcggaaatttccccatcattctaggatgatacagaaagaaaaactgtgcctggaccctccctcttggtgggtctgtggaaacataagcggtttttttaatgggcccctgcatcaataccaaacatgggggtttggtaatgagaaaccaggacaggccatctgcagtgacccagcccaggacgaagtttacaaacacctcctggaacgaagctcccgcctgcatgtcaccttgatgggggctgtgagtggggcagtgtgatacccagtgactagacgcactctgcgttttcccgtgtttggggctgaggcctgctggacagatggctggccaagtgggagcagaccctagggagtttgcacctcggctgggccggattcggaccggctctgtgttcactacactcagaatagcctggctgcttctctgtctccgagaccggaggtagtgggaaccaacagctgggctggagagttggtgctggcaaaacagtccttcccctggggccggttcttacccaggtccagagaaaccaacgcgggatgtcagacttcaccaaaaggactttctggttgcccctggctggcttcctggaggcgttcgcctctagtttctcagggatggagcgagagcccagccagagaacagtaagaggagctgctctcctatctgcactcacccaggccttcacccagactttaccgcggaggcggctgagtgcagctacagctagggtccgcgtccctcactcttttcatcttctgcacgttcttcgtgaaaactggaaaggatcccgggtctcagctagaacacgtggaagaaaacttttcctaggaaaacggttcctgtgtcactttttc

SEQ ID NO: 184524 - DNA, 895 bp, Homo Sapiens
ttggctagaaactggggacatggcagcgcctggcccagcgctctgcctcttcgacgtggatgggaccctcaccgccccgcggcagaaaattaccaaagaaatggatgacttcctacaaaaattgaggcagaagatcaaaatcggagtggtaggcggatcggactttgagaaagtgcaggagcaactgggaaatgatgtggttgaaaaatacgattatgtgtttccagaaaatggcttggtagcatacaaagatgggaaactcttgtgtagacagaatattcaaagtcatctgggtgaggccctaatccaagatttaatcaactactgtctgagctacattgcgaaaattaaactcccgaagaagaggggtactttcattgaattccgaaatgggatgttaaacgtgtcccctattggaagaagctgcagccaagaagaacgcattgagttctacgaactcgataaaaaagaaaatataagacaaaagtttgtagcagatctacggaaagagtttgctggaaaaggcctcacgttttccataggaggccagatcagctttgatgtctttcctgatggatgggacaagagatactgtctgcgacatgtggaaaatgacggttataagaccatttatttctttggagacaaaactatgccaggtggcaatgaccatgagatcttcacagaccccagaaccatgggctactccgtgacagcgcctgaggacacgcgcaggatctgtgaactgctgttctcctaacgtgggagcgggaggggcggggtcccggctgacaagccagcatagggcattcggtggccagagccgagggtcctcccacacgtgctcacccacccgcagcctagcaggctctgcatgctatgccaggcatgtgcc

SEQ ID NO: 184525 - DNA, 830 bp, Homo Sapiens
acaaattgatgagcaatgcttttctttaaaagacaactttgtacaaaaaagttggcaattgatgaacatgtgattttacagaagcagaagtttcattttcttgaggcttaaaaccaatgtcaccacttgggcttaactgggtaatttgtggtctaggccttttgttttctaagcttactatcttgtgtttgtttatttgcttttaatgaagtattttgtgtagaaggttaaattaggatgcaaaacagatctgccattcctttttcccttatatcttccttttggtcttcatggacgagatgaatgaggattctgctgccctgagggagttcattggaaacctgcgttctcctacctcttccaaccctccattagctcaattttgagataatggaaaattgactggaaattcaaaactcaaactactatctttagatataaacactagtaattaaaatgtgccttttgaagatgttttctaagagaaaggaaatacgttgcagtgatgtgggtactgctttcataaaacagttttttcagtattttgagaattgccatattaatttttataatggaaaacttaataaattgctactgttttatatcataaaattaaaataccatggtaatatttgcaaaaggtctggccataccagaaaagtacagttgagatagttaagatataaccacaagtcagagtacattggttgtattttgtaaactttcatgaactgaattcttatttaaatagtatggttttttttccataagtatatttatagtgacaaatgtggtagactaaaggtaataaaaatcattgtcttaagatt

SEQ ID NO: 184526 - DNA, 2089 bp, Homo Sapiens
ttggaaacaatctggggctgtgtacaaagtataggtattcatcagtttctgaactgaggaaccagatagactgaggtacatttagagctatttgagatagattcattatctaaactcttactctttactgtctaaaactcagagacattactagtttactacctgaattgactgtccaaatctgagtaatttggattgcagtgggtagttgtactctgattaagttcttatcctgtccttttttggggagaacctaggagttgtaggaaagaaccgggaaaaatgtaagtctaaataaaccatttcctaccactgattaggagaatgcttttttctattagatccatttcactgggcttggcttcctcaagcaaaagttcccttttctgaagaaataagaaatttgattctaccatatatttctgacatgaactttgtgcaagatttatgtgaagatctctatgaactttttaagactgacaaaggatttgacaaagccacttttgaaagtcagatgtctgtgatgaggggtcagatcttaaaccttactcaggcattgagagacgggaagagtcctttccagctagtacagataccttgtgtgattgtggaacgcagtcaaggtggaagtcagggtcggattgtccacctgagcaattcctttacccagactgtcaattgcaggaagccatttttttcctcctggtagtaaatgtcagagtaagagaaacaaactgtttagaattatcatgtttttaaaacatcatagtaatataaatctgctgttaggagctccagttgctaaaacctcaatttaagtctttaaaaggttgtattttgaatgtaaccaaaagtttacagttttttgtccaaatattaaatttctacttcagggaagaagtgctatatctcctatattgtatttttgtagaaaatttgtattttatgttgttgttagtttaaaaggtaattttacacatgctggaatgactgtaattactctagaattccaagtagaatacaataacttttaatattgagaagaatgttcatgctaattcttcttacattacaaaaggcctttgaggatgcctacgtctgaaattgctcttacgaactttaataaaatagttagctaatagaaaaacaggtaagaataaagcaatgttgccttaatttcaaaagctgctattttagaatttgaataagtactcctaaagtgaccattattagggaccagaaaattatatcttggctaagtaatagaggaccattttggtttttgtacttgagaatatttttggtgaattactttgttgtagtgaggaaaaaacctaagaaatttcccctttttttaaaaaatggaaatattcaattgagacttgaggggaataatagaaaattaaggtagatccccaatattttggaataccaaaattgccttaaaaattcccttctgtttcttacatgggatcaaatacttgagattagtacttcagagtactggccttgttcaatttagtacttcaattagtattaaacttcactaaaaagtaaaccatactccaaattgtatattggattgcattttggggtcctaggtcatacgttcttcaaaattattatgattgtactattgtacttgaaattacagatgttattataattacagtcaaatgtagactatcaggccaaattaaaggggagcatggcagataaccataaagtcatttatatttgattttgaaatgtatttttgtactttattttgaatatcatccatatgtctgacattattggaatttgtaacattgttaatgcactaagtgatttaaattcaattgatgaagatgtgattttacagaagcagaagtttcattttcttgaggcttaaaaccaatgtcaccacttgggcttaactgggtaatttgtggtctaggccttttgttttctaagcttactatcttgtgtttgtttatttgcttttaatgaagtattttgtgtagaaaggttaaattagatgcaaaacagatctgccattcctttttcccttatatcttccttttggtcttcatggacgagatgaatg

SEQ ID NO: 184527 - DNA, 3504 bp, Homo Sapiens
  misc_feature (2659)..(2712): n is a, c, g, or t
  misc_feature (2743)..(2776): n is a, c, g, or t
ttggatcacctttccccctcccatgtgctttccttcatttgagatcttttgacctttggctttatttgggagggggaagggtgataaagttttctgtttccctggttttcttttgtactcctctctgttgcttccctcctcccattttcttgtctgttctgccgctgtgtgggcctgggctatgcggcagggcagatttcccatcagagctccaacatgcccgcagagtctggaaagagattcaaacccagcaagtatgtcccggtctctgcagccgccatcttcctagtgggagctacgacactcttctttgcctttacgtgtccaggactaagcctgtatgtgtcacctgcagtgcccatctacaatgcaattatgtttctctttgtgttggccaacttcagcatggccaccttcatggacccagggattttccctcgagctgaggaggatgaggacaaggaagatgatttccgagctcccctttacaaaacagtggagataaagggcatccaggtgcgcatgaaatggtgtgccacctgccgcttttaccgtccccctcgatgttcccactgcagtgtctgtgacaactgtgtggaggaatttgatcatcactgcccctgggtgaataactgtattggtcgccggaactaccgttattttttccttttcctcctttccctgacagcccacattatgggtgtgtttggctttggcctcctttatgtcctctaccacatagaggaactctcaggggtccgcacggctgtcacaatggcagtaatgtgtgtggctggcttattcttcatccctgtagctggcctcacgggatttcacgtggttctggtggccaggggacgcacaaccaatgaacaggttacgggtaaattccggggaggtgtgaaccccttcaccaatggctgctgtaacaatgtcagccgtgttctctgcagttctccagcacccaggtatttggggagaccaaagaaagagaagacaattgtaatcagacctcccttccttcgaccagaagtttcagatgggcagataactgtgaagatcatggataatggcatccagggagagctgaggagaacaaagtctaagggaagcctggagataacagagagccagtctgcagatgctgaacctccacctcctcctaagccagacctgagccgttacacagggttgcgaacacacctcggcctggctactaatgaggatagtagcttattggccaaggacagccccccgacacctaccatgtacaagtatcggccgggttacagtagcagcagtacgtcagctgccatgccgcattcctccagcgccaagttgagtcgtggggacagcttgaaggagccaacctcaattgcagagagcagccgtcaccccagctaccgctcagagcccagcttggaaccagagagcttccgttctcctacctttggcaaaagttttcacttcgatccactatccagtggctcacgctcctccagcctcaagtcagcccagggcacaggctttgagctgggccagttgcaatccattcgttcagagggcaccacctccacctcctataagagcctggccaaccagacacgcaatggaagcctatcttatgacagcttgctcacaccttcagacagccctgattttgagtcagtgcaggcagggcctgagccagacccacctttaggctatacctctcccttcctgtcagccaggctggcccagcaacgggaagctgagaggcacccacgtttggtgccaactggcccaacacaccgagagccctcaccagtccgttacgacaatctgtcgcgccacattgtggcctctctccaggaacgagagaagttgctgcgccagtcacccccactcccgggccgtgaggaagaaccaggcttgggggactcaggcattcagtcaacaccaggctcgggccatgcccctcgtactagttcctcctcagatgattcaaagagatcacctttgggcaagactccactgggacgcccagctgtcccccgttttggcaagccagatgggctaaggggccggggagtagggtcccctgaaccaggcccaacagccccatacctgggccgatcgatgtcttacagcagccaaaaagcccaacctggtgtctctgagacagaagaagtggccttgcagccattactgacacccaaagatgaagtacagctgaagaccacctacagcaaatccaacgggcagcccaagagcttaggctcagcctcccctggcccaggccagccacctctcagtagccccacgaggggaggagtcaagaaggtgtcaggggttggtggtaccacctatgagatttcggtgtgagccttcggcacctcccctccccaacgcctctgcgcctacaccaaagggccccaggtggccaccttccttccctcaaggggctcccctcccgtgcatggacattttttaaaccaccgattccaagaggatgaggagtgttttctaaaatgcagtaggcttggggagtcggagagttggggccctgagactggggtagcaacccccccttttatcttttaagaccttcccttccttgatccctggaccagactcagtggacatttgtgcaattgctcgccctggagggaaccagatnnnnnnnnnnnnnnnnnnnnnnnnnnnnnnnnnnnnnnnnnnnnnnnnnnnnnncctcttctgcgttaccaggtgtgtgtgtacnnnnnnnnnnnnnnnnnnnnnnnnnnnnnnnnnncaaagaaattatatatctatcctgggatgggaaaatgagggagggatacatatacggagggggatcttactcttcccattcctcagaccagcaggaaaagaggggagacgtcagtctttttcctgtggttccctctcatttgtcccagttactaactacggaaatagcatcctctgctggtgctaagtgtgattaggaagaagcctggggagaggcgagtctggaattttggtcacaagagggaaggacttggagaggagaattagttttctaggctcattggcatttagtttccctaggaaaggggtcaaaacttcaagacactggtggtggtgggagatcaggaaaataacttggcctagctcaaacaatattggataatcccctccttgggggagagggattagagtgtgctcctactggccccttggagcctcccctagcttacacagttaacttgattttaaaatccaaggccaggagagaagaatccaaaaagcaatatctttcatcacatgtcaaaaacggcggatagagagaaggagtggcaggcctaggctcctccgattgtcccttggagggttacccctcagcccacctcgctatggtgctgagtagaggggatacctgcgttctgacttctaaataggggagatcccagcctccacaaagaggcccgtttattttattattctgattagccattctaatctcacgaggaataaaaa

SEQ ID NO: 184528 - DNA, 1929 bp, Homo Sapiens
ttgggggagagtgagcggggttgggcgcggcagcgcgagccgcatgaatgagacaaacgtgcgccgcgcgagacgtcgcgcgagcccggactagggagccaatgggaacgctggaagggttcgagacccggcactgagggcaacggccgcgcgccggctccgagacgagcgacgcctggcgggagcgcgcggcagcggggcgggcgtggagcgtgcgggggccgcgcgctgcttctctgaggcaggacggcactgccgggaggcggcggtgacaacgacggcggtggtgacgggcaccgggctcgcgggtgagacacagtaacctggttgaactctgcatctggaaagctgaagactgaagaaagataagagacactgactagtctggaaacagggacatctttggaacttcgttttcatccacagtaaacttttgaagtgtcatcaattggaattgatttcttcatcttattctgcctattgggaagaacatggcttcaaggattttaagtttccctttagttttacatgaactttgtaggaaacagagcccttaaagggcttgggaataacaagaagagattgaagacagagaagcttgccctgttttccttgccccttcaaagaaaaggatttacagctcaaacttagaacagctgttgtccagctttagccatcaagagagaaataaattaaaccaccattgccagactacaagccctggtgaagtcagggtgtgggagtggtggcattgagaagactacctaaaagagacaaagactgcagtaaacaaagctcctctttaaagttggaaggggcctcaggttccttcttggattgaaatagaaatagaaacacagggcacacctcttttaggtgcagctcacattttatggaactgtagtcgtggaggtactatagtatctcagaagaatttttctttgcccaaagtttttttgccataccctgatattctctccttcttttgaagacctgcctccatccatgagctgtatcttgatctgtctgactgtccatgttttccacctgcaaccatttgcatgtgtacagcctactgtttgtctccagtttttaaactgtacaagttgtgtttcttaatcttcccttctgccttgttctggggaggtggttattcatcatttggaatcacctttccccctcccatgtgctttccttcatttgagatcttttgacctttggctttatttgggagggggaagggtgataaagttttctgtttccctggttttcttttgtactcctctctgttgcttccctcctcccattttcttgtctgttctgccgctgtgtgggcctgggctatgcggcagggcagatttcccatcagagctccaacatgcccgcagagtctggaaagagattcaaacccagcaagtatgtcccggtctctgcagccgccatcttcctagtgggagctacgacactcttctttgcctttacctgaggaggatgaggacaaggaagatgatttccgagctcccctttacaaaacagtggagataaagggcatccaggtgcgcatgaaatggtgtgccacctgccgcttttaccgtccccctcgatgttcccactgcagtgtctgtgacaactgtgtggaggaatttgatcatcactgcccctgggtgaataactgtattggtcgccggaactaccgttattttttccttttcctcctttccctgacagcccacattatgggtgtgtttggctttggcctcctttatgtcctctaccacatagaggaactctcacgggtccgcacggctgtcacaatggcagtaatgtgtgtggctggcttattcttcatccctgtagctggcctcacgggatttcacgtggttctggtggccaggggacgcacaaccaatgaacagttacgggtaaatt

SEQ ID NO: 184529 - DNA, 1694 bp, Homo Sapiens
  misc_feature (309)..(395): n is a, c, g, or t
tatttgacagaatagcaagtgtttaaataatttcagatatattctaagtattttaccagctgtggaataagttgtgtttgtccatcactgtgtagctaccgttcacatgttctggctctgtactccacgcttatcgcgtgaaccctcacatgttggactttcacagtgtgatctctcacctgtcttggaaactccttcataaagccgctcttccttaggcctgggctgtttggaagtcctggtgaaactttgcggttcacattttaaattcctgaatgaccttttcattctctctttctttatctttgnnnnnnnnnnnnnnnnnnnnnnnnnnnnnnnnnnnnnnnnnnnnnnnnnnnnnnnnnnnnnnnnnnnnnnnnnnnnnnnnnnnnnnnctattttcttggtacaagtggaacaaaaaccaacacatagttttaagctacacctttctgcacctgatgtaaaatgacattaatcactatttaacttctaaaattatttctgaatacagttgcagataggctggttttcatgaggaagctcgcttggctttagtcttacatttaaattctttgaaagtggctcccagtgctattcagggtcctttcttgaggccagactcatcaccatctactattgattttacagtgcactgacagtttacaggaaggagaagaacagaatttctgcacactacacaacatgtgggcttcctgtagctccagggacatgtagctttggtgaaactggggttttgtaacctctgaatgatatggacttagtgaattctaaggaactcagggggcacgtggtcaggctccaccgcacagaagagccacagtctccagactcatggcgttccctccagaactccccattcccctctgagcatatttctatgctgctgcttcttgtgacttacatgaggcatctcagcttcttcatgtttgtagggatggttccctaagcctgttcaagtaggctctcactagagttaccattcatatttgagaagaaaagaacatttaataaatgtatgtgtggggctgaggttctaaaggaattgaaaagagacgataaacattgaatgagggtgagggcatccctgctggggagaaacctctgtccctaggaagagtccgttcatgtcatgtggtttgggatgaaccaggggtctggccccatcgggtcacaggtgatggcaaatagaaaagaagcaaatggaggaaatagtcggataagtaggtgacgtgaaaggcaggacctggtcaccccagcaagtgctatggacagttcccggaaacggttgcccacttcacaggtccatgggtctgacccttggactctgccaggatcaactgcccagagtgccagagttttagccaaaggtgtacttacttccttatttatctgcaaaaggatggaaactgtgggagtcaaagcctattttgctgagtgttcccactggagtctctggtagaattagcaggtcatgctgtcaaaatcatggacaaaggctgggattacagggtttagcaaccgcacccggccactcctccatttctgtgcagtgcctttcctcaaaatttcccatccccatcaagttaatttgggagagagccaagaattcttcgggcacataggggtgagtccctctacccacccttcagtcttcaccccaagttgcccct

SEQ ID NO: 184530 - DNA, 1554 bp, Homo Sapiens
ttggggggaacgtggctttccctgcagagccggtgtctccgcctgcgtccctgctgcagcaaccggagctggagtcggatcccgaacgcaccctcgccatggactcggccctcagcgatccgcataacggcagtgccgaggcaggcggccccaccaacagcactacgcggccgccttccacgcccgagggcatcgcgctggcctacggcagcctcctgctcatggcgctgctgcccatcttcttcggcgccctgcgctccgtacgctgcgcccgcggcaagaatgcttcagacatgcctgaaacaatcaccagccgggatgccgcccgcttccccatcatcgccagctgcacactcttggggctctacctctttttcaaaatattctcccaggagtacatcaacctcctgctgtccatgtatttcttcgtgctgggaatcctggccctgtcccacaccatcagccccttcatgaataagttttttccagccagctttccaaatcgacagtaccagctgctcttcacacagggttctggggaaaacaaggaagagatcatcaattatgaatttgacaccaaggacctggtgtgcctgggcctgagcagcatcgttggcgtctggtacctgctgaggaagcactggattgccaacaacctttttggcctggccttctcccttaatggagtagagctcctgcacctcaacaatgtcagcactggctgcatcctgctgggcggactcttcatctacgatgtcttctgggtatttggcaccaatgtgatggtgacagtggccaagtccttcgaggcaccaataaaattggtgtttccccaggatctgctggagaaaggcctcgaagcaaacaactttgccatgctgggacttggagatgtcgtcattccagggatcttcattgccttgctgctgcgctttgacatcagcttgaagaagaatacccacacctacttctacaccagctttgcagcctacatcttcggcctgggccttaccatcttcatcatgcacatcttcaagcatgctcagcctgccctcctatacctggtccccgcctgcatcggttttcctgtcctggtggcgctggccaagggagaagtgacagagatgttcagttatgaggagtcaaatcctaaggatccagcggcagtgacagaatccaaagagggaacagaggcatcagcatcgaaggggctggagaagaaagagaaatgatgcagctggtgcccgagcctctcagggccagaccagacagatgggggctgggcccacacaggcgtgcaccggtagagggcacaggaggccaagggcagctccaggacagggcagggggcagcaggatacctccagccaggcctctgtggcctctgtttccttctccctttcttggccctcctctgctcctccccacaccctgcaggcaaaagaaacccccagcttcccccctccccgggagccaggtgggaaaagtgggtgtgatttttagattttgtattgtggactgattttgcctcacattaaaaactcatcccatggc

SEQ ID NO: 184531 - DNA, 1804 bp, Homo Sapiens
  misc_feature (1627)..(1635): n is a, c, g, or t
ttggggggagaccttggcggagcggcggaggcgcccagcggaggtgaaagtattggcggaaaggaaaatacagcggaaaaatgcagagctggagtcgtgtgtactgctccttggccaagagaggccatttcaatcgaatatctcatggcctacagggactttctgcagtgcctctgagaacttacgcagatcagccgattgatgctgatgtaacagttataggttctggtcctggaggatatgttgctgctattaaagctgcccagttaggcttcaagacagtctgcattgagaaaaatgaaacacttggtggaacatgcttgaatgttggttgtattccttctaaggctttattgaacaactctcattattaccatatggcccatggaaaagattttgcatctagaggaattgaaatgtccgaagttcgcttgaatttagacaagatgatggagcagaagagtactgcagtaaaagctttaacaggtggaattgcccacttattcaaacagaataaggttgttcatgtcaatggatatggaaagataactggcaaaaatcaagtcactgctacgaaagctgatggcggcactcaggttattgatacaaagaacattcttatagccacgggttcagaagttactccttttcctggaatcacgatagatgaagatacaatagtgtcatctacaggtgctttatctttaaaaaaagttccagaaaagatggttgttattggtgcaggagtaataggtgtagaattgggttcagtttggcaaagacttggtgcagatgtgacagcagttgaatttttaggtcatgtaggtggagttggaattgatatggagatatctaaaaactttcaacgcatccttcaaaaacaggggtttaaatttaaattgaatacaaaggttactggtgctaccaagaagtcagatggaaaaattgatgtttctattgaagctgcttctggtggtaaagctgaagttatcacttgtgatgtactcttggtttgcattggccgacgaccctttactaagaatttgggactagaagagctgggaattgaactagatcccagaggtagaattccagtcaataccagatttcaaactaaaattccaaatatctatgccattggtgatgtagttgctggtccaatgctggctcacaaagcagaggatgaaggcattatctgtgttgaaggaatggctggtggtgctgtgcacattgactacaattgtgtgccatcagtgatttacacacaccctgaagttgcttgggttggcaaatcagaagagcagttgaaagaagagggtattgagtacaaagttgggaaattcccatttgctgctaacagcagagctaagacaaatgctgacacagatggcatggtgaagatccttgggcagaaatcgacagacagagtactgggagcacatattcttggaccaggtgctggagaaatggtaaatgaagctgctcttgctttggaatatggagcatcctgtgaagatatagctagagtctgtcatgcacatccgaccttatcagaagcttttagagaagcaaatcttgctgcgtcatttggcaaatcaatcaacttttgaattagaagatgatatannnnnnnnnctgaaatttcctgggagcttttgtagaagtcacattcctgaacaggatattctcacagctccaagaatttctaggactgaattatgaaacttttggaaggtatttaataggtttggacaaatggaatactcttatatctatattttacataaatttagtattttgtttc

SEQ ID NO: 184532 - DNA, 1119 bp, Homo Sapiens
ttggcactcaggagcacgagcgaagtacagcttatggatgggtctcagccacctttgcggctagtcttgtcagcagcccggccattggagcatatctttctgcctgagaaaatgagaccggtttcctggggagctcagatttcttggaaacaagcagacccttttgcgtcgttgaagaaagttggaaaagattctactgtcttactaatctgcatcaccgtgtttctttcataccttcctgaagctggtgggtattcaagtttttttctctatctcaggcaggtcataggttttggatctgttaaaattgcagcattcatagctatggtaggaattctgtctattgtggctcagacggcctttcttagcatcttgatgagatcattaggaaataagaatactgtcctccttggcttgggcttccagatgctccagttagcctggtacggttttggatcacaggcctggatgatgtgggcagcagggaccgtggctgccatgtccagcatcacgtttccggcaatcagtgccctcgtctctcggaatgcagagtcagatcagcaaggagttgcccaggggatcataactggaataagaggactatgcaatggcctggggccagcactgtatggcttcatattctacatgttccatgtggaactgactgagttgggcccgaaattgaattctaacaacgttcccctgcagggagctgtcatcccaggcccgccgtttttatttggggcatgtatagtccttatgtcttttctggttgccttattcattcctgaatacagtaaagccagtggagttcaaaaacacagtaacagcagcagcggcagcctgaccaacaccccagaacggggcagtgatgaggacattgagccactactgcaagacagcagcatctgggagctctcttcatttgaggagcctgggaatcagtgcactgagctgtaaactcggcagaaagtgggattctgcatacgccatctctgagagccatggagggagccacacccctggtgacttcatggtgctggatgggagacgctagcggcatccttcaggccaagtttgataaataccaccgccatcattctgctcatcctcctcctg

SEQ ID NO: 184533 - DNA, 1998 bp, Homo Sapiens
ttggcccttcagtgtctcagaggaggggacggcagcaccatggacccccgcttgtccactgtccgccagacctgctgctgcttcaatgtccgcatcgcaaccaccgccctggccatctaccatgtgatcatgagcgtcttgttgttcatcgagcactcggtagaggtggcccatggcaaggcgtcctgcaagctctcccagatgggctacctcaggatcgctgacctgatctccagcttcctgctcatcaccatgctcttcatcatcagcctgagcctactgatcggcgtagtcaagaaccgggagaagtacctgctgcccttcctgtccctgcaaatcatggactatctcctgtgcctgctcaccctgctgggctcctacattgagctgcccgcctacctcaagttggcctcccggagccgtgctagctcctccaagttccccctgatgacgctgcagctgctggacttctgcctgagcatcctgaccctctgcagctcctacatggaagtgcccacctatctcaacttcaagtccatgaaccacatgaattacctccccagccaggaggatatgcctcataaccagttcatcaagatgatgatcatcttttccatcgccttcatcactgtccttatcttcaaggtctacatgttcaagtgcgtgtggcggtgctacagattgatcaagtgcatgaactcggtggaggagaagaaaaactccaagatgctccagaaggtggtcctgccgtcctacgaggaagccctgtctttgccatcgaagaccccagaggggggcccagcaccacccccatactcagaggtgtgaccctcgccaggccccagccccagtgctgggaggggtggagctgcctcataatctgcttttttgctttggtggcccctgtggcctgggtgggccctcccgcccctccctggcaggacaatctgcttgtgtctccctcgctggcctgctcctcctgcagggcctgtgagctgctcacaactgggtcaacgctttaggctgagtcactcctcgggtctctccataattcagcccaacaatgcttggtttatttcaatcagctctgacacttgtttagacgattggccattctaaagttggtgagtttgtcaagcaactatcgacttgatcagttcagccaagcaactgacaaatcaaaaacccacttgtcagttcagtaaaataatttggtcaaacaacagtctattgcattgatttataaatagttgtcagttcacatagcaatttaatcaagtaatcattaattagttaccccctatatataaatatatgtaatcaatttcttcaaatagcttgcttacatgataatcaattagccaaccatgagtcatttagaatagtgataaatagaatacacagaatagtgatgaaattcaatttaaaaaatcacgttagcctccaaaccatttaattcaaatgaacccatcaactggatgccaactctggcgaatgtaggacctctgagtggctgtataattgttaattcaaatgaaattcatttaaacagttgacaaactgtcattcaacaattagctccaggaaataacagttatttcatcataaaacagtcccttcaaacacacaattgttctgctgaagagttgtcatcaacaatccaatgctcacctattcagttgctctgtggtcagtgtggctgcatagcagtggattccatgaaaggagtcattttagtgatgagctgccagtccattcccaggccaggctgtcgctggccatccattcagtcgattcagtcataggcgaatctgttctgcccgaggcttgtggtcaagcaaaaattcagccctgaaatcacgcacatctgttcgttggactaaacccacaggttagttcagtcaaagcaggcaacccccttgtgggcactgaccctgccactggggtcatggcggttgtggcagctggggaggtttggccccatcagccctcctgtgc

SEQ ID NO: 184534 - DNA, 1353 bp, Homo Sapiens
  misc_feature (922)..(967): n is a, c, g, or t
ttgggaaagatggcgacagccgagaagcagaaacacgacgggcgggtgaagatcggccactacattctgggtgacacgctgggggtcggcaccttcggcaaagtgaaggttggcaaacatgaattgactgggcataaagtagctgtgaagatactcaatcgacagaagattcggagccttgatgtggtaggaaaaatccgcagagaaattcagaacctcaagcttttcaggcatcctcatataattaaactgtaagctctgtttatattaaatatagtccagtcatcttttcatcttttttgttaacctacttaatgtgacaagtgagaaaaatgactgacacttctttttgtttcctaagggttttgaaaagtttcttccaccgcacccggcctccatatcccccttttaaaattctgtagtgtatggtaagtcatatcagatatcagacctaatttaaatttcattttagctttacaagtccaaaaacacagaatttatatattcagatactctagcactaattttagtcttaaaatattcccacgatattctgtacacaaaatgttctttttgttacaagagctgagttgcatatactgtagataaatcatattatttttgccaatttcacaaattcctctggcccatcatgtcagtcattattgagtatatgcacacattgctacttatttgattatgtatcttttaaattgattcagtgcatagaaaactatctcttacaaactttaagtgctctgatatgacttcccccccaaattttattatgaacatttttaaaaacagaaaaattgaaaaactgtttggtaagcacatgtatatctaccatttagattcagcagttgttaatgttttgtcatttgttttctctatacctatatatgtatagatacagctagtnnnnnnnnnnnnnnnnnnnnnnnnnnnnnnnnnnnnnnnnnnnnnncttttttccccctgaaccatttggatgttacagacatacttatcaccgtgaaaatacttcaagtatctcctacagataatgacattctcctaaaaatccgtaataccattgtaaaagtaataattccccaatatcatctaatcaagccatatttaaatttctgaagttaactccaaatttctttatagctgattatttcaaactaggatccaattaaagtttacatatgacacttggttataactctttagttggatataacattattattattttgataaaatatggaacaaatgaattctattaataagtggtcacatttgttttgggcttaaattactttttaagatactggattttcctaagatttctgatttacactgata

SEQ ID NO: 184535 - DNA, 1965 bp, Homo Sapiens
ttggggaaagactgagtcgtctttcctttgcccgcttctgtggactgttcgaacgcccaggggtgggccaaacccgtttcttaggaaaccaggaatccagggaaggcagaatggcttcctttgggtggaagaggaaaattggtgagaaggtctcaaaggtcacttcccagcagtttgaagctgaagctgctgatgagaaggatgtagttgacaacgatgaagggaactggcttcatgccattaaacgtaggaaagaaattcttcttgaaggctgtgctgagaaaagtaaacagctgaaggatgaaggagccagtttggctgaaaataaaagatatcgggaggcaattcagaagtgggatgaagcactacagttaactccaaatgatgctaccctatacgagatgaaatcacaggtgctaatgtctcttcatgaaatgttcccagcagtacatgcagcagaaatggccgtccagcaaaatccacattcatgggagtcttggcagactttgggacgtgctcaacttggtttaggagagataatcctggcaattcgaagttttcaagtagcccttcacatctatccaatgaaccctgaaatatggaaagaagacctctcttgggcaagaacgctccaggagcagcagaaggtagcacagaggattaaaaaaagtgaagcaccagctgaagtaacacacttttcaccaaagtcaattccagactatgactttgaaagtgatgagattgttgctgtttgtgcagctattgctgagaaagagaagacagtttcagcaaataaaacaatggttattgtgtctgcttctggggccatagagactgtaactgaaaaggaggatggtgctacaccaccagatggctctgtttttatcaaagcccgatgaagcagtatgcataggattatttgaatctgtctttttgattgcctcttgaagttttgacatagagacatttactctggagatagataggagaactcctggttgtaaaatatgtttttcagatgaggcatataaaaactaaaatggcaggattattgtatagtgtttggaatatgctttgataagttatgatttatatttctcaaggttaaaattctgagtaaaatggtctttgattaataaacttagtttaatctgaatatgtaaatgaatacattttaaagacaaaacttgaaaaatgtattcttgaatagtgaataatttgatcaatgttactgaaatgctgtctcaacttttgttttatgataaaggaagtgtgtgatttccctccctctgagaaatatactgcgcttaatatttgctgtctttttcttgcttcattagagtaagtctgtcagaaagcttgaatatttttgacattcattttgattcaaagttgtcatttggttatatgtggaatctttgaaagtttggctgaaaatgcacacaaatgtgtacattctgaacattttctgaagtttctcttaattctgatttgtgtttctgttttgactttgaagttgtaacaatgatagttgtctccttcagtatttggtaaaagtgtaaagtattgataaatatgagaatgatggttttattttttaattgttacagtaagtaatccttaccacaaatgagtcatttttaaaatatgcatttttaaatgaatggcttttacagataggttaatgacaattgtactgctatattatcccagtcaaaaccaatactttcttttctttattttacaaagctttaaaaaccctggaaacaacttacttcttgcttgtgtctttccatttgatgactgggaattacttttctagataactttttttgaaactactcagtgaaatgaaaaataattacaattttaaatagctaattatatctttctaaaaataaaaaagtagggctgttattagagtgccaatgaataaataacttaagcacaaaatacatagaaatt

SEQ ID NO: 184536 - DNA, 1576 bp, Homo Sapiens
  misc_feature (358)..(596): n is a, c, g, or t
ttgggaattaagatcattttgttgttcattgtgcagtatgtatatagcataatatacacagtgaattataggtctcaggcttacttgatttttggctattttatatttagtgtacacagggctttgaaatattaatttacataaaggccttcatatattattacgtgttatatattacgtgttataaatttattcaataaatatttgcctagaattcccaagacctttataggtgattttgttttctgggctccttaacttcataaatagctagtatcttccagcagtagtaacagtctggataacttcttccatatccctccctctttgtttttttgagacagtgtcactttgtcannnnnnnnnnnnnnnnnnnnnnnnnnnnnnnnnnnnnnnnnnnnnnnnnnnnnnnnnnnnnnnnnnnnnnnnnnnnnnnnnnnnnnnnnnnnnnnnnnnnnnnnnnnnnnnnnnnnnnnnnnnnnnnnnnnnnnnnnnnnnnnnnnnnnnnnnnnnnnnnnnnnnnnnnnnnnnnnnnnnnnnnnnnnnnnnnnnnnnnnnnnnnnnnnnnnnnnnnnnnnnnnnnnnnnnnnnnnnnntgagccaccgcacccggcctccatatcccccttttaaaattctgtagtgtatggtaagtcatatcagatatcagacctaatttaaatttcattttagctttacaagtccaaaaacacagaatttatatattcagatactctagcactaattttagtcttaaaatattcccacgatattctgtacacaaaatgttctttttgttacaagagctgagttgcatatactgtagataaatcatattatttttgccaatttcacaaattcctctggcccatcatgtcagtcattattgagtatatgcacacattgctacttatttgattatgtatcttttaaattgattcagtgcatagaaaactatctcttacaaactttaagtgctctgatatgacttcccccccaaattttattatgaacatttttaaaaacagaaaaattgaaaaactgtttggtaagcacatgtatatctaccatttagattcagcagttgttaatgttttgtcatttgttttctctatacctatatatgtatagatacagctagttatgcatatatatgcatatatgtgtttgtttgtgtatgtatatatgcttttttccccctgaaccatttggatgttacagacatacttatcaccgtgaaaatacttcaagtatctcctacagataatgacattctcctaaaaatccgtaataccattgtaaaagtaataattccccaatatcatctaatcaagccatatttaaatttctgaagttaactccaaatttctttatagctgattatttcaaactaggatccaattaaagtttacatatgacacttggttataactctttagttggatataacattattattattttgataaaatatggaacaaatcaattctattaataagtggtcacatttgttttgggcttaaattactttttaaagatactggattttcctaaggatttctgatttacactgata

SEQ ID NO: 184537 - DNA, 1636 bp, Homo Sapiens
  misc_feature (104)..(132): n is a, c, g, or t
ttggctaaagtgctgggattacaggtgtgagccactgcacctggcctgggagacgcttatctttaccaaaaaaattaaaatttagctgggcatggtggtgcaannnnnnnnnnnnnnnnnnnnnnnnnnnnngatatgtgttttaatatttgtagacaatgttttctctcaccaggtaccaggtcatcagtacaccatctgatattttcatggtgatggaatatgtctcaggaggagagctatttgattatatctgtaagaatggaaggctggatgaaaaagaaagtcggcgtctgttccaacagatcctttctggtgtggattattgtcacaggcatatggtggtccatagagatttgaaacctgaaaatgtcctgcttgatgcacacatgaatgcaaagatagctgattttggtctttcaaacatgatgtcagatggtgaatttttaagaacaagttgtggctcacccaactatgctgcaccagaagtaatttcaggaagattgtatgcaggcccagaggtagatatatggagcagtggggttattctctatgctttattatgtggaacccttccatttgatgatgaccatgtgccaactctttttaagaagatatgtgatgggatcttctatacccctcaatatttaaatccttctgtgattagccttttgaaacatatgctgcaggtggatcccatgaagagggccacaatcaaagatatcagggaacatgaatggtttaaacaggaccttccaaaatatctctttcctgaggatccatcatatagttcaaccatgattgatgatgaagccttaaaagaagtatgtgaaaagtttgagtgctcagaagaggaagttctcagctgtctttacaacagaaatcaccaggatcctttggcagttgcctaccatctcataatagataacaggagaataatgaatgaagccaaagatttctatttggcgacaagcccacctgattcttttcttgatgatcatcacctgactcggccccatcctgaaagagtaccattcttggttgctgaaacaccaagggcacgccatacccttgatgaattaaatccacagaaatccaaacaccaaggtgtaaggaaagcaaaatggcatttaggaattagaagtcaaagtcgaccaaatgatattatggcagaagtatgtagagcaatcaaacaattggattatgaatggaaggttgtaaacccatattatttgcgtgtacgaaggaagaatcctgtgacaagcacttactccaaaatgagtctacagttataccaagtggatagtagaacttatctactggatttccgtagtattgatgaatggcttcctttgggtggaagaggaaaattggtgagaaggtctcaaaggtcacttcccagcagtttgaagctgaagctgctgatgagaaggatgtagttgacaacgatgaaagaactggcttcatgccattaaacgtagaaagaaattcttcttgaacgctgtgctgagaaaagtaaacagctgaagatgaagagccagtttggctgaaaataaaagatatcgggaggcaattcagaagtgggatgaagcactacagttaactctaaatgatgctaccctatacgagatgaaat

SEQ ID NO: 184538 - DNA, 1593 bp, Homo Sapiens
  misc_feature (148)..(158): n is a, c, g, or t
  misc_feature (217)..(227): n is a, c, g, or t
  misc_feature (1250)..(1259): n is a, c, g, or t
gatatagggacctccctctgtactgtgtactgtgtaatcggcattaatacctagactcatatgtatggaattttaaattctcttagcctactgattggtttggatgagcacaccagctgcaggtgtgtgctgaattgcaagatggtannnnnnnnnnnaaccaagggatgtctcttgtaatactaaccgcgtgataatgggttttcagacatgatgnnnnnnnnnnncttttacaaatgaatacttaccttagaaatattcaccttaggaaaaaagactttgctctgcccttttatattcctttatgctgcaagtggtgacatgttcagatttctaatttggttcattgtggcctatctggtttaagtctttcattaaaaatgtctcgttagagtatttgatgtcatgcaccaaaaaaataaaaccccaccttgttgcaaaagctgacctcgttgcatggaattaaaagagaaggaaaaacacaaggatgaagtctttccgaattcattcttgtgggaactggccttcggagccagccagcactttgggcaaatgcaaacaacaatgagtgcttgagataaaagaaagtgtgacgtcatggtcactggtactcaggcacttcacagtttacttgaaagaggctttggaaatagataaagtgaaagaagaataaatacatatttttaataatgtaattttaaaaatcctttataatcaggactgagtcttggtttgcagaagctgtcacttaccctgaaacacagtatcaaaagggaaacttaaaacatactgtttgatttttttatttcctcttacaatccatgttttcaggtagaattatgactttccccccattgttacacatttctttacaaaggaggcctgtagaaattggacacgatcatgcttgagcatgtgagttagtcaaattatgagtccctgcctattgtccattacacaccgaatgttaatttaagaaccagaggcagaagttctggcttcctgcttgaaacccaattcttatatgaaattttttaaaagcagaaacctagcagcccatctgctttttctcttttgtcggtgtatttggtacccctccaatgctggtctttttgtagaaactcagtagagaaagtctagctaagcagtgttgaaaagcctgcaagatttcagtttacatatcgacagcatatccactgatttctaaatgggctggtcccatcatctgaagattctgtatagaattattnnnnnnnnnntccatctttctttattttcttcacatgcgacaatttcttaagcactttgacattttggtagttccacactattgagagaataatatatttattttgtgacattgcagatgccaaatactgtaaccttctcatgataacaatacttaggttcaagatcactgttcaaaccctgtcatgctttaaaactgatgcgagatgattttgttttttgcataatcaatactttaagggtgcaatcaactgttagtaattgtgcagtaaagtaaagccctgtggtgtatcaactactagttaagagtctcagttgatttctgtaatgtttgacctaataata

SEQ ID NO: 184539 - DNA, 1403 bp, Homo Sapiens
  misc_feature (51)..(61): n is a, c, g, or t
  misc_feature (1085)..(1094): n is a, c, g, or t
ttggcttgtaatactaccccagcgtagataatgggttttcagacatgatgnnnnnnnnnnncttttacaaatgaatacttaccttagaaatattcaccttaggaaaaaagactttgctctgcccttttatattcctttatgctgcaagtggtgacatgttcagatttctaatttggttcattgtggcctatctggtttaagtctttcattaaaaatgtctcgttagagtatttgatgtcatgcaccaaaaaaataaaaccccaccttgttgcaaaagctgacctcgttgcatggaattaaaagagaaggaaaaacacaaggatgaagtctttccgaattcattcttgtgggaactggccttcggagccagccagcactttgggcaaatgcaaacaacaatgagtgcttgagataaaagaaagtgtgacgtcatggtcactggtactcaggcacttcacagtttacttgaaagaggctttggaaaatagataaagtgaaagaagaataaatacatatttttaataatgtaattttaaaaatcctttataatcaggactgagtcttggtttgcagaagctgtcacttaccctgaaacacagtatcaaaagggaaacttaaaacatactgtttgatttttttatttcctcttacaatccatgttttcaggtagaattatgactttccccccattgttacacatttctttacaaaggaggcctgtagaaattggacacgatcatgcttgagcatgtgagttagtcaaattatgagtccctgcctattgtccattacacactgaatgttaatttaagaaccagaggcagaagttctggcttcctgcttgaaacccaattcttatatgaaattttttaaaagcagaaacctagcagcccatctgctttttctcttttgtcggtgtatttggtacccctccaatgctggtctttttgtagaaactcagtagagaaagtctagctaagcagtgttgaaaagcctgcaagatttcagtttacatatcgacagcatatccactgatttctaaatgggctggtcccatcatctgaagattctgtatagaattattnnnnnnnnnntccatctttctttattttcttcacatgcgacaatttcttaagcactttgacattttggtagttccacactattgagagaataatatatttattttgtgacattgcagatgccaaatactgtaaccttctcatgataacaatacttagttcaagatcactgttcaaaccctgtcatgctttaaactgatgcgagatgattttgttttttgcataatcaatacttaaaggtgcaatcaactgttagtaattgtgcagtaaagtaaagccctgtggtgtatcaactactagttaagagtctcagttgatttc

SEQ ID NO: 184540 - DNA, 997 bp, Homo Sapiens
gaaaaaagatcacagaataatttttatttataatgaatgttattctctccagacttcaactcatcagtttactcttataacagagaatcaatttaaataacaccatcaaaatggaatgaatataaaacaatctgctattacgtatcgatttctttgataggatataattatagccaattagtcttgcaacacatggtccatttccagtgaaattctcaataaactgctaggaattacagtccttcatattgacattttattgtaaagtctgctagacgtggctctcttgattgctttggaagtcagtcaaacaaatgctctgaagaaaaggctgacaccgcaaaacaacttcatatgaaatctgtccacaaatgggatagcaatgcctccagatcctttggtttttatcagtccctttggaaagttaattaattgatgattgttcccttaaaattctattttaaataggacaatcactgtctatacagtctgtgccagcgtccttgactttcttgcttccactgatttgtttatcaaatcatacagtgatggtagtcttattttatccatatttttgctgtaaacattaagaaatataccaaggacaactaacaaaccagaccatacatactgaaacgtgaatggtttagcaaagaatataaacgaaagtacaatggtcattgcttttcttcctgttgtcactgttacagcaataagtgcaccaaaaattttaatcaaagccagaacaaaggagattccaaaatatccagtgagggaaaaaaggaacgcataaccataggtccgaactggattctttgcacaaaatgttactgcagggcctaatccactagtgcatgtcaatcccagtaaaatgtatacaaaaccaattgaatacgaatacaatacctagagcagataaaaataaagcagaaaaaagtactatgaaactgaaaatggaagattaagggttttaactctatggctcaattaggtccaa

SEQ ID NO: 184541 - DNA, 1408 bp, Homo Sapiens
  misc_feature (891)..(901): n is a, c, g, or t
ttggcgcgtttgtaccaggggtgggtgcgcacgctctgtccctgcgtgaccttccgaccccgctgtcctcaccgcaatggcggctgtgagggccctggtggcctcgaggctcgctgcggcatctgcattcacgtccctgtcccccggcggtcggacgccttcccagcgcgcagcccttcacctctccgtgccgcgccccgcggccagggtcgcgctggtgctgtctggatgcggagtctacgatgggaccgagatccacgaggcctcggcgatcctggtgcacctgagccgtggaggggctgaagtccagatctttgctcctgacgtccctcagatgcacgtgattgaccacaccaaggggcagccgtccgaaggcgagagcaggaatgttttgaccgagtctgcgaggatcgcccgtggcaaaatcacagacctggccaacctcagtgcagccaaccatgatgctgccatctttccaggaggctttggagcggctaaaaacctcttgtgctgcattgcacctgtcctcgcggccaaggtgctcagaggcgtcgaggtgactgtgggccacgagcaggaggaaggtggcaagtggccttatgccgggaccgcagaggccatcaaggccctgggtgccaagcactgcgtgaaggaagtggtcgaagctcatgtggaccagaaaaacaaggtggtcacgaccccagccttcatgtgcgagacggcactccactacatccatgatgggatcggagccatggtgaggaaggtgctggaactcactggaaagtgacgcgcatggacggggcccagctaggcgccaggacttggcctcaccctctggctgaggagctgtcggctgctttccatccagctgggagtctggcaggcccnnnnnnnnnnnctttgccgaaacctgcaggcgttctctctctaaggaggatgtgctgcagtgcatgggggatgtttcttcctgggtgtggctgggctgctctcacatacagaggccgaggggccaattcgttctctgccacagggacttgcctcactgtgtcccaaaaacaaatcgcagccagcttttccagaaatagaaaattctgccgtctgaggttttatacttcaggttagttagtttttggaaggaagaacatttttaggtttgcaagcctcctgatcaggaaaccagaaataccacatttatggaccatgaaaggttggttcttgactctgaagggacttttgagttaatcagcgtaaggggatttctaaagcaggcaatctctgtagccgcagagaataaacgccttctcaaaatggcaacttctcacagccacatttcagacctgctgagactgctgagtgaggaatggcagtgaggtttcttcaattagtctcagttctcttaattttc

SEQ ID NO: 184542 - DNA, 2678 bp, Homo Sapiens
  misc_feature (2260)..(2285): n is a, c, g, or t
ttggctgagattaacaatatcagcattttccatgatctgcttatgagaagcttctcgaacattgaaaatgctgagattaacaatatcatcaagattgtgggtcttcagtacaagaaaaactatgaagatgaagattcattgaagacgcttcgttatgggaagataatgattatgacagatcaggaccaagatggttcccacatcaaaggcttgctgattaattttatccatcacaactggccctctcttctgcgacatcgttttctggaggaatttatcactcccattgtaaaggtatctaaaaacaagcaagaaatggcattttacagccttcctgaatttgaagagtggaagagttctactccaaatcataaaaaatggaaagtcaaatattacaaaggtttgggcaccagcacatcaaaggaagctaaagaatactttgcagatatgaaaagacatcgtatccagttcaaatattctggtcctgaagatgatgctgctatcagcctggcctttagcaaaaaacagatagatgatcgaaaggaatggttaactaatttcatggaggatagaagacaacgaaagttacttgggcttcctgaggattacttgtatggacaaactaccacatatctgacatataatgacttcatcaacaaggaacttatcttgttctcaaattctgataacgagagatctatcccttctatggtggatggtttgaaaccaggtcagagaaaggttttgtttacttgcttcaaacggaatgacaagcgagaagtaaaggttgcccaattagctggatcagtggctgaaatgtcttcttatcatcatggtgagatgtcactaatgatgaccattatcaatttggctcagaattttgtgggtagcaataatctaaacctcttgcagcccattggtcagtttggtaccaggctacatggtggcaaggattctgctagtccacgatacatctttacaatgctcagctctttggctcgattgttatttccaccaaaagatgatcacacgttgaagtttttatatgatgacaaccagcgtgttgagcctgaatggtacattcctattattcccatggtgctgataaatggtgctgaaggaatcggtactgggtggtcctgcaaaatccccaactttgatgtgcgtgaaattgtaaataacatcaggcgtttgatggatggagaagaacctttgccaatgcttccaagttacaagaacttcaagggtactattgaagaactggctccaaatcaatatgtgattagtggtgaagtagctattcttaattctacaaccattgaaatctcagagcttcccgtcagaacatggacccagacatacaaagaacaagttctagaacccatgttgaatggcaccgagaagacacctcctctcataacagactatagggaataccatacagataccactgtgaaatttgttgtgaagatgactgaagaaaaactggcagaggcagagagagttggactacacaaagtcttcaaactccaaactagtctcacatgcaactctatggtgctttttgaccacgtaggctgtttaaagaaatatgacacggtgttggatattctaagagacttttttgaactcagacttaaatattatggattaagaaaagaatggctcctaggaatgcttggtgctgaatctgctaaactgaataatcaggctcgctttatcttagagaaaatagatggcaaaataatcattgaaaataagcctaagaaagaattaattaaagttctgattcagaggggatatgattcggatcctgtgaaggcctggaaagaagcccagcaaaaggttccagatgaagaagaaaatgaagagagtgacaacgaaaaggaaactgaaaagagtgactccgtaacagattctggaccaaccttcaactatcttcttgatatgcccctttggtatttaaccaaggaaaagaaagatgaactctgcaggctaagaaatgaaaaagaacaagagctggacacattaaaaagaaagagtccatcagatttgtggaaagaagacttggctacatttattgaagaattggaggctgttgaagccaaggaaaaacaagatgaacaagtcggacttcctgggaaaggggggaaggccaaggggaaaaaaacacaaatggctgaagttttgccttctccgcgtggtcaaagagtcattccacgaataaccatagaaatgaaagcagaggcagaaagaaaannnnnnnnnnnnnnnnnnnnnnnnnntactgaaggaagccctcaagaagatggtgtggaactagaaggcctaaaacaaagattagaaaagaaacagaaaagagaaccaggtacaaagacaaagaaacaaactacattggcatttaagccaatcaaaaaaggaaagaagagaaatctctggtctgattcagaatcagataggagcagtgacgaaagtaattttgatgtccctccacgagaaacagagccacggagagcagcaacaaaaacaaaattcacaatggatttggattcagatgaagatttctcagattttgatgaaaaaactgatgatgaagattttgtcccatcagatgctagtccacctaagaccaaaacttccccaaaacttagtaacaaagaactgaaaccacagaaaag

SEQ ID NO: 184543 - DNA, 1528 bp, Homo Sapiens
tttgtacaaaaaagttgggatggattgtagggagtagggtacaatacagtctggtctcctccagctccttctttctgcaacatggggaagaacaaactccttcatccaagtctggttcttctcctcttggtcctcctgcccacagacgcctcagtctctggaaaaccgcagtatatggttctggtcccctccctgctccacactgagaccactgagaagggctgtgtccttctgagctacctgaatgagacagtgactgtaagtgcttccttggagtctgtcaggggaaacaggagcctcttcactgacctggaggcggagaatgacgtactccactgtgtcgccttcgctgtcccaaagtcttcatccaatgaggaggtaatgttcctcactgtccaagtgaaaggaccaacccaagaatttaagaagcggaccacagtgatggttaagaacgaggacagtctggtctttgtccagacagacaaatcaatctacaaaccagggcagacagtgaaatttcgtgttgtctccatggatgaaaactttcaccccctgaatgagttgattccactagtatacattcaggatcccaaaggaaatcgcatcgcacaatggcagagtttccagttagagggtggcctcaagcaattttcttttcccctctcatcagagcccttccagggctcctacaaggtggtggtacagaagaaatcaggtggaaggacagagcaccctttcaccgtggaggaatttgttcttcccaagtttgaagtacaagtaacagtgccaaagataatcaccatcttggaagaagagatgaatgtatcagtgtgtggcctatacacatatgggaagcctgtccctggacatgtgactgtgagcatttgcagaaagtatagtgacgcttccgactgccacggtgaagattcacaggctttctgtgagaaattcagtggacagctaaacagccatggctgcttctatcagcaagtaaaaaccaaggtcttccagctgaagaggaaggagtatgaaatgaaacttcacactgaggcccagatccaagaagaaggaacagtggtggaattgactggaaggcagtccagtgaaatcacaagaaccataaccaaactctcatttgtgaaagtggactcacactttcgacagggaattcccttctttgggcaggtgcgcctagtagatgggaaaggcgtccctataccaaataaagtcatattcatcagaggaaatgaagcaaactattactccaatgctaccacggatgagcatggccttgtacagttctctatcaacaccaccaatgttatgggtacctctcttactgttagggtcaattacaaggatcgtagtccctgttacggctaccagtgggtgtcagagaacacgaagaggcacatcacactgcttatcttgtgttctccccaagcaagagctttgtccaccttgagcccatgtctcatgaactaccctgtggccatactcagacagtccaggcacattatattctgaa

SEQ ID NO: 184544 - DNA, 937 bp, Homo Sapiens
gattttgtgtgttttgcatggcagagctaatatgtctcccaaaactgagacagaagctcgggcagattcttctaccacatttggtggcagtttcagggataattcttcagaaacctcaccacgtgatggacaaagtagggagttgaatgttgtttccttctctagtcttcaggttcaaccaacagaggcttgatgactgtgtctttccttccgtgttcaggaactgaaggcacctcagtcccacacagctcttgagactctagtgcctctgcgctcacagtgaaattcacatttcctaatgactttggggttactgcccaggacacagtttgccgcccgtttgcacagatgcagtgaggcgcttgttccttctccactgggacagctaggaaggcgggagaggcttccagctgcacactgacccggatgcatttgggaaggtagtttaggaccgtggccttgagtgtgaaggcctctccacgaatcacagagtaaggcattgtgagctccacaaagaagggctggaaggctcggagagaggcagtggaagagataccaagtccagcatcttcagacaggcagaaggcccctgccttccactcggtgatggtgtcagggactgttactcctacctcagccacacctgctgagtttaccaccaccaaatcccagatccatgtctcagggaagtactttcgtacggtctccgtgtgaggctcttcaacatgcaccaggcgtgcatggcctcttcccattacatctgactcataaaaacctacacgtagaccttcaggtccatgcatttcatactgttgaagctgtggacacattttgggtttacgaatctttgagttggtgaatgcctttaagcccatgtcctctaggaagctgtacatatccttttcatttgtacccaacttttttgtacaaagttggc

SEQ ID NO: 184545 - DNA, 1014 bp, Homo Sapiens
gagcaatgcttttcctataaaaagccaactttgtacaaaaaagttggctttctgtgagaaattcagtggacagctaaacagccatggctgcttctatcagcaagtaaaaaccaaggtcttccagctgaagaggaaggagtatgaaatgaaacttcacactgaggcccagatccaagaagaaggaacagtggtggaattgactggaaggcagtccagtgaaatcacaagaaccataaccaaactctcatttgtgaaagtggactcacactttcgacagggaattcccttctttgggcaggtgcgcctagtagatgggaaaggcgtccctataccaaataaagtcatattcatcagaggaaatgaagcaaactattactccaatgctaccacggatgagcatggccttgtacagttctctatcaacaccaccaatgttatgggtacctctcttactgttagggtcaattacaaggatcgtagtccctgttacggctaccagtgggtgtcagaagaacacgaagaggcacatcacactgcttatcttgtgttctccccaagcaagagctttgtccaccttgagcccatgtctcatgaactaccctgtggccatactcagacagtccaggcacattatattctgaatggaggcaccctgctggggctgaagaagctctccttctattatctgataatggcaaagggaggcattgtccgaactgggactcatggactgcttgtgaagcaggaagacatgaagggccatttttccatctcaatccctgtgaagtcagacattgctcctgtcgctcggttgctcatctatgctgttttacctaccggggacgtgattggggattctgcaaaatatgatgttgaaaattgtctgggccacaaggtggattgagcttcagcccatcacaaagtctcccagcctcacacgcccacctgcgagtcacagcggctcctcagtccgtctgcgccctccgtgctgtggaccaaagcgtgctgctcatg

SEQ ID NO: 184546 - DNA, 966 bp, Homo Sapiens
ttggctcttacgggactgggaatgtagttttagccctccagggattctatttagcccgccaggaattaaccttgactataaataggccatcaatgacctttccagagaatgttcagagacctcaactttgtttagagatcttgtgtgggtggaacttcctgtttgcacacagagcagcataaagcccagttgctttgggaagtgtttgggaccagatggattgtagggagtagggtacaatacagtctggtctcctccagctccttctttctgcaacatggggaagaacaaactccttcatccaagtctggttcttctcctcttggtcctcctgcccacagacgcctcagtctctggaaaaccgcagtatatggttctggtcccctccctgctccacactgagaccactgagaagggctgtgtccttctgagctacctgaatgagacagtgactgtaagtgcttccttggagtctgtcaggggaaacaggagcctcttcactgacctggaggcggagaatgacgtactccactgtgtcgccttcgctgtcccaaagtcttcatccaatgaggaggtaatgttcctcactgtccaagtgaaaggaccaacccaagaatttaagaagcggaccacagtgatggttaagaacgaggacagtctggtctttgtccagacagacaaatcaatctacaaaccagggcagacagtgaaatttcgtgttgtctccatggatgaaaactttcaccccctgaatgagttgattccactagtatacattcaggatcccaaaggaaatcgcatcgcacaatggcagagtttccagttagagggtggcctcaagcaattttcttttcccctctcatcagagcccttccagggctcctacaagtggtggtacagaagaaatcaagtggaatgacagagcactctttcaccgtggaggaatttgttcttcccaagtttgaa

SEQ ID NO: 184547 - DNA, 988 bp, Homo Sapiens
ctttgtacaaaaaagttgggtgtttgggaccagatggattgtagggagtagggtacaatacagtctgttctcctccagctccttctttctgcaacatggggaagaacaaactccttcatccaagtctggttcttctcctcttggtcctcctgcccacagacgcctcagtctctggaaaaccgcagtatatggttctggtcccctccctgctccacactgagaccactgagaagggctgtgtccttctgagctacctgaatgagacagtgactgtaagtgcttccttggagtctgtcaggggaaacaggagcctcttcactgacctggaggcggagaatgacgtactccactgtgtcgccttcgctgtcccaaagtcttcatccaatgaggaggtaatgttcctcactgtccaagtgaaaggaccaacccaagaatttaagaagcggaccacagtgatggttaagaacgaggacagtctggtctttgtccagacagacaaatcaatctacaaaccagggcagacagtgaaatttcgtgttgtctccatggatgaaaactttcaccccctgaatgagttgattccactagtatacattcaggatcccaaaggaaatcgcatcgcacaatggcagagtttccagttagagggtggcctcaagcaattttcttttcccctctcatcagagcccttccagggctcctacaaggtggtggtacagaagaaatcaggtggaaggacagagcaccctttcaccgtggaggaatttgttcttcccaagtttgaagtacaagtaacagtgccaaagataatcaccatcttggaagaagagatgaatgtatcagtgtgtggcctatacacatatgggaagcctgtccctggacatgtgactgtgagcatttgcagaaagtatagtgacgcttccgactgccacggtgaagattcacagggctttctgtgagaaattcagtggacagctaaacagccatg

SEQ ID NO: 184548 - DNA, 1757 bp, Homo Sapiens
actttgtacaaaaaagttgggccaccaaatcgtggtaaaagaatctgcccgagcttctgtctcagttttgggagacatattaggctctgccatgcaaaacacacaaaatcttctccagatgccctatggctgtggagagcagaatatggtcctctttgctcctaacatctatgtactggattatctaaatgaaacacagcagcttactccagaggtcaagtccaaggccattggctatctcaacactggttaccagagacagttgaactacaaacactatgatggctcctacagcacctttggggagcgatatggcaggaaccagggcaacacctggctcacagcctttgttctgaagacttttgcccaagctcgagcctacatcttcatcgatgaagcacacattacccaagccctcatatggctctcccagaggcagaaggacaatggctgtttcaggagctctgggtcactgctcaacaatgccataaagggaggagtagaagatgaagtgaccctctccgcctatatcaccatcgcccttctggagattcctctcacagtcactcaccctgttgtccgcaatgccctgttttgcctggagtcagcctggaagacagcacaagaaggggaccatggcagccatgtatataccaaagcactgctggcctatgcttttgccctggcaggtaaccaggacaagaggaaggaagtactcaagtcacttaatgaggaagctgtgaagaaagacaactctgtccattgggagcgccctcagaaacccaaggcaccagtggggcatttttacgaaccccaggctccctctgctgaggtggagatgacatcctatgtgctcctcgcttatctcacggcccagccagccccaacctcggaggacctgacctctgcaaccaacatcgtgaagtggatcacgaagcagcagaatgcccagggcggtttctcctccacccaggacacagtggtggctctccatgctctgtccaaatatggagcagccacatttaccaggactgggaaggctgcacaggtgactatccagtcttcagggacattttccagcaaattccaagtggacaacaacaaccgcctgttactgcagcaggtctcattgccagagctgcctggggaatacagcatgaaagtgacaggagaaggatgtgtctacctccagacatccttgaaatacaatattctcccagaaaaggaagagttcccctttgctttaggagtgcagactctgcctcaaacttgtgatgaacccaaagcccacaccagcttccaaatctccctaagtgtcagttacacagggagccgctctgcctccaacatggcgatcgttgatgtgaagatggtctctggcttcattcccctgaagccaacagtgaaaatgcttgaaagatctaaccatgtgagccggacagaagtcagcagcaaccatgtcttgatttaccttgataaggtgtcaaatcagacactgagcttgttcttcacggttctgcaagatgtcccagtaagagatctgaaaccagccatagtgaaagtctatgattactacgagacggatgagtttgcaattgctgagtacaatgctccttgcagcaaagatcttggaaatgcttgaagaccacaaggctgaaaagtgctttgctggagtcctgttctcagagctccacagaagacacatgtttttgtatctttaaagacttgatgaataaacactttttctggtcaatgtc

SEQ ID NO: 184549 - DNA, 2765 bp, Homo Sapiens
ccaactttgtacaaaaaagttggatgaaacttcacactgaggcccagatccaagaagaaggaacagtggtggaattgactggaaggcagtccagtgaaatcacaagaaccataaccaaactctcatttgtgaaagtggactcacactttcgacagggaattcccttctttgggcaggtgcgcctagtagatgggaaaggcgtccctataccaaataaagtcatattcatcagaggaaatgaagcaaactattactccaatgctaccacggatgagcatggccttgtacagttctctatcaacaccaccaatgttatgggtacctctcttactgttagggtcaattacaaggatcgtagtccctgttacggctaccagtgggtgtcagaagaacacgaagaggcacatcacactgcttatcttgtgttctccccaagcaagagctttgtccaccttgagcccatgtctcatgaactaccctgtggccatactcagacagtccaggcacattatattctgaatggaggcaccctgctggggctgaagaagctctccttctattatctgataatggcaaagggaggcattgtccgaactgggactcatggactgcttgtgaagcaggaagacatgaagggccatttttccatctcaatccctgtgaagtcagacattgctcctgtcgctcggttgctcatctatgctgttttacctaccggggacgtgattggggattctgcaaaatatgatgttgaaaattgtctggccaacaaggtggatttgagcttcagcccatcacaaagtctcccagcctcacacgcccacctgcgagtcacagcggctcctcagtccgtctgcgccctccgtgctgtggaccaaagcgtgctgctcatgaagcctgatgctgagctctcggcgtcctcggtttacaacctgctaccagaaaaggacctcactggcttccctgggcctttgaatgaccaggacgatgaagactgcatcaatcgtcataatgtctatattaatggaatcacatatactccagtatcaagtacaaatgaaaaggatatgtacagcttcctagaggacatgggcttaaaggcattcaccaactcaaagattcgtaaacccaaaatgtgtccacagcttcaacagtatgaaatgcatggacctgaaggtctacgtgtaggtttttatgagtcagatgtaatgggaagaggccatgcacgcctggtgcatgttgaagagcctcacacggagaccgtacgaaagtacttccctgagacatggatctgggatttggtggtggtaaactcagcaggtgtggctgaggtaggagtaacagtccctgacaccatcaccgagtggaaggcaggggccttctgcctgtctgaagatgctggacttggtatctcttccactgcctctctccgagccttccagcccttctttgtggagctcacaatgccttactctgtgattcgtggagaggccttcacactcaaggccacggtcctaaactaccttcccaaatgcatccgggtcagtgtgcagctggaagcctctcccgccttcctagctgtcccagtggagaaggaacaagcgcctcactgcatctgtgcaaacgggcggcaaactgtgtcctgggcagtaaccccaaagtcattaggaaatgtgaatttcactgtgagcgcagaggcactagagtctcaagagctgtgtgggactgaggtgccttcagttcctgaacacggaaggaaagacacagtcatcaagcctctgttggttgaacctgaaggactagagaaggaaacaacattcaactccctactttgtccatcaggtggtgaggtttctgaagaattatccctgaaactgccaccaaatgtggtagaagaatctgcccgagcttctgtctcagttttgggagacatattaggctctgccatgcaaaacacacaaaatcttctccagatgccctatggctgtggagagcagaatatggtcctctttgctcctaacatctatgtactggattatctaaatgaaacacagcagcttactccagagatcaagtccaaggccattggctatctcaacactggttaccagagacagttgaactacaaacactatgatggctcctacagcacctttggggagcgatatggcaggaaccagggcaacacctggctcacagcctttgttctgaagacttttgcccaagctcgagcctacatcttcatcgatgaagcacacattacccaagccctcatatggctctcccagaggcagaaggacaatggctgtttcaggagctctgggtcactgctcaacaatgccataaagggaggagtagaagatgaagtgaccctctccgcctatatcaccatcgcccttctggagattcctctcacagtcactcaccctgttgtccgcaatgccctgttttgcctggagtcagcctggaagacagcacaagaaggggaccatggcagccatgtatataccaaagcactgctggcctatgcttttgccctggcaggtaaccaggacaagaggaaggaagtactcaagtcacttaatgaggaagctgtgaagaaagacaactctgtccattgggagcgccctcagaaacccaaagcaccagtggggcatttttacgaaccccaggctccctctgctgaggtggagatgacatcctatgtgctcctcgcttatctcacggcccagccagccccaacctcggaggacctgacctctgca

SEQ ID NO: 184550 - DNA, 1892 bp, Homo Sapiens
ttgggttcggttggcgctgcggagcgcagctgtgagggagtcgctgtgatccggggccccggaacccgagctggagctgaagcgcaggctgcggggcgcggagtcgggagtgcaggcctgagtgttccttccagcatgtcggagggggagtcccagacagtacttagcagtggctcagacccaaaggtagaatcctcatcttcagctcctggcctgacatcagtgtcacctcctgtgacctccacaacctcagctgcttccccagaggaagaagaagaaagtgaagatgagtctgagattttggaagagtcgccctgtgggcgctggcagaagaggcgagaagaggtgaatcaacggaatgtaccaggtattgacagtgcatacctggccatggatacagaggaaggtgtagaggttgtgtggaatgaggtacagttctctgaacgcaagaactacaagctgcaggaggaaaaggttcgtgctgtgtttgataatctgattcaattggagcatcttaacattgttaagtttcacaaatattgggctgacattaaagagaacaaggccagggtcatttttatcacagaatacatgtcatctgggagtctgaagcaatttctgaagaagaccaaaaagaaccacaagacgatgaatgaaaaggcatggaagcgttggtgcacacaaatcctctctgccctaagctacctgcactcctgtgacccccccatcatccatgggaacctgacctgtgacaccatcttcatccagcacaacggactcatcaagattggctctgtggctcctgacactatcaacaatcatgtgaagacttgtcgagaagagcagaagaatctacacttctttgcaccagagtatggagaagtcactaatgtgacaacagcagtggacatctactcctttggcatgtgtgcactggagatggcagtgctggagattcagggcaatggagagtcctcatatgtgccacaggaagccatcagcagtgccatccagcttctagaagacccattacagagggagttcattcaaaagtgcctgcagtctgagcctgctcgcagaccaacagccagagaacttctgttccacccagcattgtttgaagtgccctcgctcaaactccttgcggcccactgcattgtgggacaccaacacatgatcccagagaacgctctagaggagatcaccaaaaacatggatactagtgccgtactggctgaaatccctgcaggaccaggaagagaaccagttcagactttgtactctcagtcaccagctctggaattagataaattccttgaagatgtcaggaatgggatctatcctctgacagcctttgggctgcctcggccccagcagccacagcaggaggaggtgacatcacctgtcgtgcccccctctgtcaagactccgacacctgaaccagctgaggtggagactcgcaaggtggtgctgatgcagtgcaacattgagtcggtggaggagggagtcaaacaccacctgacacttctgctgaagttggaggacaaactgaaccggcacctgagctgtgacctgatgccaaatgagaatatccccgagttggcggctgagctggtgcagctgggcttcattagtgaggctgaccagagccggttgacttctctgctagaagagaccttgaacaagttcaattttgccaggaacagtaccctcaactcagccgctgtcaccgtctcctcttagagctcactcgggccaggccctgatctgcgctgtggctgtccctggacgtgctgcagccctcctgtcccttccccccagtcagtattaccctgtgaagccccttccctcctttattattcatgagggctgggggggctccctggttctga

SEQ ID NO: 184551 - DNA, 2478 bp, Homo Sapiens
ttgggtctaatggcggacgccagtatgttggagttggtggtggcttaagttttgaagggaggtagcatccgttggatatccacaccatccttctcgctgcaggctttcttggactccgtactgttggtgtaaccaaggcctggaggtctgggtggctcaggtttcctgcagccatgtttctgtacaacttaaccttgcagagagccactggcatcagctttgccattcatggaaacttttctggaaccaaacaacaagaaattgttgtttcccgtgggaagatcttggagctgcttcgcccagaccccaacactggcaaagtacataccctactcactgtggaagtattcggtgttatccggtcactcatggcctttaggctgacaggtggcaccaaagactacattgtagttggcagtgactctggtcgaattgttattttggaataccagccatctaagaatatgtttgagaagattcaccaagaaacctttggcaagagtggatgccgtcgcatcgttcctggccagttcttagctgtggatcccaaagggcgagccgttatgattagtgccattgagaaacagaaattggtgtatattttgaacagagatgctgcagcccgacttaccatttcatctcccctggaagcccacaaagcaaacactttagtgtatcatgtagttggagtagatgtcggatttgaaaatccaatgtttgcttgtctggaaatggattatgaggaagcagacaatgatccaacaggggaagcagcagctaatacccagcagacacttactttctatgagctagaccttggtttaaatcatgtggtccgaaaatacagtgaacctttggaggaacacggcaacttccttattacagttccaggagggtcagatggtccaagtggagtactgatctgctctgaaaactatattacttacaagaactttggtgaccagccagatatccgctgtccaattcccaggaggcggaatgacctggatgaccctgaaagaggaatgatttttgtctgctctgcaacccataaaaccaaatcgatgttcttctttttggctcaaactgagcagggagatatctttaagatcactttggagacagatgaagatatggttactgagatccggctcaaatattttgatactgtacccgttgctgctgccatgtgtgtgcttaaaacagggttcctttttgtagcatcagaatttggaaaccattacttatatcaaattgcacatcttggagatgatgatgaagaacctgagttttcatcagccatgcctctggaagaaggagacacattcttttttcagccaagaccacttaaaaaccttgtgctggttgatgagttggacagcctctctcccattctgttttgccagatagctgatctggccaatgaagatactccacagttgtatgtggcctgtggtaggggaccccgatcatctctgagagtcctaagacatggacttgaggtgtcagaaatggctgtttctgagctacctggtaaccccaacgctgtctggacagtgcgtcgacacattgaagatgagtttgatgcctacatcattgtgtctttcgtgaatgccaccctagtgttgtccattggagaaactgtagaagaagtgactgactctgggttcctggggaccaccccgaccttgtcctgctccttattaggagatgatgccttggtgcaggtctatccagatggcattcggcacatacgagcagacaagagagtcaatgagtggaagacccctggaaagaaaacaattgtgaagtgtgcagtgaaccagcgacaagtggtgattgccctgacaggaggagagctggtctatttcgagatggatccttcaggacagctgaatgagtacacagaacggaaggagatgtcagcagatgtggtgtgcatgagtctggccaatgtaccccctggagagcagcggtctcgcttcctggctgtggggcttgtggacaacactgtcagaatcatctccctggatccctcagactgtttgcaacctctaagcatgcaggctctcccagcccagcctgagtccttgtgtatcgtggaaatgggtgggactgagaagcaggatgagctgggtgagaggggctcgattggcttcctatacctgaatattgggctacagaacggtgtgctgctgaggactgtcttggaccctgtcactggggatttgtctgatactcgcactcggtacctggggtcccgtcctgtgaagctcttccgagtccgaatgcaaggccaggaggcagtattggccatgtcaagccgctcatggttgagctattcttaccaatctcgcttccatctcactccactgtcttacgagacactggaatttgcatcggggttttgcctcggaacagtgtcccgagggcattgtggccatctccaccaacactctacggattttgggcattaga

SEQ ID NO: 184552 - DNA, 2629 bp, Homo Sapiens
ctataaaagccaactttgtacaaaaaagttgggtttgatgcctacatcattgtgtctttcgtgaatgccaccctagtgttgtccattggagaaactgtagaagaagtgactgactctgggttcctggggaccaccccgaccttgtcctgctccttattaggagatgatgccttggtgcaggtctatccagatggcattcggcacatacgagcagacaagagagtcaatgagtggaagacccctggaaagaaaacaattgtgaagtgtgcagtgaaccagcgacaagtggtgattgccctgacaggaggagagctggtctatttcgagatggatccttcaggacagctgaatgagtacacagaacggaaggagatgtcagcagatgtggtgtgcatgagtctggccaatgtaccccctggagagcagcggtctcgcttcctggctgtggggcttgtggacaacactgtcagaatcatctccctggatccctcagactgtttgcaacctctaagcatgcaggctctcccagcccagcctgagtccttgtgtatcgtggaaatgggtgggactgagaagcaggatgagctgggtgagaggggctcgattggcttcctatacctgaatattgggctacagaacggtgtgctgctgaggactgtcttggaccctgtcactggggatttgtctgatactcgcactcggtacctggggtcccgtcctgtgaagctcttccgagtccgaatgcaaggccaggaggcagtattggccatgtcaagccgctcatggttgagctattcttaccaatctcgcttccatctcaccccactgtcttacgagacactggaatttgcatcgggttttgcctcggaacagtgtcccgagggcattgtggccatctccaccaacaccctacggattttggcattagagaagctcggtgctgtcttcaatcaagtagccttcccactgcagtacacacccaggaaatttgtcatccaccctgagagtaacaaccttattatcattgaaacggaccacaatgcctacactgagggcacgaaagctcagagaaagcagcagatggcagaggaaatggtggaagcagcaggggaggatgagcgggagctggccgcagagatggcagcagcattcctcaatgaaaacctccctgaatccatctttggagctcccaaggctggcaatgggcagtgggcctctgtgatccgagtgatgaatcccattcaagggaacacactggaccttgtccagctggaacagaatgaggcagcttttagtgtggctgtgtgcaggttttccaacactggtgaagactggtatgtgctggtgggtgtggccaaggacctgatactaaacccccgatctgtggcagggggcttcgtctatacttacaagcttgtgaacaatggggaaaaactggagtttttgcacaagactcctgtggaagaggtccctgctgctattgccccattccaggggagggtgttgattggtgtggggaagctgttgcgtgtctatgacctgggaaagaagaagttactccgaaaatgtgagaataagcatattgccaattatatctctgggatccagactattggacatagggtaattgtatctgatgtccaagaaagtttcatctgggttcgctacaagcgtaatgaaaaccagcttatcatctttgctgatgatacctacccccgatgggtcactacagccagcctcctggactatgacactgtggctggggcagacaagtttggcaacatatgtgtggtgaggctcccacctaacaccaatgatgaagtagatgaggatcctacaggaaacaaagccctgtgggaccgtggcttgctcaatggggcctcccagaaggcagaggtgatcatgaactaccatgtcggggagacggtgctgtccttgcagaagaccacgctgatccctggaggctcagaatcacttgtctataccaccttgtctggaggaattggcatccttgtgccattcacgtcccatgaggaccatgacttcttccagcatgtggaaatgcacctgcggtctgaacatccccctctctgtgggcgggaccacctcagctttcgctcctactacttccctgtgaagaatgtgattgatggagacctctgtgagcagttcaattccatggaacccaacaaacaaaagaacgtctctgaagaactggaccgaaccccacccgaagtgtccaagaaactcgaggatatccggacccgctacgccttctgagccctcctttcccggtggggcttgccagagactgtgtgttttgtttcccccaccaccatcactgccacctggcttctgccatgtggcaggagggtgactggataattaagactgcattatgaaagtcaacagctctttcccctcagctcttctcctggaatgactggcttcccctcaaaattggcactgagatttgctacacttctccccacctggtacatgatacatgaccccagggttccagtgtagaacctgagtcccccattccccacagccatccctgcattgatatgtcttgactctcctgtctacttttgcacacacccttaaatttattggttttcttgta

SEQ ID NO: 184553 - DNA, 1871 bp, Homo Sapiens
ttggcgaggtccgcgccccgcgcccggcgccgggcgcccgaagccgggagccgccgccatgggggcctgcctgggagcctgctccctgctcagctgcgcgtcctgcctctgcggctctgccccctgcatcctgtgcagctgctgccccgccagccgcaactccaccgtgagccgcctcatcttcacgttcttcctcttcctgggggtgctggtgtccatcattatgctgagcccgggcgtggagagtcagctctacaagctgccctgggtgtgtgaggagggggccgggatccccaccgtcctgcagggccacatcgactgtggctccctgcttggctaccgcgctgtctaccgcatgtgcttcgccacggcggccttcttcttctttttcaccctgctcatgctctgcgtgagcagcagccgggacccccgggctgccatccagaatgggttttggttctttaagttcctgatcctggtgggcctcaccgtgggtgccttctacattcctgacggctccttcaccaacatctggttctacttcggcgtcgtgggctccttcctcttcatcctcatccagctggtgctgctcatcgactttgcgcactcctggaaccagcggtggctgggcaaggccgaggagtgcgattcccgtgcctggtacgcaggcctcttcttcttcactctcctcttctacttgctgtcgatcgcggccgtggcgctgatgttcatgtactacactgagcccagcggctgccacgagggcaaggtcttcatcagcctcaacctcaccttctgtgtctgcgtgtccatcgctgctgtcctgcccaaggtccaggacgcccagcccaactcgggtctgctgcaggcctcggtcatcaccctctacaccatgtttgtcacctggtcagccctatccagtatccctgaacagaaatgcaacccccatttgccaacccagctgggcaacgagacagttgtggcaggccccgagggctatgagacccagtggtgggatgccccgagcattgtgggcctcatcatcttcctcctgtgcaccctcttcatcagtctgcgctcctcagaccaccggcaggtgaacagcctgatgcagaccgaggagtgcccacctatgctagacgccacacagcagcagcagcagcaggtggcagcctgtgagggccgggcctttgacaacgagcaggacggcgtcacctacagctactccttcttccacttctgcctggtgctggcctcactgcacgtcatgatgacgctcaccaactggtacaagcccggtgagacccggaagatgatcagcacgtggaccgccgtgtgggtgaagatctgtgccagctgggcagggctgctcctctacctgtggaccctggtagccccactcctcctgcgcaaccgcgacttcagctgaggcagcctcacagcctgccatctggtgcctcctgccacctggtgcctctcggctcggtgacagccaacctgccccctccccacaccaatcagccaggctgagcccccacccctgccccagctccaggacctgcccctgagccgggccttctagtcgtagtgccttcagggtccgaggagcatcaggctcctgcagagccccatccccccgccacacccacacggtggagctgcctcttccttcccctcctccctgttgcccatactcagcatctcggatgaaagggctcccttgtcctcaggctccacgggagcggggctgctggagagagcggggaactcccaccacagtggggcatccggcactgaagccctggtgttcctggtcacgtcccccaggggaccctgcccccttcctggacttcgtggcttactgagtctct

SEQ ID NO: 184554 - DNA, 1530 bp, Homo Sapiens
  misc_feature (894)..(945): n is a, c, g, or t
ttgggctaaaccgtgacttcttagaaaattcaaccaaaatctcatgggttagttaaccaggtgcaatacagcacaccaaaagcttgactgccagtgaagatggacctgctcttatactgttgattactttcagtattaatatactattccccaattattttttgattggtatgtattaatgggtaattgaataatgaaaataagccaggtatttttgtgccggaagtttactagattgcatgttaccaaataccctgctcttcctctaattcccttcccccatctgactctattatcaactaaatgcattccaggcaaacagatggacactcacagcccttcccagccccacctccaagtagtatgcaaatggcactgagatttagcaaaaacgcggcgtctttgaaagttaacagacactaaggtagcagtgcctgtgtgttggagctcagttaggagttgaagttttctgcacctgtgataacaagcccaccagccacatgcatttcttcttcctgccactgtgactcggtggctgtagagccacatggcatttgtcagccaatctgtttcaagtcttttctttccaccaatagctttcttacagattttcttggctaaatgaggccattacctagattgtcccttcagtaggagcctgaatccttcgcttaccaggctgagagctatttgccatgataatgctgattctctcactcctcatgcagaatgtgcacctgcagccctttgatgcgttttgatttgggggcgatttttcaggctttgattagcaggctgcttgcaatgcagaagatcacagttcctttctggggcagcagcaaccagagcctcttcctgtgtcctgtgtgtctggtatgtttacaccttgctctnnnnnnnnnnnnnnnnnnnnnnnnnnnnnnnnnnnnnnnnnnnnnnnnnnnngacatcttgtttacagtttttgtctgatgttttttcttttgtagtgtcttatgccctagatttagtcatcttgttaaatatatttggatatgaaatcttgacgaaaagaaaataactcctgaaaaagagggtctatcttgccacacgttaaaaacaaaaataatgtccttgtggcctcttacttgataaagttgcaccaggacggtctgagaaaggcaggcggtgtaatatgtggtgcaatccattttttcaaggtgatgacggcacaaaatacttagactagatgctgatccataaacattcactgatattcttacaggttggtttgcagtgttaacatttttgttagcctgatctgtaggtgggaagtaagatcatcataattccttagctctgagcactgattcaaaattgtataaatgactgaacaacttagatgatttgaaattaattgaaaataagaagggcttgtggaatttgcatttgggctttggccttcaagcatttggaaatattagagatttccattttacatgtctccaactggggtgcttcttacaaccctttcacttttttttgagacga

SEQ ID NO: 184555 - DNA, 1947 bp, Homo Sapiens
ttggctcaatcacctctcctctcacactgctacctcaggtggacaacaaggcattaccttaaccaaagagagcaagccttcaggaaacatattgacggtgcctgaaacaagcaggcacactggagagacacctaacagcactgccagtgtcgagggacttcctaatcatgtccatcagatgacggcagatgctgtttgcagtcctagccatggagattctaagtcaccaggtttactaagttcagacaatcctcagctctctgccttgttgatgggaaaagccaataacaatgtgggtactggaacctgtgacaaagtcaataacatccacccagctgttcatacaaagactgataactctgttgcctcttcaccatcttcagccatttcaacagcaacaccttctccaaaatccactgagcagacaaccacaaacagtgttaccagccttaacagccctcacagtgggctacacacaattaatggagaagggatggaagaatctcagagccccatgaaaacagatctgcttctggttaaccacaaacctagtccacagatcataccatcaatgtctgtgtccatataccccagctcagcagaagttctgaaggcatgcaggaatctaggtaaaaatggcttatctaacagtagcattttgttggataaatgtccacctccaagaccaccatcttcaccataccctcccttgccaaaggacaagttgaatccacctacacctagtatttacttggaaaataaacgtgatgctttctttcctccattacatcaattttgtacaaatccgaacaaccctgttacagtaatacgtggccttgctggagctcttaagttagacctgggacttttctctactaaaactttggtggaagctaacaatgaacatatggtagaagtgaggacacagttgttgcagccagcagatgaaaactgggatcccactggaacaaagaaaatctggcattgtgaaagtaatagatctcatactacaattgctaaatatgcacagtaccaggcctcctcattccaggaatcattgagagaagaaaatgaaaaaagaagtcatcataaagaccactcagatagtgaatctacatcgtcagataattctgggaggaggaggaaaggaccctttaaaaccataaagtttgggaccaatattgacctatctgatgacaaaaagtggaagttgcagctacatgagctgactaaacttcctgcttttgtgcgtgtcgtatcagcaggaaatcttctaagccatgttggtcataccatattgggcatgaacacagttcaactatacatgaaagttccagggagcagaacaccaggtcatcaggaaaataacaacttctgttcagttaacataaatattggcccaggtgactgtgaatggtttgttgttcctgaaggttactggggtgttctgaatgacttctgtgaaaaaaataatttgaatttcctaatgggttcttggtggcccaatcttgaagatctttatgaagcaaatgttccagtgtataggtttattcagcgacctggagatttggtctggataaatgcaggcactgttcattgggttcaggctattggctggtgcaacaacattgcttggaatgttggtccacttacagcctgccagtataaattggcagtggaacggtacgaatggaacaaattgcaaagtgtgaagtcaatagtacccatggttcatctttcctggaatatggcacgaaatatcaaggtctcagatccaaagctttttgaaatgattaagtattgtcttctaagaactctgaagcaatgtcagacattgagggaagctctcattgctgcacgaaaagagattatatggcatgggcggacaaagaagatccagctcattactgtagcatttgtgaagtggaggttttgatctgctttttg

SEQ ID NO: 184556 - DNA, 1405 bp, Homo Sapiens
  misc_feature (415)..(440): n is a, c, g, or t
  misc_feature (952)..(960): n is a, c, g, or t
ttgtgtatcttttcgtattctgaaaatagtgctataaaactcaattatcctagcttctaaaatctaccatcttagatagttcaaattaaacatggttgcctgcaaattcttttctagaggaagtcacacgcaaaacacatatggttatgttttgctgctggtctcctcatacatgtgcttcatcaacgagagcactactctaggcatgcatttatcatactactttaacataactgaacatgaggaaaacagttcacatcttgataagtgatttattttggcggcaggcttattttttaatgaaaacaaatctctgaagtcaaatggccagtttgacaacctgaattagaaacttaagtctgtaaaaaaatcttaagacatggaaagctgttactgaaaaatacacaatctaacnnnnnnnnnnnnnnnnnnnnnnnnnnataaatgaagatttgtggtaaaagtcaaagataactccaagtcacacagggcatcatttgtcactgctttgtaatagaaatatataagtatttttaacttgaatttcaaagaatttaagattttttattaaagctctagtccaagtttccagctgttaaatttttaaaaaatataatttgggtctctgatagaacttagctgggctaagctacttggataaccttacaggatagtgaggttcaaacagagatcatttcctgaacatggctgatctttaagagaacaatttcctcacccaaagttatgcaggatactgccagatctccaatacaaaaaacctgccagaatttctagacaattgtttaccatccatgttaaaaaccttgtaccaccagaggcaaagcagataaagtaaacttgtttctagtctagactattcacctaaataaactcataaagttgtagagaaaaattaatgaatagaaagtaattttatctgatctgtcagccnnnnnnnnnttactaattctctataataaagagaaaactcaaccataaaatgtctgtttaagtaaaaatgccaatcttgaaatcttttaacaccaagacatagaaaaaagtttagaaattcaagatgatgcttaaaatgaaagctatggttcgaaattagtattcatagtaagagactaaaatcctatcactgcaaaattccccttggcttttggcattgacgttgaaagattttagtcttttggtcacttgaagctgctacaaaatacaacaataagcctttaaaatgggggcgggggaagtatggaattgaaagatagttaaggtgactacatcatatacaagtaaaacatagtttgaaataaacagtcatttctgctagggatctgaagatataagaacagttttccactatcccttcctttttgaagaggatcctgtaaagaaaatccaa

SEQ ID NO: 184557 - DNA, 2060 bp, Homo Sapiens
  misc_feature (264)..(289): n is a, c, g, or t
ttggggaaatgatctctgtttgaacctcactatcctgtaaggttatccaagtagcttagcccagctaagttctatcagagacccaaattatattttttaaaaatttaacagctggaaacttggactagagctttaataaaaaatcttaaattctttgaaattcaagttaaaaatacttatatatttctattacaaagcagtgacaaatgatgccctgtgtgacttggagttatctttgacttttaccacaaatcttcatttatnnnnnnnnnnnnnnnnnnnnnnnnnngttagattgtgtatttttcagtaacagctttccatgtcttaagatttttttacagacttaagtttctaattcaggttgtcaaactggccatttgacttcagagatttgttttcattaaaaaataagcctgccgccaaaataaatcacttatcaaaatgtgaactgttttcctcatgttcagttatgttaaagtagtatgataaatgcatgcctagagtagtgctctcgttgatgaagcacatgtatgaggagaccagcagcaaaacataaccatatgtgttttgcgtttacttcctctagaaaagaatttgcaggcaaccatgtttaatttgaactatctaagatggtagattttagaagctaggaataattgagttttatagcactattttcagaatacaaaaagatacacaatcattctgttttttgaaattccatgtgattcaaactgttccctattatttgggtattaatttgcactaatagcaaaatgtaatggcagatcagctttgagagtggtcctaagcagtaaactggatgatgttgcattagaaaaacatcaataattcatatttaagttttagtagttactactgatttgataatcacttaaattttatatatcttaatgtattttttcagactcctaattaattcccacattcactgtaactaggggcatagtccattctgttaggattatatcctctccttagaaatgttttccatcctgttgtggggatttggtattaatgtttcttcattgattatggaacttttgttccctgaagctagttaactgtgtctaaagttaaataaatacagcagaatgattgttttagcctgctcgaactgatacaaatccctgaaaccatgattggcatatgttagataacaaatgaggatgtctaagaggcatatgctgctttggaggtgtagtgaacgtgtgtacagaagttttcaatcttaactatatagtgttagtgtgatgctatactattggaaaaatagcagcttttttctattttataagttgtatgcataaacataagatttgtaatgtttcatttataaactgccttcttcaacacatgttaatagtgttttctcaaagtattgatagtatgtcttccagaatttcacaatatgcttacagtaaatatttcctagcttgttgaaatgttcaattctttgttggctttcttcttgattctgtgggggtgtataacaagcctgaaggacattgtaatcatttcttacaaggtgaaaattaagaaagattgtgtatgagagcctatatagttgttttatccattatcatctttgattaagactttaaaaaaatgctatttccagttaatgcatttggccctattgaattttcagggaccagaaaacattaaaaagttctgcatcttataatggtaaccaattaagcttgagattgttctgaaagtatcaattgctttaaaactgttgtaagtacagttggcaagatctccaagctgaaacttacacgttaaaacttttgcctgtaagaatttgcacatgaatgttaatggaaaacacaaaacttaagatggcccaaaacaaaagccacaaacagttcatcatttggtgcttactctttgtaagggctctctgtggtttgacttactcccgctaccgttaaatgagggcaaatcaccttaaaacgtgttcatttgattcataacagagaaaattgggtctatgattttttgccaatcttagcctaaaagaaattgcttta

SEQ ID NO: 184558 - DNA, 1439 bp, Homo Sapiens
  misc_feature (425)..(433): n is a, c, g, or t
  misc_feature (944)..(969): n is a, c, g, or t
ttggctcttcaaaaaggaagggagatagtggaaaactgttcttatatcttcagatccctagcagaaatgactgtttatttcaaactatgttttacttgtatatgatgtagtcaactatctttcaattccatacttcccccgcccccattttaaaggcttattgttgtattttgtagcagcttcaagtgaccaaaagactaaaatctttcaacgtcaatgccaaaagccaaggggaattttgcagtgacaggattttagtctcttactatgaatactaatttcgaaccatagctttcatttaagcatcatcttgaatttctaaacttttttctatgtcttggtgttaaaagatttcaagattggcatttttacttaaacagacattttatggttgagttttctctttattatagagaattagtaannnnnnnnnggctgacagatcagataaaattactttctattcattaatttttctctacaactttatgagtttatttaggtgaatagtctagactagaaacaagtttactttatctgctttgcctctggtggtacaaggtttttaacatggattgtaaacaattgtctagaaattctggcaggttttttgtattggagatctggcagtatcctgcataactttgggtgaggaaattgttctcttaaagatcagccatgttcaggaaatgatctctgtttgaacctcactatcctgtaaggttatccaagtagcttagcccagctaagttctatcagagacccaaattatattttttaaaaatttaacagctggaaacttggactagagctttaataaaaatcttaaattctttgaaattcaagttaaaaatacttatatatttctattacaaagcagtgacaaatgatgccctgtgtgacttggagttatctttgacttttaccacaaatcttcatttatnnnnnnnnnnnnnnnnnnnnnnnnnngttagattgtgtatttttcagtaacagctttccatgtcttaagatttttttacagacttaagtttctaattcaggttgtcaaactggccatttgacttcagagatttgttttcattaaaaaataagcctgccgccaaaataaatcacttatcaaaatgtgaactgttttcctcatgttcagttatgttaaagtagtatgataaatgcatgcctagagtagtgctctcgttgatgaagcacatgtatgaggagaccagcagcaaaacataaccatatgtgttttgcgtttacttcctctagaaaagaatttgcaggcaaccatgtttaatttgaactatctaaagatggtagattttagaagctagggaataattgagttttatagcactattttcagaatacaaaaagatacacaatcattctgttttttgaaattccatgtgattcaaaactgtttccctattatttgg

SEQ ID NO: 184559 - DNA, 1813 bp, Homo Sapiens
  misc_feature (983)..(992): n is a, c, g, or t
  misc_feature (1706)..(1714): n is a, c, g, or t
ttggcgacggatcctcctcctcccttattcccttgctcctctttcttccttttcttttcctttccggccgggcctcgtccactttccctaacggcggcctcgatcctacgtaaaggcatgacttcctggcaccacagggaaaatcgggtgcaagcccagaaactatttccccaccaccacttgttgaaaaactgatttgaaggcatctccggggttgaacaaacggaaagtgccaggatttgatgcgtctctggtttcgctctggagaccattccctgctaagtatcaagacgaaaaaaactggaaactaatccgaaccatatttatttagagtcagaatggagcgatttgtagtaacagcaccacctgctcgaaaccgttctaagactgctttgtatgtgactcccctggatcgagtcactgagtttggaggtgagctgcatgaagatggaggaaaactcttctgcacttcttgcaatgtggttctgaatcatgttcgcaagtctgccattagtgaccacctcaagtcaaagactcataccaagaggaaggcagaatttgaagagcagaatgtgagaaagaagcagaggcccctaactgcatctcttcagtgcaacagtactgcgcaaacagagaaagtcagtgttatccagggctttgtgaaaatgtgcctggaagccaacatcccacttgagaaggctgatcacccagcagtccgtgctttcctatctcgccatgtgaagaatggaggctccatacctaagtcagaccagctacggagggcatatcttcctgatggatatgagaatgagaatcaactcctcaactcacaagattgttgactaggaggttaccaccattgtgatcaagataaatgtggagtattaaagttatgtgttgattgtgtggttcatttttgtatttatttcatttaaaatcatgtgacgcagaatagttttgcaatgtgtatatagttgcaggcnnnnnnnnnnccacctcactgcaaaacttattgttaattttagtcaccaatggtataaagcaaaacctaggtttagagtgtgctaggatacctgaaacctgatggttatctttaaaattaatggtttttctcctgaaatgtttgtgcatggaagaactgccctgcttttttaccctgttgccatgtatgattattccttgtgagattacttaattacttggattgaagactagcctattgaagctgctgccaggcaacaccacttaacagtaacttaaaggaattattttctttagaggatcctcttcaaaaaggaagggagatagtggaaaactgttcttatatcttcagatccctagcagaaatgactgtttatttcaaactatgttttacttgtatatgatgtagtcaactatctttcaattccatacttcccccgcccccattttaaaggcttattgttgtattttgtagcagcttcaagtgaccaaaagactaaaatctttcaacgtcaatgccaaaagccaaggggaattttgcagtgacaggattttagtctcttactatgaatactaatttcgaaccatagctttcattttaagcatcatcttgaatttctaaacttttttctatgtcttggtgttaaaagatttcaagattggcatttttacttaaacagacattttatggttgagttttctctttattatagagaattagtaannnnnnnnnggctgacagatcagataaaattactttctattcattaatttttctctacaactttatgagtttatttagttgaatagtctagactagaaacaagtttac

SEQ ID NO: 184560 - DNA, 497 bp, Homo Sapiens
tatcaaaatcatgacattatgtcacttggagcaacacagttgacccgccaaggcagcctcttcctccatagatggatgaacgctgtggccgctgctcctgcctgggccatgccctgatgctgccaacaccactgctcctctatttataagtcttagtagagttgctgacccagcaataactgaacagctgatatgtacctcacactaagccaggcgcttcatatgtatctaacttgaaaaatgctgagctagttaccttaacaccattaacttttacttaaaagtttgtttttcttttttaatcccagtgagctccaaacaagttttagggaggctccccaaaaccagtgaagactttaactaaaagtagaatttcaaagtattagaaaccaaaccccaaaattaaatgtgaagatcagtgtctgtactgagctggcccatctggtgacacaggatttgcgttatcgactgcaatgttacccaggattcacgatttc

SEQ ID NO: 184561 - DNA, 1633 bp, Homo Sapiens
ttggctgagaggcgcacccgggcggccagctgggctcggagcggaacggggtcaggatggacgaggacgtgctaaccaccctgaagatcctcatcatcggcgagagtggggtgggcaagtccagcctgctcttgaggttcacagatgatacgtttgatccagaacttgcagcaacaataggtgttgactttaaggtgaaaacaatttcagtggatggaaataaggctaaacttgcaatatgggatactgctggtcaagagaggtttagaacattaactcccagctattatagaggtgcacagggtgttatattagtttatgatgtcacaagaagagatacatttgttaaactggataattggttaaatgaattggaaacatactgtacaagaaatgacatagtaaacatgctagttggaaataaaatcgataaggaaaatcgtgaagtcgatagaaatgaaggcctgaaatttgcacgaaagcattccatgttatttatagaggcaagtgcaaaaacctgtgatggtgtacaatgtgcctttgaagaacttgttgaaaagatcattcagacccctggactgtgggaaagtgagaaccagaataaaggagtcaaactgtcacacagggaagaaggccaaggaggaggagcctgtggtggttattgctctgtgttataaactctgggaaattccatctcttgcatatttgatcagatagtgacatctttctgtatataaactctttaactgctattttagggaccttgcagtttgcacataattgttttatatcatagcagtaaatatttgcaagaaatcccactcatcgaccccgggtaaaatgttatggtaagcatgcacagtttgcagtctacagtttttttatgtagcacaaaataggtgtacctttataagtacattcaattttatgatttacatttatcatgtaatttttaaaaaaatccatctatctaggatatgttgatacaaagtctgcttttgctattctttttgcttaaatactcctatcattttctgaattacttggtatttagaactcctagcaccacggggaagaatagaggtatcatcaaacgtggcaaattttctttcaggaataataaagagcatgattccacagcttttctgggatgtttgagattcttttttagtactaagcaaaattctcatcacagaatgtagcccaggccaatttataactaaatctctatttgttcggatgatgcttctaaaacagcattgataggttaaagaagcttggtatttttaatttacttcaatgattagctcagttgcttaactggagttttaatcctgtgatatgtacattggattcatgactgtgcagcatttttagttatgtggtgtttggcagaatgacaataaggttttcccccattttggtttcaggaggacatgaatagtgtgtttattgtaactcctcatacacttttaaaaccaacatcttttttcataaatgttggtagtgtttgtccaggtaccttaactgtagcttgtgtaatgttgatgaatatctgtatcttacggcttccataatggctagttgatattcaaaaacctatttctgtgttttgaggggtgggggaaaaaaa

SEQ ID NO: 184562 - DNA, 1148 bp, Homo Sapiens
ctttgtacaaaaaagttgggttttaatccccgtgatatgtacattggattcatgactgtgcagcatttttagttatgtggtgtttggcagaatgacaataaggttttcccccattttggtttcaggaggacatgaatagtgtgtttattgtaactcctcatacacttttaaaaccaacatcttttttcataaatgttggtagtgtttgtccaggtaccttaactgtagcttgtgtaatgttgatgaatatctgtatcttacggcttccataatggctagttgatattcaaaaacctatttctgtgttttgaggggtggggaaaaaaaacactaagtgataatttgaaaaaggcatattgcttccagattctgatgtgtgagggaaaatactgtcacaatgaaaatcttgacaatttacttaacaagtaaccagtagttcatcaaaaccaacttgtacagactaataaatctttttcacagtattcagttttctcacctcttgctattgtatattgtagatttttttcattcatgtgttatttaatttacactgatctctgctattttaaccccccaaataagttatttgtcctttaaggttggttactataatacccctcagtaagattccagtattaatttctgggcagtttgttctctgtatacaattgcaaatgataagcatttttgtgagtgaccacctttgcaatatgtttgttaatttacttcatgttgggttctttctgaaatgtacatctttacatataaaaacctcacattctacttgatttacacttcctagtctacattacatgtggttgaaggttttatacattctatatgcttttactaaatatacaagatttactactagaaatttggagaaagaacactaacacatgtacttgtgatttgttcatgttatattaaaacttgagatttgtgtatttatgtagagtctgtattgacaagactgttgttttttgctccttgagctatataataatctgtgtattggattgttgtcttgatttggtctaaatttgaatatatatgagttacttgaatataacaaaaatgaattttgtttgatagatttatattgtaacctttttctagttcttgaataaatatagcctgctttccct

SEQ ID NO: 184563 - DNA, 2031 bp, Homo Sapiens
ttggcaagatcttttccaagtttgggaaaatcacaaatgatttttatcctgaagaggatgggaagacaaaagggtatattttcctggagtacgcgtcccctgcccacgctgtggatgctgtgaagaacgccgacggctacaagcttgacaagcagcacacattccgggtcaacctctttacggattttgacaagtatatgacgatcagtgacgagtgggatattccagagaaacagcctttcaaagacctggggaacttacgttactggcttgaagaggcagaatgcagagatcagtacagtgtgatttttgagagtggagaccgcacttccatattctggaatgacgtaaaagaccctgtctcaattgaagaaagagcgagatggacagagacgtatgtgcgttggtctcctaagggcacctacctggctacctttcatcaaagaggcattgctctatgggggggagagaaattcaagcaaattcagagattcagccaccaaggggttcagcttattgacttctcaccttgtgaaaggtacctggtgacctttagccccctgatggacacgcaggatgaccctcaggccataatcatctgggacatccttacggggcacaagaagaggggttttcactgtgagagctcagcccattggcctatttttaagtggagccatgatggcaaattctttgccagaatgaccctggatacgcttagcatctatgaaactccttctatgggtcttttggacaagaagagtttgaagatctctgggataaaagacttttcttggtctcctggtggaacataatcgccttctgggtgcctgaagacaaagatattccagccagggtaaccctgatgcagctccctaccaggcaagagatccgagtgaggaacctgttcaatgtggtggactgcaagctccattggcagaagaacggagactacttgtgtgtgaaagtagataggactccgaaaggcacccagggtgttgtcacaaattttgaaattttccgaatgagggagaaacaggtacctgtggatgtggtcgagatgaaagaaaccatcatagcctttgcctgggaaccaaatggaagtaagtttgctgtgctgcacggagaggctccgcggatatctgtgtctttctaccacgtcaaaaacaacgggaagattgaactcatcaagatgttcgacaagcagcaggcgaacaccatcttctggagcccccaaggacagttcgtggtgttggcgggcctgaggagtatgaacggtgccttagcgtttgtggacacttcggactgcacggtcatgaacatcgcagagcactacatggcttccgacgtcgaatgggatcctactgggcgctacgtcgtcacctctgtgtcctggtggagccataaggtggacaacgcgtactggctgtggactttccagggacgcctcctgcagaagaacaacaaggaccgcttctgccagctgctgtggcggccccggcctcccacactcctgagccaggaacagatcaagcaaattaaaaaggatctgaagaaatactctaagatctttgaacagaaggatcgtttgagtcagtccaaagcctcaaaggaattggtggagagaaggcgcaccatgatggaagatttccggaagtaccggaaaatggcccaggagctctatatggagcagaaaaacgagcgcctggagttgcgaggaggggtggacactgacgagctggacagcaacgtggacgactgggaagaggagaccattgagttcttcgtcactgaagaaatcattcccctcgggaatcaagagtgacctggagcactgtgcgcaccgtgtgtgctgtggagccgaggccgtcctgcagaagccgcgtgactcccgcctcctccctgtgctctctggctctggactgtgactgcgcctggattctgccattgcgacacatttttgtgcctttcagcccctggtgtctgcagtgggggatttaaagcacccgctttccacttctttcttgtttg

SEQ ID NO: 184564 - DNA, 1528 bp, Homo Sapiens
ttggagcacctcttcaccaagtgtcccaaggtcctcaaaggcttcccttccctactggttacaaaaggcagcgagaatatgaagaggaagatgatgatgatgatgaatacgactctgaaatggaagattttattgaagatgaaggagagcctcaggaagaaatatccaagcacattagagaaatctttggttatgaccgaaaaaaatacaaagatgaaagtgattatgccttacgttacatggaaagtagttggaaagagcagcagaaggaagaagcaaagagcttaagactgggtatgcaagaggacttagaggaaatgagacgtgaagaagaagaaatgcaacgtcgaagggccaagaagctgaagaggcgttagctgctgcttttatttttgtgaaattctagagctgctctgctgcaaggatttcctgccttcagactgaagaagcccccttatcattttagatttatacttgggtactcaaggagaaggaatgcatactgtcatttgcaggctgtcatttgagcataaaatattttcagatattttccagggtgaaatctgtaatgcagatgatataatgcccacttgtgctcttatgaagttaactgttcacagatgccagccttgatcctgatgagctatgcactctaatgtggggccactcaccagtcagccaatcttttattgttcctttgctactttgaaaggaaaaaaaaggttgtctcttgatttctgtaattcttctgctgatctgtgagtagggcactgccctgctcccaatcaaacttagtctttttatgagaaacctggaccttccatgaatgttgccagcaataaagtgacttgtcctaatctatggattgagaacttgaaaatgtagagtagaatttataactatcatatggatgtcatcctgtgactttgaactacaaagtacaataaattctgtattcatggattggatgctgagcattcttactcattaatttaggtggctaggaattaatgaaaaaattttcaagttaaaatacaggttataacagtataatattcttttctaagttttcctttcagatttactgttatgttggctttagtgtaagacaaggtcactgtgctgattgatttttatctaaaaaaattcatttttatatcgaagaaaaaatattttattcaaacattagatttgaaagagtaatagtttataaaataaggaagtaacatgtgaggctctcccctcctcccctcccccatcataaagatattttgaaatcccaaggtgccctcatacctcttgacattaatgacttcattttttagcttgaatttgttagcaaatattaatggcagaaaccaaaaaactaaatttatggtatcgagagcaccaccttctctttttgcctcatattgcactttgatttcaaactatgcactgtgaagagatttttttcccacgtacgaaggggatgttccctgttatcgttattttactgagctgtgggaaactccattttaaccttttt

SEQ ID NO: 184565 - DNA, 4404 bp, Homo Sapiens
ttggctggtgttgttctgtgatgaaatcaacttgccagatatggataaatatgggacccagagggtcatatccttcatcagacagatggtggagcacggaggcttttaccgtacctcagatcaaacatgggtgaagctggagagaatccagtttgttggggcttgtaatccccccacagaccctggaagaaagcccctctcacacaggttcctgcgccacgtgcctgtcgtgtatgtggattacccgggccccgcctccctcacacagatctacggcaccttcaaccgcgccatgctgaggctcattccatccctgcggacgtatgcagagccgctcactgctgccatggtggagttctacaccatgtctcaggagagattcacccaggatacacaacctcactatatctattcaccccgtgaaatgactaggtgggtgagaggcatctttgaagcgctgagacctctggagaccctgcctgttgaaggcctcattcggatttgggcacatgaagctctgcgtctcttccaagatagactcgtagaggatgaggagaggcgttggactgatgagaacatcgacacggttgctctgaagcacttccctaacatcgacagagagaaggcaatgagccgacccatcttgtacagcaactggctgtcaaaggattacatcccagtagaccaagaagagttaagagattatgtcaaagctaggctgaaggtcttttatgaagaagaacttgatgttccgctggtgctgtttaatgaagtcctagaccacgtgctgaggattgacagaatattccgtcaacctcaaggccacttgcttctgattggtgttagtggagcaggaaaaactaccctgtctcgtttcgtcgcctggatgaacggtttgagtgtgtaccagattaaggtccataggaagtacacaggggaagactttgatgaagatctacggacagtgttgagacgttctggctgtaaaaatgaaaagatagcatttataatggatgaatctaatgtgttagattctggattcctggagcgaatgaatacccttctggccaatggagaggtgcctggtctctttgaaggagacgagtatgccaccttgatgacgcagtgcaaagagggggcacagaaggaaggcctgatgctggactcgcacgaggagctctacaagtggttcactagccaggttatccgcaacctccacgtcgtgttcaccatgaacccgtcctcggagggactcaaggaccgggcagctacatcaccagcacttttcaacaggtgtgtgttgaattggtttggagactggtccaccgaagcactgtatcaggttggcaaagaattcacaagtaagatggatctggagaagccaaattacatcgtgcctgattacatgccagttgtgtatgataagctgccgcagccaccatcccatcgggaagccattgtgaacagctgtgtgtttgttcatcagactcttcaccaggcgaatgctcggctagcaaagcgaggcggcagaacgatggccatcacccctcgccactacctggacttcatcaatcactatgccaacctgttccacgagaagcggagcgagctggaggagcagcagatgcacttgaacgtggggctcaggaagatcaaagagacagtcgaccaggtagaagaactgcgtcgtgacttgaggataaagagccaagagctggaggtgaagaatgcagcagccaatgacaagctgaaaaagatggtgaaagaccagcaggaggctgaaaagaagaaggttatgagccaagaaatccaggaacagctgcataagcagcaggaggtaattgcagacaaacagatgagtgtcaaagaagatcttgataaggtggaacctgccgtcattgaggcccagaatgctgtgaagtcgatcaagaagcagcacctggtggaggtgaggtccatggccaaccctcctgctgctgtgaagctggcgctggagtccatctgcctgctgctgggggaaagcaccacagactggaagcagatccgctccatcatcatgcgggagaacttcatccccaccatcgtcaacttctctgcagaggagatcagtgacgccataagggagaagatgaagaaaaattacatgtccaatccaagttacaattatgaaattgtgaatcgggcttccctggcttgcggccctatggtgaaatgggcaattgcacagcttaactatgcagacatgttaaagagagtggagcccctacgcaatgagctgcagaagctggaagatgacgccaaggacaaccagcagaaggccaacgaggtggagcagatgatccgagacctggaagccagcatcgcccgctacaaggaggaatacgccgtcctgatctcagaggcccaggccatcaaggcagacctggcagctgtcgaggcaaaagtaaaccggagcactgctcttctgaagagcttgtctgctgaacgtgaacgatgggaaaaaacaagtgaaactttcaaaaaccagatgtccaccattgctggggactgtctcttgtcagctgcgttcattgcctacgcgggttactttgaccagcagatgcgtcagaacttgttcactacctggtcccatcacctacagcaagccaacatccagttccgtacagatattgccaggacggaatacctttccaatgctgatgagcgtcttcgctggcaggccagctccttgcctgctgatgacctttgcacagaaaatgccatcatgctgaaacgattcaataggtatccgctgatcattgacccctctggacaggccacagaattcattatgaatgaatataaggatcgtaagatcacacggaccagcttcctggatgacgccttcagaaagaacttagagagtgcactgagattcggtaacccccttctggtccaggatgtggaaagctacgatccagttttgaacccggtgctgaaccgtgaagtgcggcgaacaggggggagagtgctgatcactctcggggaccaggacatagacctgtcgccatcgtttgtcatcttcctgtccacccgggatccaactgtcgagttcccaccagatctctgttcccgggttacttttgtaaacttcacagttacccgtagcagtttacaaagccagtgtctaaatgaagtacttaaagcagaaagacctgatgtggacgagaaacgatctgatcttcttaaacttcaaggggaatttcagctccgtttgcgtcagctggaaaaatctctactacaagctctgaacgaggtgaaagggcgcattttggatgacgacacgatcataaccactctggagaacctgaagagagaggctgcagaggtcaccaggaaagttgaggagacggacattgtcatgcaggaggtggagaccgtgtcccagcagtacctcccgctctccaccgcctgcagcagcatctacttcaccatggagtccctcaagcagatacacttcttgtaccagtactccctccagtttttcctggacatttatcacaacgtcctatacgagaacccgaacctgaagggtgtcaccgaccacacacagcgcctgtccattataacaaaggacctcttccaggtggcgtttaaccgagtggctcgaggcatgctgcatcaggaccacattacctttgccatgctgctggcaagaatcaaactgaagggcaccgtgggggagcccacctacgatgcagaattccagcacttcttgagaggaaatgagattgtcctgagtgctggctccacccccaggatccagggcctgactgtggagcaggcggaggcggtggtgaggctgagctgccttcccgcgtttaaggacttgattgcaaaggttcaggcagacgagcaatttggcatctggctggacagcagctccccggagcagactgtgccctacctctggagtgaagaaacacctgcaacacccattggccaggccatccaccgcctgctcctgatccaggctttccggcccgatcgcctgttggccatggcccacatgtttgtttcaacaaaccttggggagtctttcatgtccatcatggagcagccgctcgacctgacccacattgtgggcacagaggtgaagcccaacactcctgtcttaatgtgctctgtgcctggttatgatgccagtggacatgtcgaggaccttgcagccgagcagaacacgcagatcacttcaattgcaatcgaactgcatttaaccaagcagataaggcaataaacaccgctgtaaagtcgggcaggtgggtgatgctgaagaatgtgcatctggccccagggtggctgatgcagctggagaagaagttgcattccctgcagccgcatgcctgcttccgactcttcctcacc

SEQ ID NO: 184566 - DNA, 2112 bp, Homo Sapiens
ctttgtacaaaaaagttggcacccattggccataaaaatccaccgcctgctcctgatccaggctttccggcccgatcgcctgttggccatggcccacatgtttgtttcaacaaaccttggggagtctttcatgtccatcatggagcagccgctcgacctgacccacattgtgggcacagaggtgaagcccaacactcctgtcttaatgtgctctgtgcctggttatgatgccagtggacatgtcgaggaccttgcagccgagcagaacacgcagatcacttcaattgcaatcggctctgcagaaggctttaaccaagcagataaggcaataaacaccgctgtaaagtcgggcaggtgggtgatgctgaagaatgtgcatctggccccagggtggctgatgcagctggagaagaagttgcattccctgcagccgcatgcctgcttccgactcttcctcaccatggagatcaaccccaaggtgcctgtgaatctgctccgtgcgggccgcatctttgtgttcgagccaccgccaggggtgaaggccaacatgctgaggacgttcagcagcattcccgtctcacggatatgcaagtctcccaacgagcgtgcccgcttgtacttcctgctggcctggtttcatgcgatcatccaagaacgcttacgatacgcaccactggggtggtcaaagaagtatgaatttggagagtctgacctgcggtcagcttgcgatacggtggacacgtggctggatgacacggccaagggcaggcagaacatctcaccggataagatcccgtggtctgcactaaagaccttaatggcccagtccatttatggcgggcgcgtggacaacgagtttgaccagcgtctgctcaacaccttcctggagcgcctgttcacaaccaggagtttcgacagtgagtttaagctggcatgcaaggtcgacggacataaagacattcaaatgccagatggcatcaggcgagaggagtttgtgcagtgggtggagttgctccccgacacccagacgccctcctggctgggcctgcccaacaacgccgagagagtcctccttaccacacagggtgtggacatgatcagtaaaatgctgaagatgcagatgttggaggatgaggacgacctggcctacgcagagactgagaagaagacgaggacagactccacgtccgacgggcgccctgcctggatgcggacactgcacaccaccgcgtccaactggctgcacctcatcccccagacgctgagccacctcaagcgcaccgtggagaatatcaaggatcctttgttcaggttctttgagagagaagtgaagatgggcgcaaagctgcttcaggacgttcgccaggaccttgcagatgtcgtccaggtgtgcgaaggaaagaagaagcagaccaactacttgcgcacgctgatcaacgagctagtgaaagggatcttgcctcggagctggtcccactacacggtgcctgccggcatgaccgtcatccagtgggtgtccgacttcagcgagaggatcaaacagctgcagaacatctcactggcagctgcatctggtggcgccaaggagctaaagaacatccacgtgtgcctgggtggcctgttcgtgcctgaggcgtacatcactgccaccaggcagtatgtggcccaggccaacagctggtccctggaggagctctgcctggaagtcaacgtcaccacctcacagggcgccacccttgacgcttgcagcttcggagtcacgggtttgaaacttcaaggggccacgtgcaacaacaacaagctgtcactgtccaatgccatctcaaccgcccttcccctgacgcagctgcgctgggtcaagcagacaaacaccgagaagaaggccagtgtggtaaccttacctgtctacctgaacttcacccgtgcagacctcatcttcaccgtggacttcgaaattgctacaaaggaggatcctcgcagcttctacgagcggggtgtcgcagtcttgtgcacagagtaaacttttctagctgcccctttctgtaatagtgaaagttggtatttaacatttattcatttttaaaatatttggaaggtctgagcttgtgaaaa

SEQ ID NO: 184567 - DNA, 1764 bp, Homo Sapiens
  misc_feature (123)..(182): n is a, c, g, or t
ttggcctcctcccgcctgaggcgagtctgggctcagcctagagctctccggcggcggcgcagcttcagggcagcgcgggctgcagcggcggcggcggttagggctgtgtagggcgaggcctcnnnnnnnnnnnnnnnnnnnnnnnnnnnnnnnnnnnnnnnnnnnnnnnnnnnnnnnnnnnngccttcctcctcctcgtcaggctcgacccagctgtgagcggcaagatggcggcgcccaggccgccgcctgccaggctgtcgggcgtcatggtgccggcgcccatccaagacctggaggccctgcgcgcgctcacggcgctcttcaaagagcagcggaaccgagaaacagcacccaggactatcttccaaagagttctggatatcctaaagaaatcttctcatgctgttgagcttgcctgcagagatccatcccaagtggaaaacctggcttccagtctgcagttaataacagaatgcttcaggtgtcttcgcaatgcttgcatagagtgttctgtgaaccagaattcaatcaggaacttggatacgattggtgttgctgttgatttgattcttctgtttcgtgaactgcgagtggaacaggaatctctgttgacagcttttcgctgtggcctgcagtttttaggcaacattgcctcacggaatgaagattcccagtctattgtttgggtgcatgctttcccagaactgtttttgtcttgcttaaatcatccggacaaaaaaattgttgcctactcttcaatgattttgtttacatcccttaatcatgaaagaatgaaagaactggaggagaacctcaatattgcaattgatgtcatagatgcttaccaaaaacatcctgaatcagaatggccgttcttgattattacagacctctttctgaaaagcccggaattggtacaagccatgtttcccaaactgaacaatcaagaaagagttacactgttagaccttatgatagccaagataacgagtgatgagccactcaccaaggatgacatccctgtgtttttgcggcatgctgagttgattgcaagcacctttgtggatcagtgcaagactgtgctcaagctggcctctgaggagcctcctgatgatgaggaggcactggctacaattaggcttctcgacgtcctgtgcgaaatgactgtgaatactgagctgctcggctatctgcaggttttccctggcttgctggaaagagtgattgatcttttgcgggtgattcatgtagctggaaaagaaaccacaaacatcttcagtaattgtggttgcgtgagagcagaaggtgacatctccaatgtggccaatgggtttaagtctcatctcattcgtctgattggaaatctgtgttacaagaataaagataaccaagacaaggtaaatgagctggatggtatcccgttgatcctggacaactgcaacatcagtgacagtaacccctttctgacccagtgggtgatatatgccatccgaaaccttaccgaagacaacagccaaaaccaagatttgattgcaaagatggaggaacaggggctggcagatgcatccctacttaaaaagtgggttttgaagttgaaaagaaaggcgaaaagctgatcctgaaatctactagagacacccctaagccatgaatgaactacatccaaatacctgaatttttggaatctgtttcatggaattttcatcttctaccgtatgtgaaattgcagtgttgaagatttataagtacaaatttgggaac

SEQ ID NO: 184568 - DNA, 1651 bp, Homo Sapiens
tgtacaaataaccagaacagaaagaaatgttgcagtatatgctgagagtgccacatattgtcttgtgaagaatgctgtgaaaatgtttaaggatattggggttttcaaggagaccaaacaaaagagagtgtctgttttagaactgagcagcacttttctacctcaatgcaaccgacaaaaacttctagaatatattctgagttttgtggtgctgtaggtaacgtgtggcactgctggcaaatgaaggtcatgagatgagttccttgtaggtaccagcttctggctcaagagttgaaggtgccgtcgcagggtcaggcctgccctgtcccgaagtgatctcctggaagacaagtgccttctccctccatggatctgtgatcttcccagctctgcatcaacacagcagcctgcagataacacttggggggacctcagcctctattcgcaactcataatccgtagactacaagatgaaatctcaataaattatttttgagtttattaaagattgacattttaagtacaacttttaaggactaattactgtgatggacacagaaatgtagctgtgttctggaactgaatcttacatggtatacttagtgctgctgggtaatttgttggtatattatctggttagtggttaatgcttcctttaaaaataattgagtcatccattcactctttttcagttttatctgtcaatagtagctacatttttaatgggagcaccttttatcccaaagtgctttataaattgagtggactgatatatatcacacccaggtatcactgtgctgtcctttgctgtcagatttagaaatgtttttaagagctatgtgaaaacagacaatattagtttaggtcgggaactgagatattgtaatcaaatagttaacatcaggaagttaatttggctggcaaaattctagggaaacttggccagaaaactggtgttgaaggcttttgctcatataaacaagtgccattgagtttcaaatgaccagcaaatatatttagaacccttcctgttttatgtctgtacctcgtccacccctcaggtaatacctgcctctcacaggtacagctgtttcttggaaatcctccaaccaaatagcagttttcctaacttgattagcttgagctgacagactgttagaatacagttctctggccacagctgatgagggctttctgtactgcacacagattgtgtactgcaccccagtccaggtgactggtacccactcgagttgtgccgtgcacaacctgtccagtatatgcatgtggtggccctactgactggtaatggttagaggcatttatggatttttagctttgaggaaaaaccatgacttttaacaaatttttatgggttatatgcctaaacccttatgccacatagtggtaaataattatgaaaaatggtctgttcataattggtaggtgccttttgtgagcagggagcataattattggtttattatggtaattatggtgattttttaaatatcatgtaatgttaaaacgttttctaacagtttactgttgcttatctccaagatattatggaattaagaatttttccagatgagtgttacatagattctttgaatttagtataaagtactgagaattaaggtttgtactt

SEQ ID NO: 184569 - DNA, 2242 bp, Homo Sapiens
ttgtacaaaaaagttggcaaagaaatcgattcagtcgggtccactaaaaatctctagtgtatcagaagtaatgaaagaatctaaacagcctgcctcacaactccaaaaacaaaagggagatactccagcttcagcaacagcaggtgataccctgtcggtcccagcccctgcagttcagcctgaggaatctttaaaaactgatcaccctgaaattggtgaaggaaaacccacacctgcactttcagaagaagcatcctcatcttctataagggagcgaccacctgaagaagttgcagctcgccttgcacaacaggaaaaacaagaacaagttaaaattgagtctctagccaagagcttagaagatgctctgaggcaaactgcaagtgtcactctgcaggctattgcagctcagaatgctgcggtccaggctgtcaatgcacactccaacatattgaaagccgccatggacaattctgagattgcaggcgagaagaaatctgctcagtggcgcacagtggagggtgcattgaaggaacgcagaaaggcagtagatgaagctgccgatgcccttctcaaagccaaagaagagttagagaagatgaaaagtgtgattgaaaatgcaaagaaaaaagaggttgctggggccaagcctcatataactgctgcagagggtaaacttcacaacatgatagttgatctggataatgtggtcaaaaaggtccaagcagctcagtctgaggctaaggttgtatctcagtatcatgagctggtggtccaagctcgggatgactttaaacgagagctggacagtattactccagaagtccttcctgggtggaaaggaatgagtgtttcagacttagctgacaagctctctactgatgatctgaactccctcattgctcatgcacatcgtcgtattgatcagctgaacagagagctggcagaacagaaggccaccgaaaagcagcacatcacgttagccttggagaaacaaaagctggaagaaaagcgggcatttgactctgcagtagcaaaagcattagaacatcacagaagtgaaatacaggctgaacaggacagaaagataaaagaagtcagagatgccatggaaaatgaaatgagaacccagcttcgccgacaggcagctgcccacactgatcacttgcgagatgtccttagggtacaagaacaggaattgaagtctgaatttgagcagaacctgtctgagaaactctctgaacaagaattacaatttcgtcgtctcagtcaagagcaagttgacaactttactctggatataaatactgcctatgccagactcagaggaatcgaacaggctgtacagagccatgcagttgctgaagaggaagccagaaaagcccaccaactctggctttcagtggaggcattaaagtacagcatgaagacctcatctgcagaaacacctactatctcgctgggtagtgcagttgaggccatcaaagccgactgtactgataatgaattcacccaagctttaaccgcagctatccctccagagtccctgacccgtggggtgtacagtgaagagacccttagagcccgtttctatgctgttcaaaaactggcccgaagggtagcaatgattgatgaaaccagaaatagcttgtaccagtacttcctctcctacctacagtccctgctcctattcccacctcagcaactgaagccgcccccagagctctgccctgaggatataaacacatttaaattactgtcatatgcttcctattgcattgagcatggtgatctggagctagcagcaaagtttgtcaatcagctgaagggggaatccagacgagtggcacaggactggctgaaggaagcccgaatgaccctagaaacgaaacagatagtggaaatcctgacagcatatgccagcgccgtaggaataggaaccactcaggtgcagccagagtgaggtttaggaagattttcataaagtcatatttcatgtcaaaggaaatcagcagtgatagatgaagggttcgcagcgagagtcccggacttgtctagaaatgagcaggtttacaagtactgttctaaatgttaacacctgttgcatttatattctttccatttgctatcatgtcagtgaacgccaggagtgctttctttgcaacttgtgtaacattttctgttttttcaggttttactgatgaggcttgtgaggccatcaaataatgtttgtgatctctac

SEQ ID NO: 184570 - DNA, 1075 bp, Homo Sapiens
  misc_feature (394)..(415): n is a, c, g, or t
  misc_feature (774)..(810): n is a, c, g, or t
actttgtacaaaaaagttggctactagctctgaccttccatacctcacttgggggagcacagggccccgctgggcctcctcaccaacggcagtgccaaaatcagcccccacatcaaggtggtgttctctgtgctttctctcgtccttccaaagtcggttctggcctaacgcatgtcccaacaccttgggttcatttgcccggtgaactcactttaagcattggattaacggaaactcccgaactacagacccctccctggtgggttgcatgaatgtgtctcattactgctgaaatgtcctcacatctcttccactgttcttcagagctttctggctctctttccccacaaaattcgacacatttaaaaatctccgtgtggctttaaaaaatggnnnnnnnnnnnnnnnnnnnnnngaggtgggagaggatgtgtgaaaatcttttccagggaaatgggttcgctgcagaggtaaggatgtgttcctgtatcgatctgcagacacccagaaggtgggtgcacactgcatgcttgggggtgccaagggattcgagacctccaacatacttgtctgaaggtggtgattctggccatggcccctctgccaagcctgtgtgcgatgcccttggtgctttagtgcaagaagcctaggctcagaagcacagcagcgccatctttccgtttcaggggttgtgatgaaggccaaggaaaaacatttatctttactattttacctacgtataaagttttagttcattgggtgtgcgaaacaccnnnnnnnnnnnnnnnnnnnnnnnnnnnnnnnnnnnnncttccatgcttgttctctggacatttggggatgtgagtgttagagctggtgagagaggagtcaggtggccttcccaccgatggtcctggcctccacctgccctctcttccctgcctgatcaccgctttccaatttgcccttcagagaacttaagtcaaggagagttgaaattcacaggccagggcacatcttttatttatttcattatgttggccaacagaacttgattgtaaataataataaagaaatctgttatatacttttc

SEQ ID NO: 184571 - DNA, 849 bp, Homo Sapiens
actttgtacaaaaaagttggcagaaagaccatacatagtttgcccaggaaattctgggtttaagcttgtgtcctatactcttagtaaagttctttgtcactcccagtagtgtcctattttagatgataatttctttgatctccctatttatagttgagaatatagagcatttctaacacatgaatgtcaaagactatattgacttttcaagaaccctactttccttcttattaaacatagctcatctttatatttttaattttattttagggctgagaattcataaaaaaattcattctctgtggtatccaagaatcagtgaagatgccagtgaaacttcaagcaaatctacttcaacacttcatgtattgtgtgggtctgttgtagggttgccagatgcaatacaagattcctggttaaatttgaatttcagtaaacaatgaatagtttttcattgtaccatgaaatatccagaacatacttatatgtaaagtattatttatttgaatctacaaaaaacaacaaataatttttaaatataaggattttcctagatattgcacgggagaatatacaaatagcaaaattgaggccaagggccaagagaatatccgaactttaatttcaggaattgaatgggtttgctagaatgtgatatttgaagcatcacataaaaatgatgggacaataaattttgccataaagtcaaatttagctggaaatcctggatttttttctgttaaatctggcaaccctagtctgctagccaggatccacaagtccttgttccactgtgccttggtttctcctttatttctaagtggaaaaagtattagccaccatcttacc

SEQ ID NO: 184572 - DNA, 1029 bp, Homo Sapiens
ttgggtaatcaagctctggacaaatcagaggagtctgtcaacctcccaggtgggattgcttatagttaatagactaaacccagagcctcaaagcagtgcactccgtgaaggcaaagagaacacgctgcaaaaggctttccaagaatcctcgacatggcaaggaggagctcgttccagtcgtgtcagataatatccctgttcacttttgccgttggagtcaatatctgcttaggattcactgcacatcgaattaagagagcagaaggatgggaggaaggtcctcctacagtgctatcagactccccctggaccaacatctccggatcttgcaagggcaggtgctttgaacttcaagaggctggacctcctgattgtcgctgtgacaacttgtgtaagagctataccagttgctgccatgactttgatgagctgtgtttgaagacagcccgtggctgggagtgtactaaggacagatgtggagaagtcagaaatgaagaaaatgcctgtcactgctcagaggactgcttggccaggggagactgctgtaccaattaccaagtggtttgcaaaggagagtcgcattgggttgatgatgactgtgaggaaataaaggccgcagaatgccctgcagggtttgttcgccctccattaatcatcttctccgtggatggcttccgtgcatcatacatgaagaaaggcagcaaagtcatgcctaatattgaaaaactaaggtcttgtggcacacactctccctacatgaggccggtgtacccaactaaaacctttcctaacttatacactttggccactgggctatatccagaatcacatggaattgttggcaattcaatgtatgatcctgtatttgatgccacttttcatctgcgagggcgagagaaatttaatcatagatggtggggaggtcaaccgtgtcatccctcacgagcggagaatattaaccatattgcagtggctcaccctgccagatcatgagaggccttcggtctatgccttctattctgagcaacc

SEQ ID NO: 184573 - DNA, 3099 bp, Homo Sapiens
ttggctcaaagcagtgcactccgtgaaggcaaagagaacacgctgcaaaaggctttccaagaatcctcgacatggcaaggaggagctcgttccagtcgtgtcagataatatccctgttcacttttgccgttggagtcaatatctgcttaggattcactgcacatcgaattaagagagcagaaggatgggaggaaggtcctcctacagtgctatcagactccccctggaccaacatctccggatcttgcaagggcaggtgctttgaacttcaagaggctggacctcctgattgtcgctgtgacaacttgtgtaagagctataccagttgctgccatgactttgatgagctgtgtttgaagacagcccgtggctgggagtgtactaaggacagatgtggagaagtcagaaatgaagaaaatgcctgtcactgctcagaggactgcttggccaggggagactgctgtaccaattaccaagtggtttgcaaaggagagtcgcattgggttgatgatgactgtgaggaaataaaggccgcagaatgccctgcagggtttgttcgccctccattaatcatcttctccgtggatggcttccgtgcatcatacatgaagaaaggcagcaaagtcatgcctaatattgaaaaactaaggtcttgtggcacacactctccctacatgaggccggtgtacccaactaaaacctttcctaacttatacactttggccactgggctatatccagaatcacatggaattgttggcaattcaatgtatgatcctgtatttgatgccacttttcatctgcgagggcgagagaaatttaatcatagatggtggggaggtcaaccgctatggattacagccaccaagcaaggggtgaaagctggaacattcttttggtctgttgtcatccctcacgagcggagaatattaaccatattgcagtggctcaccctgccagatcatgagaggccttcggtctatgccttctattctgagcaacctgatttctctggacacaaatatggccctttcggccctgagatgacaaatcctctgagggaaatcgacaaaattgtggggcaattaatggatggactgaaacaactaaaactgcatcggtgtgtcaacgtcatctttgtcggagaccatggaatggaagatgtcacatgtgatagaactgagttcttgagtaattacctaactaatgtggatgatattactttagtgcctggaactctaggaagaattcgatccaaatttagcaacaatgctaaatatgaccccaaagccattattgccaatctcacgtgtaaaaaaccagatcagcactttaagccttacttgaaacagcaccttcccaaacgtttgcactatgccaacaacagaagaattgaggatatccatttattggtggaacgcagatggcatgttgcaaggaaacctttggatgtttataagaaaccatcaggaaaatgctttttccagggagaccacggatttgataacaaggtcaacagcatgcagactgtttttgtaggttatggcccaacatttaagtacaagactaaagtgcctccatttgaaaacattgaactttacaatgttatgtgtgatctcctgggattgaagccagctcctaataatgggacccatggaagtttgaatcatctcctgcgcactaataccttcaggccaaccatgccagaggaagttaccagacccaattatccagggattatgtaccttcagtctgattttgacctgggctgcacttgtgatgataaggtagagccaaagaacaagttggatgaactcaacaaacggcttcatacaaaagggtctacagaagagagacacctcctctatgggcgacctgcagtgctttatcggactagatatgatatcttatatcacactgactttgaaagtggttatagtgaaatattcctaatgccactctggacatcatatactgtttccaaacaggctgaggtttccagcgttcctgaccatctgaccagttgcgtccggcctgatgtccgtgtttctccgagtttcagtcagaactgtttggcctacaaaaatgataagcagatgtcctacggattcctctttcctccttatctgagctcttcaccagaggctaaatatgatgcattccttgtaaccaatatggttccaatgtatcctgctttcaaacgggtctggaattatttccaaagggtattggtgaagaaatatgcttcggaaagaaatggagttaacgtgataagtggaccaatcttcgactatgactatgatggcttacatgacacagaagacaaaataaaacagtacgtggaaggcagttccattcctgttccaactcactactacagcatcatcaccagctgtctggatttcactcagcctgccgacaagtgtgacggccctctctctgtgtcctccttcatcctgcctcaccggcctgacaacgaggagagctgcaatagctcagaggacgaatcaaaatgggtagaagaactcatgaagatgcacacagctagggtgcgtgacattgaacatctcaccagcctggacttcttccgaaagaccagccgcagctacccagaaatcctgacactcaagacatacctgcatacatatgagagcgagatttaactttctgagcatctgcagtacagtcttatcaactggttgtatatttttatattgtttttgtatttattaatttgaaaccaggacattaaaaatgttagtattttaatcctgtaccaaatctgacatattatgcctgaatgactccactgtttttctctaatgcttgatttaggtagccttgtgttctgagtagagcttgtaataaatactgcagcttgagtttttagtggaagcttctaaatggtgctgcagatttgatatttgcattgaggaaatattaattttccaatgcacagttgccacatttagtcctgtactgtatggaaacactgattttgtaaagttgcctttatttgctgttaactgttaactatgacagatatatttaagccttataaaccaatcttaaacataataaatcacacattcagtttta

SEQ ID NO: 184574 - DNA, 1253 bp, Homo Sapiens
ttggcttttgtgtgcaaggagtgtgggcgaggctatactaataagtcatacttcgttgtgcacaagagaatacactcaggagagaagccttacagatgccaggagtgtggccgaggctttagcaataagtcacaccttatcacacaccagaggacacactcaggggagaagccctttgcgtgcaggcagtgtaagcaaagttttagcgtgaaaggaagtctcctcagacaccagagaacacactcaggggagaagccttttgtgtgcaaggattgtgagcgaagctttagccaaaagtcaactcttgtctaccaccagagaacacactcaggggagaaaccttttgtttgtagagaatgtgggcaaggatttattcagaagtcaacccttgtgaaacatcagatcacacactcagaggagaagccttttgtgtgcaaggactgtggacgaggctttatccaaaagtcaaccttcactttacaccagaggacacactcagaggagaagccttatggatgtcgggagtgtgggcgaaggtttcgggataagtcctcctataacaagcacctgagggcacacttgggtgagaaacgttttttctgcagggattgtgggcgaggctttaccttgaagccaaatctcaccatacatcagaggacacactcaggagagaagcccttcatgtgcaagcagtgtgagaaaagttttagtttgaaggcaaatcttcttagacatcagtggacacactcgggggaaaggccatttaattgcaaggattgcgggcgaggcttcatcctaaaatcaactctcctcttccaccagaagacacactcaggggagaagcctttcatctgtagtgaatgtgggcaaggatttatctggaagtcaaatcttgtgaaacaccagcttgcacattctggcaagcagccttttgtatgcaaggagtgtgggcgaggcttcaactggaagggaaatctcctcacacaccagaggacacactcaggggagaagcccttcgtgtgtaatgtgtgtgggcaaggcttcagctggaagagaagtctcaccagacaccactggcggatacactcaaaggagaagccttttgtttgccaggagtgtaagcgaggctataccagtaagtcagacctcactgtgcatgaaagaatacacacaggagagaggccttatgaatgccaagagtgtggacgaaagtttagcaataagtcatactacagtaagcacttaaagagaca

SEQ ID NO: 184575 - DNA, 2213 bp, Homo Sapiens
ttggcccagcattgcccccccctacgtttcagcacagcgctggccgcagtctgacaggaaagggacggagccaagatggcggcggccgacggcgacgactcgctgtaccccatcgcggtgctcatagacgaactccgcaatgaggacgttcagcttcgcctcaacagcatcaagaagctgtccaccatcgccttggcccttggggttgaaaggacccgaagtgagcttctgcctttccttacagataccatctatgatgaagatgaggtcctcctggccctggcagaacagctgggaaccttcactaccctggtgggaggcccagagtacgtgcactgcctgctgccaccgctggagtcgctggccacagtggaggagacagtggtgcgggacaaggcagtggagtccttacgggccatctcacacgagcactcgccctctgacctggaggcgcactttgtgccgctagtgaagcggctggcgggcggcgactggttcacctcccgcacctcggcctgcggcctcttctccgtctgctacccccgagtgtccagtgctgtgaaggcggaacttcgacagtacttccggaacctgtgctcagatgacacccccatggtgcggcgggccgcagcctccaagctgggggagtttgccaaggtgctggagctggacaacgtcaagagtgagatcatccccatgttctccaacctggcctctgacgagcaggactcggtgcggctgctggcggtggaggcgtgcgtgaacatcgcccagcttctgccccaggaggatctggaggccctggtgatgcccactctgcgccaggccgctgaagacaagtcctggcgcgtccgctacatggtggctgacaagttcacagagctccagaaagcagtggggcctgagatcaccaagacagacctggtccctgccttccagaacctgatgaaagactgtgaggccgaggtgagggccgcagcctcccacaaggtcaaagagttctgtgaaaacctctcagctgactgtcgggagaatgtgatcatgtcccagatcttgccctgcatcaaggagctggtgtccgatgccaaccaacatgtcaagtctgccctggcctcagtcatcatgggtctctctcccatcttgggcaaagacaacaccatcgagcacctcttgcccctcttcctggctcagctgaaggatgagtgccctgaggtacggctgaacatcatctctaacctggactgtgtgaacgaggtgattggcatccggcagctgtcccagtccctgctccctgccattgtggagctggctgaggacgccaagtggcgggtgcggctggccatcattgagtacatgcccctcctggctggacagctgggagtggagttctttgatgagaaacttaactccttgtgcatggcctggcttgtggatcatgtatatgccatccgcgaggcagccaccagcaacctgaagaagctagtggaaaagtttgggaaggagtgggcccatgccacaatcatccccaaggtcttggccatgtccggagaccccaactacctgcaccgcatgactacgctcttctgcatcaatgtgctgtctgaggtctgtgggcaggacatcaccaccaagcacatgctacccacggttctgcgcatggctggggacccggttgccaatgtccgcttcaatgtggccaagtctctgcagaagatagggcccatcctggacaacagcaccttgcagagtgaagtcaagcccatcctagagaagctgacccaggaccaggatgtggacgtcaaatactttgcccaggaggctctgactgttctgtctctcgcctgatgctggaagaggagcaaacactggcctctggtgtccaccctccaacccccacaagtccctctttggggagacactggggggcctttggctgtcactccctgtgcatggtctgaccccaggccccttcccccagcacggttcctcctctccccagcctgggaagatgtctcactgtccacctcccaacgggctaggggagcacgggggttggacaggacagtgaccttgggaggaaaggggctactccgcccacgtccgggaagagatgtgagcatccccgggtcactgggtcctgctgctgtaatgggaacacctcccccattactttctccacctccgtccttccccatcatcgggttttttttgtg

SEQ ID NO: 184576 - DNA, 932 bp, Homo Sapiens
ttggcaaccactcccctgggaaacagatacatggctcttatccaacacagcactatcatcgggttttctcaggtgtttgagccacaccagaagaaacaaacgcgagcttcagtggtgattccagtgactggggatagtgaaggtgctacggtgcagctgactccatattttcctacttgtggcagcgactgcatccgacataaaggaacagttgtgctctgcccacaaacaggcgtccctttccctctggataacaacaaaagcaagccgggaggctggctgcctctcctcctgctgtctctgctggtggccacatgggtgctggtggcagggatctatctaatgtggaggcacgaaaggatcaagaagacttccttttctaccaccacactactgccccccattaaggttcttgtggtttacccatctgaaatatgtttccatcacacaatttgttacttcactgaatttcttcaaaaccattgcagaagtgaggtcatccttgaaaagtggcagaaaaagaaaatagcagagatgggtccagtgcagtggcttgccactcaaaagaaggcagcagacaaagtcgtcttccttctttccaatgacgtcaacagtgtgtgcgatggtacctgtggcaagagcgagggcagtcccagtgagaactctcaagacctcttcccccttgcctttaaccttttctgcagtgatctaagaagccagattcatctgcacaaatacgtggtggtctactttagagagattgatacaaagacgattacaatgctctcagtgtctgccccaagtaccacctcatgaaggatgccactgctttctgtgcagaacttctccatgtcaagcagcaggtgtaagcaggaaaaagatcacaagcctgccacgatggctgctgctcctttgtagaccacccatgaaaa

SEQ ID NO: 184577 - DNA, 1761 bp, Homo Sapiens
  misc_feature (1182)..(1194): n is a, c, g, or t
tgtacaataacatggagtcgggcaagatggcgcctcccaagaacgctccgagagatgccttggtgatggcacagatcctgaaggatatgggaatcacagagtatgaaccaagggttataaatcaaatgttggaatttgctttccgttatgtgactacaattctggatgatgcaaaaatttattcgagccatgctaagaaacctaatgttgatgcagatgatgtgagactggcaatccagtgtcgtgctgaccaatcttttacctctcctcccccaagagattttttactggatatcgcaaggcagaaaaatcaaacccctttgccactgattaagccatatgcaggacctagactgccacctgatagatactgcttaacagctccaaactataggctgaagtccttaattaaaaagggacctaaccaagggagactagttccacgattaagtgttggtgctgttagtagcaaacctactactcctactatagcaaccccacaaacggtgtctgtcccaaataaagttgcaactccaatgtcagtgacaagccaaagatttacggtgcagattccaccttctcagtccacacctgtcaaaccagttcctgcaacaactgcagttcaaaatgttctgattaatccttcaatgattgggcccaaaaatattcttattaccaccaacatggtttcgtcacagaacacagccaatgaagcaaacccactgaagagaaaacatgaagatgatgatgacaatgatattatgtaaggaatatagtctagtctagatgcatttcaaaaggaaagttggttttgagcccagtatactgaactagaatattctagatcttgttttaccttaaaagactgaaatgtagctgcagtatttttcgtcagttaaaactgttagatctctttagtaaacatacaaatgtgtttttcagtaggcttcaattacaaacagttaagtacttgtttcttaatagtttcattaatgttgagtcctaatatggcaattctgtttttgagacacttttctgccttctatcactgatagtagcatttaagtttcagattctacagcctagtcagcagatttatctttgacagcataatttctgatctacatttaaatactactttattttataaggtaatatagttacttactgtcactagctaannnnnnnnnnnnnaccaaatctctcaatataggaaacattttttggaaaggatggatttagaggagagattctaaatccattttggatgtatttgtttctttgacttccttaacttccaaactcaactccctttctagatcccattcattttctgcacctcccccataggcttgtttctctccattgctattaaatgtagaaggccatacctggaattttaaaaatattattcctggtaatacagctcagtgtcattttcctatttttaaaacatgctctacatgcctaatgttttgtgattcactttaacctgatggtttgcatttgctgtttttcactcttatgtcagagcagttgggttttaccccttagtttttatgcctgttaagctttactgtgcttttgacaggtagttttgggtcagttatattcagttttagtattgtattccaagttgataactctttccatgtttcacatttctaaatttaaacagagatgctgtagctttaaaacatgttttgataagtaattacactggacctaggcaaaaccactgaagaacaagtgttccttttt

SEQ ID NO: 184578 - DNA, 967 bp, Homo Sapiens
aattgatgagcaatgcttcctttataaaggccaactttgtacaaaaaagttggattgtattccaagttgataactcttccatgtttcacatttctaaatttaacagagatgctgtagcttaaaacatgttttgataagtaattacactggacctaggcaaaaccactgaagaacaagtgttcctttttaccacatacatattatgttttgatcactgctgcttgagccccgctattggtataattcagatcattttagcttgttgctgaggatgtcacatataagacaggatcaaacctgaaagacactaatggttcatcctctataaggccaacaaagaaaacaaattaatgtgatgtaacttgcatttatgtgcactctgcataggtttcccaataatactgtaatgttgctgaacacctttccctgttttccatttatacacatattaaagtcatattgggaaagatggcaaagcttttgagaatataaacacacctgttttgtttttcttaagttcaacatacttttgtagaatttgtaaaataaatgttcgtatcataattgagaatttatagccaaggatcctcaaaacagaagtttcatcttaggatagtgtttgatatatctaagaaagtccagtaacagagaagaaatgtctcaaatgtctcgtatcagttttagtgtttttcagtattagggaaaggtaatataaaaacaggtaaaatgtataaaaatagacctgatcaacatcataggagataaatattctttatatagcataggatattattacttgaatgttctcagggaggcagcaagtcagaaggcctaggttctagtccctagctccatcattttaccaactgtggtgaccttactttcacctcttagccctggttctcctcactagcagtaggaaagtaacacctacctgcctacctcacagggcctgttgtgagggttc

SEQ ID NO: 184579 - DNA, 1294 bp, Homo Sapiens
  misc_feature (1147)..(1155): n is a, c, g, or t
aatatttatctcttatgatgttgatcagggtctatttttatacattttacctgtttttatattacctttccttaatactgaaaaacactaaaactgatacgagacattgagacatttcttctctgttactggactttcttagatatatcaaacactatctaagatgaaactttctgttttgaggatccttggctataaattctcaattatgatacgaacatttattttacaaattctacaaaagtatgttgaacttaagaaaaacaaaacaggtgtgtttatattctcaaaagctttgccatctttcccaatatgactttaatatgtgtataaatggaaaacagggaaaggtgttcagcaacattacagtattattgggaaacctatgcagagtgcacataaatgcaagttacatcacattaatttgttttctttgttggccttatagaggatgaaccattagtgtctttcaggtttgatcctgtcttatatgtgacatcctcagcaacaagctaaaatgatctgaattataccaatagcggggctcaagcagcagtgatcaaaacataatatgtatgtggtaaaaaggaacacttgttcttcagtggttttgcctaggtccagtgtaattacttatcaaaacatgttttaagctacagcatctctgttaaatttagaaatgtgaaacatggaagagttatcaacttggaatacaatactaaaactgaatataactgacccaaaactacctgtcaaaagcacagtaaagcttaacaggcataaaaactaaggggtaaaacccaactgctctgacataagagtgaaaaacagcaaatgcaaaccatcaggttaaagtgaatcacaaaacattaggcatgtagagcatgttttaaaaataggaaaatgacactgagctgtattaccaggaataatatttttaaaattccaggtatggccttctacatttaatagcaatggagagaaacaagcctatgggggaggtgcagaaaatgaatgggatctagaaagggagttgagtttggaagttaaggaagtcaaagaaacaaatacatccaaaatggatttagaatctctcctctaaatccatcctttccaaaaaatgtttcctatattgagagatttggtnnnnnnnnnttagctagtgacagtaagtaactatattaccttataaaataaagtagtatttaaatgtagatcagaaattatgctgtcaaagataaatctgctgactaggctgtagaatctgaaacttaaatgctactatcagtgccaa

SEQ ID NO: 184580 - DNA, 2063 bp, Homo Sapiens
tgagcaatgcttctttaaaatgccaactttgtacaaaaaagttggctgtataatcatctcacctatgcagtcaacatttggagtgaaaacgacccggcagatttcagaatctataacgtgacctacctagaaccctccctccgcatcgcagccagcaccctgaagtctgggatttcctacagggcacgggtgagggcctgggctcagtgctataacaccacctggagtgagtggagccccagcaccaagtggcacaactcctacagggagcccttcgagcagcacctcctgctgggcgtcagcgtttcctgcattgtcatcctggccgtctgcctgttgtgctatgtcagcatcaccaagattaagaaagaatggtgggatcagattcccaacccagcccgcagccgcctcgtggctataataatccaggatgctcaggggtcacagtgggagaagcggtcccgaggccaggaaccagccaagtgcccacactggaagaattgtcttaccaagctcttgccctgttttctggagcacaacatgaaaagggatgaagatcctcacaaggctgccaaagagatgcctttccagggctctggaaaatcagcatggtgcccagtggagatcagcaagacagtcctctggccagagagcatcagcgtggtgcgatgtgtggagttgtttgaggccccggtggagtgtgaggaggaggaggaggtagaggaagaaaaagggagcttctgtgcatcgcctgagagcagcagggatgacttccaggagggaagggagggcattgtggcccggctaacagagagcctgttcctggacctgctcggagaggagaatgggggcttttgccagcaggacatgggggagtcatgccttcttccaccttcgggaagtacgagtgctcacatgccctgggatgagttcccaagtgcagggcccaaggaggcacctccctggggcaaggagcagcctctccacctggagccaagtcctcctgccagcccgacccagagtccagacaacctgacttgcacagagacgcccctcgtcatcgcaggcaaccctgcttaccgcagcttcagcaactccctgagccagtcaccgtgtcccagagagctgggtccagacccactgctggccagacacctggaggaagtagaacccgagatgccctgtgtcccccagctctctgagccaaccactgtgccccaacctgagccagaaacctgggagcagatcctccgccgaaatgtcctccagcatggggcagctgcagcccccgtctcggcccccaccagtggctatcgggagtttgtacatgcggtggagcagggtggcacccaggccagtgcggtggtgggcttgggtcccccaggagaggctggttacaaggccttctcaagcctgcttgccagcagtgctgtgtccccagagaaatgtgggtttggggctagcagtggggaagaggggtataagcctttccaagacctcattcctggctgccctggggaccctgccccagtccctgtccccttgttcacctttggactggacagggagccacctcgcagtccgcagagctcacatctcccaagcagctccccagagcacctgggtctggagccgggggaaaaggtagaggacatgccaaagcccccacttccccaggagcaggccacagacccccttgtggacagcctgggcagtggcattgtctactcagcccttacctgccacctgtgcggccacctgaaacagtgtcatggccaggaggatggtggccagacccctgtcatggccagtccttgctgtggctgctgctgtggagacagggcctcgccccctacaacccccctgagggccccagacccctctccaggtggggttccactggaggccagtctgtgtccggcctccctggcaccctcgggcatctcagagaagagtaaatcctcatcatccttccatcctgcccctggcaatgctcagagctcaagccagacccccaaaatcgtgaactttgtctccgtgggaaccacatacatgagggtctc

SEQ ID NO: 184581 - DNA, 1180 bp, Homo Sapiens
ctttgtacaaaaaagttggcgtctttggaggaacagctccctagtggcttcctccgtctgcaatgtcccttgcacagcccacacatgaaccatccttcccatgatgccgctcttctgtcatcccgctcctgctgaaacacctcccaggggctccacctgttcaggagctgaagcccatgctttcccaccagcatgtcactcccagaccacctccctgccctgtcctccagcttcccctcgctgtcctgctgtgtgaattcccaggttggcctggtggccatgtcgcctgcccccagcactcctctgtctctgctcttgcctgcacccttcctcctcctttgcctaggaggccttctcgcattttctctagctgatcagaattttaccaaaattcagaacatcctccaattccacagtctctgggagactttccctaagaggcgacttcctctccagccttctctctctggtcaggcccactgcagagatggtggtgagcacatctgggaggctggtctccctccagctggaattgctgctctctgagggagaggctgtggtggctgtctctgtccctcactgccttccaggagcaatttgcacatgtaacatagatttatgtaatgctttatgtttaaaaacattccccaattatcttatttaatttttgcaattattctaattttatatatagagaaagtgacctatttttttaaaaaaatcacactctaagttctattgaacctaggacttgagcctccatttctggcttctagtctggtgttctgagtacttgatttcaggtcaataacggtcccccctcactccacactggcacgtttgtgagaagaaatgacattttgctaggaagtgaccgagtctaggaatgcttttattcaagacaccaaattccaaacttctaaatgttggaattttcaaaaattgtgtttagattttatgaaaaactcttctactttcatctattctttccctagaggcaaacatttcttaaaatgtttcattttcattaaaatgaaagccaaatttatatgccaccgattgcaggacacaagcacagttttaagagttgtatgaacatggagaggacttttgggttttatatttctcgtatttaatatgggtgaacaccacttttatttgggaataataattttcctcc

SEQ ID NO: 184582 - DNA, 1654 bp, Homo Sapiens
  misc_feature (137)..(199): n is a, c, g, or t
  misc_feature (311)..(319): n is a, c, g, or t
  misc_feature (575)..(590): n is a, c, g, or t
  misc_feature (725)..(741): n is a, c, g, or t
  misc_feature (878)..(977): n is a, c, g, or t
  misc_feature (1298)..(1333): n is a, c, g, or t
ttggatgatggtttgtttttacttgagcctgcctttgtaccctttttaacttaaagaacagagccacaccggtattatatgtgtatagttatattgcgtttgcagactaaattgtcatgttgtgaaagtttgtgtgnnnnnnnnnnnnnnnnnnnnnnnnnnnnnnnnnnnnnnnnnnnnnnnnnnnnnnnnnnnnnnnctggttttgtatgagagagaggttaaaaaggtttggtttacactgagtatatgttgtcaagtggcaaaagtccacatagctctcctgttttctgtatacgttcacagcctcnnnnnnnnntaattgaaatggctttaaaaaccaaacaaaacacctccatcctgtgataagtacctcgaatggattcagctttactcctttgtaactcatctttacattttcagcatatttaaacaaaccaacaaaatgaaatactaatagtaaaaaggctgacccatgtggctttgcagtgctgttcgtccagaagcatggcacacgatgcttgtgcatgtggaaacttagcgactgtcaacatacattctcagggatttatccnnnnnnnnnnnnnnnngaatgagagcatttattgtactgtatatatattatagtatatgtctgaatattgaaaatataacattaactaatttataaaaaatattctatgtaatgcaaaatacttgaagctgcagtagcttggttttaaacnnnnnnnnnnnnnnnnnctgagagaaaacctatcagaaagactaaaagtacgcctttgcttcagggttggctcaggtggtgaacttcatgctgggcatctatgcagagccaccttttggattgcatggttggactgagatctattgggagaaannnnnnnnnnnnnnnnnnnnnnnnnnnnnnnnnnnnnnnnnnnnnnnnnnnnnnnnnnnnnnnnnnnnnnnnnnnnnnnnnnnnnnnnnnnnnnnnnnnntgcttataacaggcactagaataaagagggacaacaaaatacacagccagagcagcaagccttagcattaagaatatacaatatgccggaattggggttcgtgcctcctagcctaggaaacttaaaagaaatatccttttgacacaaaacacaaaatgttttccaaaacaattgacataatgatacattacgcctttgcagtgagctaataataagctaacctttgtgcacaaataacattatatatattatatatctattctgcataggtattttgactttgtgcaggacagaaagttgtgtaggtatgactgttctacnnnnnnnnnnnnnnnnnnnnnnnnnnnnnnnnnnnnctctagaaattactcaaacaaaagcagccttctatcttgccttgtcttaatgctttaaaataaccaaactggagatctaactaccaaactgttcattatattattaaaataccaaactttggttacagtatagtgtctttacttttagctgatggttctgtaaacctttgtgctttttaaagcaatttttatgttttggtgcaaaagttgtcaagtgtctcttgttccccttcactagagaacatgcttaaaaggtatgtttgtaggtatttttgtttagaagaactatttcatgcgctcattttattttattataatagg

SEQ ID NO: 184583 - DNA, 1621 bp, Homo Sapiens
  misc_feature (101)..(163): n is a, c, g, or t
  misc_feature (274)..(313): n is a, c, g, or t
  misc_feature (538)..(553): n is a, c, g, or t
  misc_feature (684)..(703): n is a, c, g, or t
  misc_feature (839)..(938): n is a, c, g, or t
  misc_feature (1259)..(1294): n is a, c, g, or t
ttggcctttttaacttaaagaacagagccacaccggtattatatgtgtatagttatattgcgtttgcagactaaattgtcatgttgtgaaagtttgtgtgnnnnnnnnnnnnnnnnnnnnnnnnnnnnnnnnnnnnnnnnnnnnnnnnnnnnnnnnnnnnnnnctggttttgtatgagagagaggttaaaaaggtttggtttacactgagtatatgttgtcaagtggcaaaagtccacatagctctcctgttttctgtatacgttcacagcctnnnnnnnnnnnnnnnnnnnnnnnnnnnnnnnnnnnnnnnncacctccatcctgtgataagtacctcgaatggattcagctttactcctttgtaactcatctttacattttcagcatatttaaacaaaccaacaaaatgaaatactaatagtaaaaaggctgacccatgtggctttgcagtgctgttcgtccagaagcatggcacacgatgcttgtgcatgtggaaacttagcgactgtcaacatacattctcagggatttatccnnnnnnnnnnnnnnnngaatgagagcatttattgtactgtatatatattatagtatatgtctgaatattgaaaatataacattaactaatttataaaaaatattctatgtaatgcaaaatacttgaagctgcagtagcttggttttnnnnnnnnnnnnnnnnnnnnctgagagaaaacctatcagaaggactaaaagtacgccttgcttcagggttggctcaggtggtgaacttcatgctgggcatctatgcagagccaccttttggattgcatggttggactgagatctattgggagaaannnnnnnnnnnnnnnnnnnnnnnnnnnnnnnnnnnnnnnnnnnnnnnnnnnnnnnnnnnnnnnnnnnnnnnnnnnnnnnnnnnnnnnnnnnnnnnnnnnntgcttataacaggcactagaataaagagggacaacaaaatacacagccagagcagcaagccttagcattaagaatatacaatatgccggaattggggttcgtgcctcctagcctaggaaacttaaaagaaatatccttttgacacaaaacacaaaatgttttccaaaacaattgacataatgatacattacgcctttgcagtgagctaataataagctaacctttgtgcacaaataacattatatatattatatatctattctgcataggtattttgactttgtgcaggacagaaagttgtgtaggtatgactgttctacnnnnnnnnnnnnnnnnnnnnnnnnnnnnnnnnnnnnctctagaaattactcaaacaaaagcagccttctatcttgccttgtcttaatgctttaaaataaccaaactggagatctaactaccaaactgttcattatattattaaataccaactttggttacagtatagtgtctttactttagctgatggttctgtaaccttgtgctttttaaagcaatttttatgttttggtgcaaaagttgtccagtgtctcttgttcccttcactagagaaacatgcttagaggtatgtttgtaggtatttttgtttagaagaactattttcatgcggcttcatttttatttatttatattaggtaaaaagg

SEQ ID NO: 184584 - DNA, 1305 bp, Homo Sapiens
  misc_feature (234)..(249): n is a, c, g, or t
  misc_feature (384)..(400): n is a, c, g, or t
  misc_feature (536)..(635): n is a, c, g, or t
  misc_feature (956)..(991): n is a, c, g, or t
ttggcaaaacacctccatcctgtgataagtacctcgaatggattcagctttactcctttgtaactcatctttacattttcagcatatttaaacaaaccaacaaaatgaaatactaatagtaaaaaggctgacccatgtggctttgcagtgctgttcgtccagaagcatggcacacgatgcttgtgcatgtggaaacttagcgactgtcaacatacattctcagggatttatccnnnnnnnnnnnnnnnngaatgagagcatttattgtactgtatatatattatagtatatgtctgaatattgaaaatataacattaactaatttataaaaaatattctatgtaatgcaaaatacttgaagctgcagtagcttggttttaaacnnnnnnnnnnnnnnnnnctgagagaaaacctatcagaaggactaaaagtacgccttgcttcagggttggctcaggtggtgaacttcatgctgggcatctatgcagagccaccttttggattgcatggttggactgagatctattgggagaaannnnnnnnnnnnnnnnnnnnnnnnnnnnnnnnnnnnnnnnnnnnnnnnnnnnnnnnnnnnnnnnnnnnnnnnnnnnnnnnnnnnnnnnnnnnnnnnnnnntgcttataacaggcactagaataaagagggacaacaaaatacacagccagagcagcaagccttagcattaagaatatacaatatgccggaattggggttcgtgcctcctagcctaggaaacttaaaagaaatatccttttgacacaaaacacaaaatgttttccaaaacaattgacataatgatacattacgcctttgcagtgagctaataataagctaacctttgtgcacaaataacattatatatattatatatctattctgcataggtattttgactttgtgcaggacagaaagttgtgtaggtatgactgttctacnnnnnnnnnnnnnnnnnnnnnnnnnnnnnnnnnnnnctctagaaattactcaaacaaaagcagccttctatcttgccttgtcttaatgctttaaaataaccaaactggagatctaactaccaaactgttcattatattattaaataccaactttggttacagtatagtgtctttactttagctgatggttctgtaaccttgtgctttttaaagcaatttttatgttttggtgcaaaagttgtccagtgtctcttgttcccttcactagagaacatgcttagaggtatgtttgtaggtatttttgtttagaagaactatttcatgcgctccattttatttattatataggt

SEQ ID NO: 184585 - DNA, 2037 bp, Homo Sapiens
  misc_feature (1495)..(1521): n is a, c, g, or t
  misc_feature (1886)..(1914): n is a, c, g, or t
tacaaaaaagttgggatggcggcggctggcggtggtggagttccagagagcccagtctctactcagcaccgaccgggaggcctccatcgacatcctccactccatcgtgaagcgtgacattcaggaaaacgatgaagaggcagtgcaagtcaaagagcagagcatcctggaactgggatctctcctggcaaagactggacaagctgcagagcttggaggactcctgaagtatgtacgacccttcttgaattccatcagcaaggctaaagcagctcgcctggtccgatctcttcttgatctgtttcttgatatggaagcagctacagggcaggaggtcgagctgtgtttagagtgcatcgaatgggccaagtcagagaaaagaactttcttacgccaagctttggaggcaagactggtgtctttgtactttgataccaagaggtaccaggaagcattgcatttgggttctcagctgctgcgggagttgaaaaagatggacgacaaagctcttttggtggaagtacagcttttagaaagcaaaacataccatgccctgagcaacctgccgaaagcccgagctgccttaacttctgctcgaaccacagcaaatgccatctactgcccccctaaattgcaggccaccttggacatgcagtcgggtattatccatgcagcagaagagaaggactggaaaactgcgtactcatacttctatgaggcatttgagggttatgactccatcgacagccccaaggccatcacatctctgaagtacatgttgctgtgcaaaatcatgctcaacaccccagaagatgtccaggctttggtgagcgggaagcttgcacttcggtatgcagggaggcagacagaagcattaaaatgcgtggctcaggctagcaagaacagatcactggcagattttgaaaaggctctgacagattaccgggcagagctccgggatgacccaatcatcagcacacacttggccaagttgtatgataacttactagaacagaatctgatccgagtcattgagcctttttccagagtacagattgaacacatatctagtctcatcaaactctccaaggccgacgtggaaaggaaattatcacagatgattcttgacaagaaatttcatgggattttggaccacggggagggtgtcctgattattttcgatgactcccagtagataaaacttacgaagctgctctggaaacaattcagaacatgagcaaagtagtggattccctctacaacaaagccaagaaactgacatagagttggatctgtagcggtcctttggagagtgtgtgtggcgggagagtgaaaccttgggggaaaatgctaggagattcttttttctttttgttctacttttcgctcggaaagtttttaaatcctcatttggtgcatctgtattccagccaataggtgtgccagttttcatgtaatctttactggcccaacttgggagtggggaaattgcttnnnnnnnnnnnnnnnnnnnnnnnnnnngattattctaaataaaaggaaaaaggcttacactacctaaagctgtgctctctgcctcctgggagagggccgcaaagccaggcaccccgccaaccactgggggtcctaatccacctgctgggcatcacctctcctcctcctcagaattgggtgtttgctgaccatcaaaagcaatgactttttattctgtttgtactgaaccaaaacaaacaactgtgtatagactgctgttttcttttttatttgaaatgaggcattttggtgttctttcccctaccatacggcctgtctgcccttccctccccacattggctccagcagagtagccgaaggtcctgccgccgccgccaccaccaccaccactnnnnnnnnnnnnnnnnnnnnnnnnnnnnngcctgcatagctccactctgacctgtgaaggaatggggatgaggccaggagctagtgtctaccacggccacacagggagcagtgtgggcccttagcccccaaagggcctgctatgcatgtggc

SEQ ID NO: 184586 - DNA, 2075 bp, Homo Sapiens
  misc_feature (1681)..(1704): n is a, c, g, or t
ttgggggagaaggcggccgagccccagctctccgagcaccgggtcggaagccgcgacccgagccgcgcaggaagctgggaccggaacctcggcggacccggccccacccaactcacctgcgcaggtcaccagcaccctcggaacccagaggcccgcgctctgaaggtgacccccctggggaggaaggcgatggcccctgcgaggacgatggcccgcgcccgcctcgccccggccggcatccctgccgtcgccttgtggcttctgtgcacgctcggcctccagggcacccaggccgggccaccgcccgcgccccctgggctgcccgcgggagccgactgcctgaacagctttaccgccggggtgcctggcttcgtgctggacaccaacgcctcggtcagcaacggagctaccttcctggagtcccccaccgtgcgccggggctgggactgcgtgcgcgcctgctgcaccacccagaactgcaacttggcgctagtggagctgcagcccgaccgcggggaggacgccatcgccgcctgcttcctcatcaactgcctctacgagcagaacttcgtgtgcaagttcgcgcccagggagggcttcatcaactacctcacgagggaagtgtaccgctcctaccgccagctgcggacccagggctttggagggtctgggatccccaaggcctgggcaggcatagacttgaaggtacaaccccaggaacccctggtgctgaaggatgtggaaaacacagattggcgcctactgcggggtgacacggatgtcagggtagagaggaaagacccaaaccaggtggaactgtggggactcaaggaaggcacctacctgttccagctgacagtgactagctcagaccacccagaggacacggccaacgtcacagtcactgtgctgtccaccaagcagacagaagactactgcctcgcatccaacaaggtgggtcgctgccggggctctttcccacgctggtactatgaccccacggagcagatctgcaagagtttcgtttatggaggctgcttgggcaacaagaacaactaccttcgggaagaagagtgcattctagcctgtcggggtgtgcaaggtgggcctttgagaggcagctctggggctcaggcgactttcccccagggcccctccatggaaaggcgccatccagtgtgctctggcacctgtcagcccacccagttccgctgcagcaatggctgctgcatcgacagtttcctggagtgtgacgacacccccaactgccccgacgcctccgacgaggctgcctgtgaaaaatacacgagtggctttgacgagctccagcgcatccatttccccagtgacaaagggcactgcgtggacctgccagacacaggactctgcaaggagagcatcccgcgctggtactacaaccccttcagcgaacactgcgcccgctttacctatggtggttgttatggcaacaagaacaactttgaggaagagcagcagtgcctcgagtcttgtcgcggcatctccaagaaggatgtgtttggcctgaggcgggaaatccccattcccagcacaggctctgtggagatggctgtcgcagtgttcctggtcatctgcattgtggtggtggtagccatcttgggttactgcttcttcaagaaccagagaaaggacttccacggannnnnnnnnnnnnnnnnnnnnnnncctgccagctccactgtctccactaccgaggacacggagcacctggtctataaccacaccacccggcccctctgagcctgggtctcaccggctctcacctggccctgcttcctgcttgccaaggcagaggcctgggctgggaaaaactttggaaccagactcttgcctgtttcccaggcccactgtgcctcagagaccagggctccagcccctcttggagaagtctcagctaagctcacgtcctgagaaagctcaaaggtttggaaggagcagaaaactcttgggccagaagtaccagactagatggacctgcctgcataggagtttggaggaagttggagtttgtttctctgttcaaagctgcctgtccc

SEQ ID NO: 184587 - DNA, 1828 bp, Homo Sapiens
  misc_feature (1529)..(1552): n is a, c, g, or t
ttggcctcccttcttctcaggtcaccagcaccctcggaacccagaggcccgcgctctgaaggtgacccccctggggaggaaggcgatggcccctgcgaggacgatggcccgcgcccgcctcgccccggccggcatccctgccgtcgccttgtggcttctgtgcacgctcggcctccagggcacccaggccgggccaccgcccgcgccccctgggctgcccgcgggagccgactgcctgaacagctttaccgccggggtgcctggcttcgtgctggacaccaacgcctcggtcagcaacggagctaccttcctggagtcccccaccgtgcgccggggctgggactgcgtgcgcgcctgctgcaccacccagaactgcaacttggcgctagtggagctgcagcccgaccgcggggaggacgccatcgccgcctgcttcctcatcaactgcctctacgagcagaacttcgtgtgcaagttcgcgcccagggagggcttcatcaactacctcacgagggaagtgtaccgctcctaccgccagctgcggacccagggctttggagggtctgggatccccaaggcctgggcaggcatagacttgaaggtacaaccccaggaacccctggtgctgaaggatgtggaaaacacagattggcgcctactgcggggtgacacggatgtcagggtagagaggaaagacccaaaccaggtggaactgtggggactcaaggaaggcacctacctgttccagctgacagtgactagctcagaccacccagaggacacggccaacgtcacagtcactgtgctgtccaccaagcagacagaagactactgcctcgcatccaacaaggtgggtcgctgccggggctctttcccacgctggtactatgaccccacggagcagatctgcaagagtttcgtttatggaggctgcttgggcaacaagaacaactaccttcgggaagaagagtgcattctagcctgtcggggtgtgcaaggcccctccatggaaaggcgccatccagtgtgctctggcacctgtcagcccacccagttccgctgcagcaatggctgctgcatcgacagtttcctggagtgtgacgacacccccaactgccccgacgcctccgacgaggctgcctgtgaaaaatacacgagtggctttgacgagctccagcgcatccatttccccagtgacaaagggcactgcgtggacctgccagacacaggactctgcaaggagagcatcccgcgctggtactacaaccccttcagcgaacactgcgcccgctttacctatggtggttgttatggcaacaagaacaactttgaggaagagcagcagtgcctcgagtcttgtcgcggcatctccaagaaggatgtgtttggcctgaggcgggaaatccccattcccagcacaggctctgtggagatggctgtcgcagtgttcctggtcatctgcattgtggtggtggtagccatcttgggttactgcttcttcaagaaccagagaaaggacttccacggannnnnnnnnnnnnnnnnnnnnnnncctgccagctccactgtctccactaccgaggacacggagcacctggtctataaccacaccacccggcccctctgagcctgggtctcaccggctctcacctggccctgcttcctgcttgccaaggcagaggcctgggctgggaaaaactttgggaaccagactcttgcctgttttccaggcccactgtgcctcagagaccagggctccagcccctcttggagaattctcagctaagctcacgtcctgagaagctcaaaggtttgggaaggagcaaaa

SEQ ID NO: 184588 - DNA, 1013 bp, Homo Sapiens
ttggccttgctctctccagggccagtctgtgtgtgtggggactcagcccgtggccggcagatgccatccaggatgtacaaggtgcagccaaggcaggccatgcaggggccgggcctgtctgcagctggtggatgcctgtgggcatggctttctctggggaccccattcctgtcagtagcaaccctggcagtgtccggagcggctctagacaactttggtcataggaactctggaggtgggttctggtcatctgaggtggctactcaacaggtttgaggccccacagcaacagaagtccaggacccactaggttgcctcagaagccctaagactgatgagctggagcgcgcatttgagagaagcctcgcacccactgtgtactggccccgctcaggccggcctggcacaccgttgcctgctggcggctctcatggggaagcgcctgggcactggggattgcttgtggcccactcaactcttggggcagtggcccgtaaccctagtttgcctgaggcccttatgtccccttatgttcctggtactggagcttgagctcttgcctggaacgctgcagctgcacccaccctgcttgatcccacctgggaggccaggacactgaggagctctgaacccagcccacagggaagcagaggaaggtgagcccccgccgccccccagcccttcccatcccttccctgctccctggtggtctaaggacccaagctccctagacttcctcttccaccgtctgtacgtttcaaattacactggtgtaggcctgtactgctggtggggctgggcccctaaacgccagaaagtgaatcttaagaagctctgccctaaactgagaaccacatgctgagggaagggctgaaaggtgaaggctcagcctccctcacatgggtcccgggttacattaggtaccgggctgattgataggcatttggccatggttccttttcgtctacctttgggggctttcttaggccccgaacaaggctgttgttactatg

SEQ ID NO: 184589 - DNA, 1286 bp, Homo Sapiens
ctttgtacaaaaaagttgggtctcttctcccttttgagaaaaagctacagtttcaaaaactgaaaatcagaaaagttttccaaaatctgtgcccagagatcaaataaatgctgaaaagaaactttcagccaaggaatttggtctgcttaaacccacaagtgccaggtcaggcttggcagaaagcagcagtaaattcaaacctactcagagcagtcttaccagaggaggcagtggaaggatctcagccctgcaaggcaagctttctaaactggattacagagatataacaaaacaatctcaggaaacagaggctagaccttccatcatgaaacgggatgacagcaacaataagactttggctgagcaaaacactaagaatcctaaaagcactactggtagaagttccaaatctaaagaggagccattatttccatttaatttggatgaatttgttactgtggatgaggttatagaagaagtgaatccttctcaggccaagcagaatccactaaagggaaaaaggaaagaaactctcaaaaatgttcctttctctgaacttaacttaaagaagaaaaaggggaaaacttccactcctcgtggtgttgagggagaactatcttttgtgacattggatgagattggggaagaggaagatgcagctgcacatctagcacaagctctagtcactgtggatgaagtaattgatgaagaagaactaaatatggaagaaatggtaaaaaattcaaattcactttttacattagatgaattaattgaccaagatgattgcatttcccacagtgaacctaaagatgttactgttctgtcagtggctgaagaacaagatctcctcaaacaggaacgcttggtaactgtggatgaaattggagaagtggaagagctacctttgaatgagtcagcagacataacttttgccactttaaatactaaaggaaatgaaggagatactgtaagggattccattggcttcatttcttctcaggtgcccgaagacccttctactttagttactgtagatgaaatacaagatgacagcagtgatttgcatttagtgactttggatgaagtaactgaagaggatgaagactctctggcggattttaacaaccttaaagaagagcttaattttgttactgttgatgaagttggagaggaggaagatggagataatgatttaaaagttgattagcccaaagcaaaaatgaccatccacagattaaaaagggaatagaaggagagagctggtggacccaaaaagacaaaac

SEQ ID NO: 184590 - DNA, 2787 bp, Homo Sapiens
ttggcttaaaaagagatgcagatgcttcaaaagctgttgaaattgttacttcaacttctgctggttagttatgcaatatctccctccatcccttcccgataaacccacaagacacaaaacataagaaagccaaaactggacaagccaaggcatctgtagccaaagtaaacaaatctacagggaaatcagcaagttctgtaaaatctgtggtaacggtagctgttaaaggtaataaagcttcaatcaaaacagcaaaatctggtggaaagaagtctctagaagccaaaaagactgggaatgtcaaaaacaaagactctaacaaacctgtgactataccagaaaactctgaaataaagaccagtattgaagtcaaagccactgaaaactgtgctaaagaagctatttctgatgctgctttggaggccacagagaatgaaccacttaacaaggaaacagaagaaatgtgtgtgatgcttgtctctaatttgcctaataaaggatattctgtagaagaagtttatgacttagcaaaaccatttggtggtttaaaggatatcttgattttatcatctcataaaaaggcatatatagaaataaatagaaaagctgctgagtctatggtaaaattttatacctgcttcccagtattgatggatggaaatcaactctcaataagtatggctcctgaaaacatgaatataaaagatgaggaagctatatttataaccttggtaaaagaaaatgacccagaggcaaacatagatacaatctatgatcgatttgtacatcttgataatttaccggaagatggacttcagtgtgtactttgtgttggacttcagtttggaaaagtggatcaccatgtattcataagtaatagaaataaggcaattcttcagttagatagtcctgaatctgctcagtcaatgtatagctttctgaaacaaaatccacaaaatattggtgaccatatgttgacctgctcattatctccaaagatagacttaccagaggtgcaaattgagcatgacccagaattagaaaaagaaagccctggcttgaaaaacagtccaattgatgaaagtgaggtgcaaacagcaactgatagtccctctgttaaacctaatgagcttgaagaagaaagtactcccagcattcaaacagaaactttggtacagcaggaagagccttgtgaggaagaagctgaaaaagcaacatgtgattctgactttgctgttgaaactttggagcttgaaactcaaggagaggaggtcaaagaagaaattcctcttgtagcatccgcttcagtcagtattgaacaattcactgaaaatgccgaggagtgtgctttaaatcagcagatgtttaacagtgacttggagaagaaaggggcagaaattattaaccctaaaacagcattgttaccatctgacagtgtgtttgcagaagaaaggaacctcaaaggaattctagaagaatctccatctgaagcagaagatttcatttctggaattacacagactatggtagaagctgtagctgaagtagaaaaaaatgaaactgtttcggaaatattgccatcaacttgtattgtgacgttagtaccaggaattcccactggggatgagaagacagtggacaaaaagaatatttctgaaaaaaaaggtaacatggatgaaaaggaggagaaggaatttaatactaaggaaaccagaatggatcttcaaataggaacagagaaggctgaaaagaatgaaggtaggatggatgcagaaaaggtggaaaagatggcagcaatgaaagaaaagcctgcagaaaacactttattcaaggcatacccaaataaaggagtgggtcaggctaataagcctgatgaaactagtaaaactagtattctggctgtatcagatgtatctagcagtaaaccaagcatcaaggctgttatagtctcttctcctaaggcaaaagctacagtttcaaaaactgaaaatcagaaaagttttccaaaatctgtgcccagagatcaaataaatgctgaaaagaaactttcagccaaggaatttggtctgcttaaacccacaagtgccaggtcaggcttggcagaaagcagcagtaaattcaaacctactcagagcagtcttaccagaggaggcagtggaaggatctcagccctgcaaggcaagctttctaaactggattacagagatataacaaaacaatctcaggaaacagaggctagaccttccatcatgaaacgggatgacagcaacaataagactttggctgagcaaaacactaagaatcctaaaagcactactggtagaagttccaaatctaaagaggagccattatttccatttaatttggatgaatttgttactgtggatgaggttatagaagaagtgaatccttctcaggccaagcagaatccactaaagggaaaaaggaaagaaactctcaaaaatgttcctttctctgaacttaacttaaagaagaaaaaggggaaaacttccactcctcgtggtgttgagggagaactatcttttgtgacattggatgagattggggaagaggaagatgcagctgcacatctagcacaagctctagtcactgtggatgaagtaattgatgaagaagaactaaatatggaagaaatggtaaaaaattcaaattcactttttacattagatgaattaattgaccaagatgattgcatttcccacagtgaacctaaagatgttactgttctgtcagtggctgaagaacaagatctcctcaaacaggaac

SEQ ID NO: 184591 - DNA, 1337 bp, Homo Sapiens
tttgtacaaaaaagttggggatgagattggccgaagaggaagatgcagctgcacatctagcacaagctctagtcactgtggatgaagtaattgatgaagaagaactaaatatggaagaaatggtaaaaaattcaaattcactttttacattagatgaattaattgaccaagatgattgcatttcccacagtgaacctaaagatgttactgttctgtcagtggctgaagaacaagatctcctcaaacaggaacgcttggtaactgtggatgaaattggagaagtggaagagctacctttgaatgagtcagcagacataacttttgccactttaaatactaaaggaaatgaaggagatactgtaagggattccattggcttcatttcttctcaggtgcccgaagacccttctactttagttactgtagatgaaatacaagatgacagcagtgatttgcatttagtgactttggatgaagtaactgaagaggatgaagactctctggcggattttaacaaccttaaagaagagcttaattttgttactgttgatgaagttggagaggaggaagatggagataatgatttaaaagttgagttagcacaaagcaaaaatgaccatcccacagataaaaaagggaatagaaagaagagagctgtggacacaaaaaagacaaaacttgaatccttgtcccaagtgggtccagtaaatgagaatgttatggaagaagatctaaaaaccatgattgaaagacacttaacagctaaaactccaaccaagagagttagaattgggaaaactctgccatcagaaaaagctgttgtgacagaaccagcaaaaggtgaagaggccttccagatgagtgaagttgatgaggaatctggattaaaggattcagaaccagagcgaaaacgcaagaagactgaagactcttcttcaggcaaatcagtggcgtctgatgtccctgaggaattagactttcttgtacctaaggctggattcttctgtccaatttgttccctcttctactcaggtgaaaaagcaatgacaaatcactgcaagagtacacgtcataagcaaaatactgagaaattcatggccaagcaaagaaaggaaaaggagcagaatgaggctgaagaaagaagctctaggtgattgggggaaaggaaagaattcactagaaatttgtttaggggtccagttgatttgtgtatttttgttatcatttaatttgtaattttcgtttcagaagcaaatattcgtgttgtacaaatttctgattgccctaaatgtagagagactgatggggaaagtatgatgagtttgattttttatatc

SEQ ID NO: 184592 - DNA, 3556 bp, Homo Sapiens
  misc_feature (3378)..(3388): n is a, c, g, or t
ttggctgcagagagaatggtttccatggcttggttgcgtatgactctgattatgcactgtgcaacatcccctactatttcagtgcccatgccctaaaactgagccggaacgggaaaagtctcaccacaagccaatatctgatgcatgaagttgccaagcaactggacctgaatccaaatcgttttcctatttttgctgctctcttaggaaatcacattctgcctgatgaagatctggcttcctttcactggagtttacttggtccagaacatccactagcctcactaaaggtccgggcccaccagctggtcttgccaccttgcgacgtagtgatcaaagccgttgctgactatgtacgcaacattcaggacacctctgacttggatgccatagctaaagatgttttccagcattcacagtctagaacagatgacaaagttattcgatttaagagagcaattggatattattcagcgactagtaagcctatgtcatttcatccaccacattacttagcagccagacccggtccgtttggaatgcctgggatggtgccgccgcatgttcctcctcagatgctcaacattccgcagacctctctgcaagcaaagcccgtggccccacaggtgcccagcccagggggcgccccgggccagggtccatacccgtacagcctctctgagccagcacctctcactttggacacgagcgggaagaatctgacggagcagaacagctacagcaacattcctcacgaagggaagcacacgccgctgtatgagcggtcctcgcccatcaacccggcccagagcggcagccccaaccacgtggattccgcctacttccctggctcttctacatcgtcatcttccgacaacgacgagggcagcggaggggcgacaaaccatatcagcgggaacaagattggctgggagaagacgggaagccactcagagcctcaggcacgaggagacccaggagaccaaacaaaggcagaaggctcgtccactgcctcttcaggaagccaactagccgaaggcaagggaagccagatgggcactgtccagccaatcccgtgcctcctgtcgatgcccaccaggaaccacatggacatcaccacacctcccctgccccccgtcgcacctgaggtgctgagagtggccgagcacaggcacaagaaggggctgatgtacccctacatcttccatgtcctgacgaagggtgaaatcaaaattgctgtttctattgaagatgaagccaacaaggacctgcctccggccgctctgctctataggccagttcgtcagtatgtttacggagtcctgtttagtttggcagaaagcagaaagaaaactgagagacttgcttttagaaagaacagacttccaccagaattttcaccagtgatcattaaagaatgggcagcttacaaaggaaagtctcctcaaaccccggaactggttgaagctcttgccttcagggagtggacctgccccaacctgaagaggctgtggttgggtaaggcggtagaggacaagaaccgcaggatgagggccttcctggcctgcatgaggtcggacaccccagccatgctcaaccctgccaacgtgcccactcacctcatggtgctctgctgcgtcttacggtacatggtgcagtggccgggagcacgcatccttcggcgtcaggagctagatgccttcctggctcaggcgctgtcccccaaactctacgagcctgatcagctccaggagctcaagattgagaacctagatccccgaggaattcagctatcagctctcttcatgagtggagtagacatggccttgtttgcaaatgatgcatgcggacagccaatcccctgggaacactgttgtccttggatgtattttgatgggaagctcttccaatccaaactcctcaaagccagccgggaaaagaccccactcattgacctctgtgatggtcaggctgatcaggctgccaaggtagagaagatgcgccagagcgtcctcgaggggctcagcttctccaggcagagccacacgctccctttcccgccgccacctgccctgcccttctaccctgcctctgcgtacccccggcactttgggcctgtcccaccctctcagggcaggggcagaggctttgcaggcgtctgtggctttggaggcccctatggggaaacggtagcaacaggcccttaccgtgccttccgtgtggcggcagcatcgggacactgcggagccttctcaggcagtgacagcagcaggactagcaagtcccagggcggagtccaacctataccttctcagggaggcaaactagaaatagctggcactgtggttggcattgggctgggagcaggcggggccgtgggggccgggggcctttccccctgcaggtggtttctgtcggaggaccagctagagggcgtccaagaggagttatttccaccccagtgattagaacatttggaagaggtggaaggtactatggcagaggttacaaaaaccaggcagcaattcagggcagacctccttatgctgcttcagcagaagaagtggccaaagaacttaagtcaaaatctggggaatcgaagtcctctgctatgtcttcagacgggtccctggctgaaaacggagtgatggccgaggagaagccggctccccagatgaacgggagcacgggtgacgccagggcccccagccactctgaaagtgccttgaataatgactctaaaacgtgcaatacaaatcctcatttaaatgcactaagtacagacagcgcttgccgcagagaagctgctctggaggcagctgtcttaaataaagaagagtaaacttattttttatagagggtgaaggatgctggaagggtaaggatttaggaatatctggagagaaagagagcctgcagttatgtacattttgtcctttccgtaagagaaaaatgaggactttggaaattcagatccctctttgatatcagagatttaaacaacacatttttagttttaaccagttgtagtcaaaatgctacaataaaacaaaaaagagaaagaaaatgaagagcatttgactcccgcacttaaaatgaagtacacataaagtttaaactggttatgacaaaagcctatagttgtgtttcttgaactataaagaaaacaaattttggcagtctttaagtatatatagcttaaaatataatttttagcatttggcaccatatgtatgccattatatttgattttgcattactgtttcacaatgaagctttctttaaggctttgatttttatgattatgaaagaaataaggcacaaccacagtttttctttcttaaatttcatcactgttgatgtggttcttttgtgttnnnnnnnnnnngtgcaactatcaaaactaaaaaattatagagtaatattgccgttctgctgattttaaatatacaatacatcatacatactttacaagcaagttaaatggagataaagttgaaatcatagaagatgcaaatgacctttcaaaatcaacacaatgtgttctgaaactttc

SEQ ID NO: 184593 - DNA, 1443 bp, Homo Sapiens
  misc_feature (1096)..(1107): n is a, c, g, or t
agcaatgctttttctataatagccaactttgtacaaaaaagttggatgtaatttaaaataagcaataattaaggcacagttgattttgtagagtattggtccatacagagaaactgtggtcctttataaatagccagccagcgtcaccctcttctccaatttgtaggtgtattttatgctcttaaggcttcatcttctccctgtaactgagatttctaccacacctttgaacaatgttctttcccttctggttatctgaagactgtcctgaaaggaagacataagtgttgtgattagtagaagctttctagtagaccatatttcttctggattgtaataaaattgttagtagctccttttactttgttcctgtctctggaaagccatttttgaattgctgattactttggctttaatcagtggtcacctagaaaaagctttgtaatcataacacaatgagtaattcttgataaaagttcagatacaaaaggagcactgtaaaactggtaggagctatggtttaagagcattggaagtagttacaactcaaggattttggtagaaaggtatgagtttggtcgaaaaattaaaatagtggcaaaataagatttagttgtgttttctcagagccgccacaagattgaacaaaatgttttctgtttgggcatcctgaggaagttgtattagctgttaatgctctgtgagtttagaaaaagtcttgatagtaaatctagtttttgacacagtgcatgaactaagtagttaaatatttacatattcagaaaggaatagtggaaaaggtatcttggttatgacaaagtcattacaaatgtgactaagtcattacaaatgtgactgagtcattacagtggaccctctgggtgcattgaaaagaatccgttttatatccaggtgtcagaggacctggaataataaaaagctttggattttgcattcagtgtagttggattttgggaccttggcctcagtgttatttactgggattggcatacgtgttcacaggcagagtagttgatctcacacaacgggtgatctcacaaaactggtaagtttcttatgctcatgagccctcccnnnnnnnnnnnnaatttggtgcctgcaactttcttaacaatgattctacttcctgggctatcacattataatgctcttggcctcttttttgctgctgttttgctattcttaaacttaggccaagtaccaatgttggctgttagaagggattctgttcattcaacatgcaactttagggaatggaagtaagttcatttttaagttgtgttgtcagtaggtgcggtgtctagggtagtgaatcctgtaaagttcaaatttatgattaggtgacgagttgacattgagattgtccttttccctgatcaaaaatgaataaagccttttaaaacaaaatccaactcttaatca

SEQ ID NO: 184594 - DNA, 3181 bp, Homo Sapiens
actttgtacaaaaaagttggtttaaatccagctccatacaacgctccgccgccgctgctgccgcgacccggactgcgcgccagcacccccctgccgacagctccgtcactatggaggatatgaacgagtacagcaatatagaggaattcgcagagggatccaagatcaacgcgagcaagaatcagcaggatgacggtaaaatgtttattggaggcttgagctgggatacaagcaaaaaagatctgacagagtacttgtctcgatttggggaagttgtagactgcacaattaaaacagatccagtcactgggagatcaagaggatttggatttgtgcttttcaaagatgctgctagtgttgataaggttttggaactgaaagaacacaaactggatggcaaattgatagatcccaaaagggccaaagctttaaaagggaaagaacctcccaaaaaggtttttgtgggtggattgagcccggatacttctgaagaacaaattaaagaatattttggagcctttggagagattgaaaatattgaacttcccatggatacaaaaacaaatgaaagaagaggattttgttttatcacatatactgatgaagagccagtaaaaaaattgttagaaagcagataccatcaaattggttctgggaagtgtgaaatcaaagttgcacaacccaaagaggtatataggcagcaacagcaacaacaaaaaggtggaagaggtgctgcagctggtggacgaggtggtacgaggggtcgtggccgaggtcagggccaaaactggaaccaaggatttaataactattatgatcaaggatatggaaattacaatagtgcctatggtggtgatcaaaactatagtggctatggcggatatgattatactgggtataactatgggaactatggatatggacagggatatgcagactacagtggccaacagagcacttatggcaaggcatctcgagggggtggcaatcaccaaaacaattaccagccatactaaaggagaacattggagaaaacaggtgtgtataagagtacaggaaaacagtagaaatgtctaatttaatttaaagatcaatagacaaatgaaacgtaaaaacaaaatactatgtagcctgtttttactaaattgttgattttttaattgctttatgagcctgttttgcctaaagtgtctatagatctttaactttaaagtcttatctcactttctttagtattgcagaaaaacttaagagtttttctgtttgcttttgtgtaccaggtggtctagaggaataattaaacattttagaactattaacaggtaaagtactgaaatgggtacaacttaaggaaaacaagaatgttgtcttctaactctgacattataccttgtttgtacccgccagcgggaacttcattgcaggccgtgtgtcaccctgaccacgtctatctctgggggtcgcacgttgcgggcagagcgcaaggcatacaccagaaaacgctgtcctgtggtatggtctcttccaacttcatgtaccagcgtaaagattaaagtggaaaacttcagactttggcttcatttttaatctttttggagattaagtgtctaaacttaacttaaatggttttttacaggagttaaagtacataaatgcctttttacagcttaatcattttggtcttctgtttagtgttgtatttcaattgtggagcctcattttaagtgttcattcttttaagatttaatgcttgctttttctttttatagctaatagtgaaatctacaaaccaaaacaagaacttttaaatctgggatataaattaaagatcatatgcacagatcaatttatgttcttgtaataaacttattagaaattggtgtttgtgatagcattttacttgggttactagagatgcttctagtagaccttaatctagcatagttgaacctctgaatatgggaaggttgtattcccagattctttcctgaatagatttgaatttaatgtcatttgggaactccagggtgagtttattgactacccaaactgtattttaccaataaatatgcatatgatctttaattattgaagaaaataaagtgaggacttaaaacaattcatgaaagtggacctttaaaagcttgtcagagttgcacaaatctaactggtattttgtttttgtttttaggaggagatgttaaagtaacccatcttgcaggacgacattgaagattggtcttctgttgatctaagatgattattttgtaaaagactttctagtgtacaagacaccattgtgtccaactgtatatagctgccaattagttttctttgtttttactttgtcctttgctatctgtgttatgactcaatgtggatttgtttatacacattttatttgtatcatttcatgttaaacctcaaataaatgcttccttatgtgattgcttttctgcgtcaggtactacatagctctgtaaaaaatgtaatttaaaataagcaataattaaggcacagttgattttgtagagtattggtccatacagagaaactgtggtcctttataaatagccagccagcgtcaccctcttctccaatttgtaggtgtattttatactcttaaggcttcatcttctccctgtaactgagatttctaccacacctttgaacaatgttctttcccttctggttatctgaagactgtcctgaaaggaagacataagtgttgtgattagtagaagctttctagtagaccatatttcttctggattgtaataaaattgttagtagctccttttactttgttcctgtctctggaaagccatttttgaattgctgattactttggctttaatcagtggtcacctagaaaaagctttgtaatcataacacaatgagtaattcttgataaaagttcagatacaaaaggagcactgtaaaactggtaggagctatggtttaagagcattggaagtagttacaactcaaggattttggtagaaaggtatgagtttggtcgaaaaattaaaatagtggcaaaataagatttagttgtgttttctcagagccgccacaagattgaacaaaatgttttctgtttgggcatcctgaggaagttgtattagctgttaatgctctgtgagtttagaaaagtcttgatagtaaatctagtttttga

SEQ ID NO: 184595 - DNA, 1923 bp, Homo Sapiens
ttggtttaaatccagctccatacaacgctccgccgccgctgctgccgcgacccggactgcgcgccagcacccccctgccgacagctccgtcactatggaggatatgaacgagtacagcaatatagaggaattcgcagagggatccaagatcaacgcgagcaagaatcagcaggatgacggtaaaatgtttattggaggcttgagctgggatacaagcaaaaaagatctgacagagtacttgtctcgatttggggaagttgtagactgcacaattaaaacagatccagtcactgggagatcaagaggatttggatttgtgcttttcaaagatgctgctagtgttgataaggttttggaactgaaagaacacaaactggatggcaaattgatagatcccaaaagggccaaagctttaaaagggaaagaacctcccaaaaaggtttttgtgggtggattgagcccggatacttctgaagaacaaattaaagaatattttggagcctttggagagattgaaaatattgaacttcccatggatacaaaaacaaatgaaagaagaggattttgttttatcacatatactgatgaagagccagtaaaaaaattgttagaaagcagataccatcaaattggttctgggaagtgtgaaatcaaagttgcacaacccaaagaggtatataggcagcaacagcaacaacaaaaaggtggaagaggtgctgcagctggtggacgaggtggtacgaggggtcgtggccgacgtcagggccaaaactggaaccaaggatttaataactattatgatcaaggatatggaaattacaatagtgcctatggtggtgatcaaaactatagtggctatggcggatatgattatactgggtataactatgggaactatggatatggacagggatatgcagactacagtggtaagaatatttaacttaattttataaagcagtggtattaaaattcattgttaacatacaatcctgttctgaaattgtgtgtatgggctttccattaaagtgttcggagttaagtgtttgaggcatgttacaatcataggatgattatactaacatagactggtggttataaatgaactaggatgtatgatttatgagtagcatctaatgggtgctaaaatatcttaatactttttatttagcatgcaaagatttgtagatttaatagtttgtgtttgtaaagaaagttttgtagaaaactatcttaatgagaattctgtgttttcaaaataggccaacagagcacttatggcaaggcatctcgagggggtggcaatcaccaaaacaattaccagccatactaaaggagaacattggagaaaacaggtgtgtataagagtacaggaaaacagtagaaatgtctaatttaatttaaagatcaatagacaaatgaaacgtaaaaacaaaatactatgtagcctgtttttactaaattgttgattttttaattgctttatgagcctgttttgcctaaagtgtctatagatctttaactttaaagtcttatctcactttctttagtattgcagaaaaacttaagagtttttctgtttgcttttgtgtaccaggtggtctagaggaataattaaacattttagaactattaacaggtaaagtactgaaatgggtacaacttaaggaaaacaagaatgttgtcttctaactctgacattataccttgtttgtacccgccagcgggaacttcattgcagccgtgtgtcaccctgaccacgtctatctctgggggtcgcacgttgcgggcagagcgcaaggcatacaccagaaaacgctgtcctgtggtatggtctcttccaacttcatgtaccagcgtaaagattaaagtggaaaacttcagactttggcttcatttttaatcttttggagattaagtgtc

SEQ ID NO: 184596 - DNA, 1538 bp, Homo Sapiens
  misc_feature (152)..(195): n is a, c, g, or t
ttggcgcggagcgtgcgaggaagagcgggcgcgcggcagcggcggggattactttgctgctagtttcggttcgcggcagcggcgggtgtagtctcggcggcagcggcggagacactagcactatgtcggaggagcagttcggcggggacggnnnnnnnnnnnnnnnnnnnnnnnnnnnnnnnnnnnnnnnnnnnnagcaggagggagccatggtggcggcgacacagggggcagcggcggcggcgggaagcggagccgggaccgggggcggaaccgcgtctggaggcaccgaagggggcagcgccgagtcggagggggcgaagattgacgccagtaagaacgaggaggatgaaggccattcaaactcctccccacgacactctgaagcagcgacggcacagcgggaagaatggaaaatgtttataggaggccttagctgggacactacaaagaaagatctgaaggactacttttccaaatttggtgaagttgtagactgcactctgaagttagatcctatcacagggcgatcaaggggttttggctttgtgctatttaaagaatcggagagtgtagataaggtcatggatcaaaaagaacataaattgaatgggaaggtgattgatcctaaaagggccaaagccatgaaaacaaaagagccggttaaaaaaatttttgttggtggcctttctccagatacacctgaagagaaaataagggagtactttggtggttttggtgaggtggaatccatagagctccccatggacaacaagaccaataagaggcgtgggttctgctttattacctttaaggaagaagaaccagtgaagaagataatggaaaagaaataccacaatgttggtcttagtaaatgtgaaataaaagtagccatgtcgaaggaacaatatcagcaacagcaacagtggggatctagaggaggatttgcaggaagagctcgtggaagaggtggtggccccagtcaaaactggaaccagggatatagtaactattggaatcaaggctatggcaactatggatataacagccaaggttacggtggttatggaggatatgactacactggttacaacaactactatggatatggtgattatagcaaccagcagagtggttatgggaaggtatccaggcgaggtggtcatcaaaatagctacaaaccatactaaattattccatttgcaacttatccccaacaggtggtgaagcagtattttccaatttgaagattcatttgaaggtggctcctgccacctgctaatagcagttcaaactaaattttttgtatcaagtccctgaatggaagtatgacgttgggtccctctgaagtttaattctgagttctcattaaaagaaatttgctttcattgttttatttcttaattgctatgcttcagaatcaatttgtgttttatgccctttcccccagtattgtagagcagtcttgtgttaaagcccatggtgacagtgtcatgatgtagtagtgtcttactggttttttaataaatccttttgta

SEQ ID NO: 184597 - DNA, 923 bp, Homo Sapiens
ttgggagactcctgcgtcctccgacttttcatggaagagatgtcaggagaaagtgtggtgagctcagcggtgccagcggctgctacccgcaccacttccttcaagggcacgagccccagctccaaatacgtgaagctgaatgtgggtggagccctctactataccaccatgcagacgctgaccaagcaggacaccatgctgaaggccatgttcagcgggcgcatggaagtgctcaccgacagtgaaggctggatcctcattgaccgctgtgggaagcactttggtacgatactcaactaccttcgagacggggcggtgcctttacccgagagccgccgggagatcgaggagctgctagcagaagccaagtactacctagtccaaggcctggtggaagagtgccaggcggccctacaaaacaaagatacttatgagcctttctgcaaggtccctgtgatcacctcatccaaggaagaacaaaaacttatagcgacttcaaataagccagccgtgaagttgctctacaacagaagtaacaacaaatactcatataccagcaattctgacgacaatatgttgaaaaacattgaactgtttgataagctgtctctgcgctttaacggaagggtcctgttcataaaggatgttattggggatgaaatctgctgctggtccttttatggtcagggccggaagattgctgaagtctgttgtacctccatcgtctatgccactgagaagaaacagaccaaggtggagtttcccgaagcccggatttatgaggagaccctgaacattttgctgtatgaggcccaggatggccggggacctgacaatgcgctcctggaggccacagcggggcggcggggcgctctcaccacctggacgaggacgaggagcgggagcggatcgagcgcgtgcgg

SEQ ID NO: 184598 - DNA, 1881 bp, Homo Sapiens
ttggggcgcatgcctggcccccgccggcctgcagtctagccgtagtgcgcctgcgcgcggctaggaggggccgtcaggcggggatacagcctggaaggtaatgcatgtccatggtacacaaattcacaaggctggagcgaccgtgtctggggagccgagccccgcttctcgctgcggtgagcccggactggggcacgcactgcgcagactccccgctgcagtgggcggagctcccacaggccccgccccctcctcccaccctcgttcagcctgtccagacagaagctggggcccagcggaggtagcagcagacgcctgagagcgaggccgaggcccctcagggtttggagaccctgacacacccaccttctcacctgggctctgcgtatcccccagccttgagggaagatgaagcctaaactgatgtaccaggagctgaaggtgcctgcagaggagcccgccaatgagctgcccatgaatgagattgaggcgtggaaggctgcggaaaagaaagcccgctgggtcctgctggtcctcattctggcggttgtgggcttcggagccctgatgactcagctgtttctatgggaatacggcgacttgcatctctttgggcccaaccagcgcccagccccctgctatgacccttgcgaagcagtgctggtggaaagcattcctgagggcctggacttccccaatgcctccacggggaacccttccaccagccaggcctggctgggcctgctcgccggtgcgcacagcagcctggacatcgcctccttctactggaccctcaccaacaatgacacccacacgcaggagccctctgcccagcagggtgaggaggtcctccggcagctgcagaccctggcaccaaagggcgtgaacgtccgcatcgctgtgagcaagcccagcgggccccagccacaggcggacctgcaggctctgctgcagagcggtgcccaggtccgcatggtggacatgcagaagctgacccatggcgtcctgcataccaagttctgggtggtggaccagacccacttctacctgggcagtgccaacatggactggcgttcactgacccaggtcaaggagctgggcgtggtcatgtacaactgcagctgcctggctcgagacctgaccaagatctttgaggcctactggttcctgggccaggcaggcagctccatcccatcaacttggccccggttctatgacacccgctacaaccaagagacaccaatggagatctgcctcaatggaacccctgctctggcctacctggcgagtgcgcccccacccctgtgtccaagtggccgcactccagacctgaaggctctactcaacgtggtggacaatgcccggagtttcatctacgtcgctgtcatgaactacctgcccactctggagttctcccaccctcacaggttctggcctgccattgacgatgggctgcggcgggccacctacgagcgtggcgtcaaggtgcgcctgctcatcagctgctggggacactcggagccatccatgcgggccttcctgctctctctggctgccctgcgtgacaaccatacccactctgacatccaggtgaaactctttgtggtccccgcggatgaggcccaggctcgaatcccatatgcccgtgtcaaccacaacaagtacatggtgactgaacgcgccacctacatcggaacctccaactggtctggcaactacttcacggagacggcgggcacctcgctgctggtgacgcagaatgggaagggcggcctgcggagccagctggaggccattttcctgaaggactgggactccccttacagccatgaccttgacacctcagctgacagcgtgggcaacgcctgccgcctgctctga

SEQ ID NO: 184599 - DNA, 2284 bp, Homo Sapiens
ttggggactccgggcggagggcagccaatccgtttcagcgcaggtcttgctcgggttgggcttgccactgcctggaacatacctgtccccctggcgcaacactcagctggctgcgacggcaaccccgagcctggacactgcgccaggaatcctaaaaccaaaatattagaacgaaaacagaaacatggctcactatattacatttctctgcatggttttggtgctgcttcttcagaattctgtgttagctgaagatggggaagtaagatcaagttgtcgtactgctccgacagatttagttttcatcttagatggctcttatagtgttggcccagaaaactttgaaatagtgaaaaagtggcttgtcaatatcacaaaaaactttgacatagggccgaagtttattcaagttggagtggttcaatatagtgactaccctgtgctggagattcctctcggaagctatgattcaggagaacatttgacggcagcagtggaatccatactctacttaggaggaaacacaaagacagggaaggccatccagtttgcgctcgattacctttttgccaagtcctcacgatttctgactaagatagcagtggtacttacggatggcaaatcccaagatgacgtcaaggatgcagctcaagcagcaagagatagtaagataacattatttgctattgggttggttcagaaacagaagatgccgaacttagagctattgccaacaagccttcgtctacttatgtgttttatgtggaagactatattgcaatatccaaaataagggaagtgatgaagcagaaactttgtgaagaatctgtctgtccaacacgaattccagtggcagctcgtgatgaaaggggatttgatattcttttaggtttagatgtaaataaaaaggttaagaaaagaatacagctttcaccaaaaaagataaaaggatatgaagtaacatcaaaagttgatttatcagaactcacaagcaatgttttcccagaaggtcttcctccatcatatgtatttgtgtctactcaaagatttaaagtcaagaaaatttgggatttatggagaatattaactattgatggaaggccacaaatagcagttaccttaaatggtgtggacaaaatcttattatttacaacaaccagcgtaattaatggctcacaagtggttacctttgctaaccctcaagttaagacgttgtttgatgaaggctggcaccaaattcgtctcttagtaacagaacaagatgtgactttgtatattgatgaccaacaaattgaaaacaagcccttacatccagttttagggatcttgatcaatgggcaaacccaaattggaaaatattctggaaaagaagaaactgttcagtttgatgtccaaaagttgcgaatctactgtgacccagaacagaacaaccgggagacagcatgtgagattcctggatttaatggagagtgccttaatggtcccagtgatgtaggttcaactccagctccctgtatttgtcctccgggaaaaccaggacttcaaggccccaaaggtgaccctggactgcctgggaaccctggctaccctggacaacctggtcaagatggtaagcctggatatcagggaattgcagggacaccaggtgttccaggatctccaggaatacaaggagctcgaggactaccaggttacaaaggagaaccagggcgagatggtgacaagggtgatcgtggacttcctggttttcctgggcttcatggcatgccaggatcaaagggtgaaatgggtgccaaaggagacaaaggatcacctggattttatggcaaaaagggtgcaaaaggtgaaaaggggaatgctggcttccctggcctccctggacctgctggagaaccaggaagacatggaaaggatggattaatgggtagtcccggtttcaagggagaagcaggatcccctggtgctccggggcaggatggaacacggggagagcctggaatcccaggatttcctggaaaccgaggattaatgggccaaaagggagaaattgggcctccaggacagcaaggaaaaaaaggagccccagggatgcctggtttaatgggaagcaatggctcaccaggccagcctggaacaccgggatctaaggaagcaaaagtgaacctggaattcaagggatgcctggggcttctgggctcaaggagaacaggagcaacgggttccccaggagaaccagatacatgggtttacccgggattcaagaaaaaaggggacaaagaaatca

SEQ ID NO: 184600 - DNA, 986 bp, Homo Sapiens
cagcctgctgtgccttttctacagaagttaaggcccccttttacccatcagtccactcctgtaatggaatttgtttttactgcattccgccttactgttgtattttcttggatcatcagctgagatatggggagcctacactccggagggctgtacctttagcactggccctcatctctgtttcaaatccacgactcaacatcctggataccctaagcaaattctctcatgatgctgatccagaagtttcctataactccattttttccatgggcatggtgggcagtggtgagtatccggcagaagaaggtcataaacagattgggggaagatttgaagccccttttttcacttctgtaatgcttaacatttccaggtaccaataatgcccgtctggctgcaatgctgcgccagttagctcaatatcatgccaaggacccaaacaacctcttcatggtgcgcttggcacaggtaaagaatagaactcctccacagagcgtgccggggaagtatctgtggtgatggaaggaggaacatggagtgttggcccaggaggaaagatgtgaccaagtgggagatttctgtttggctgggttaggcgatgtctcctcagtggtaactcctcacctctacttccctctgtttttttcagggcctgacacatttagggaagggcacccttaccctctgcccctaccacagcgaccggcagcttatgagccaggtggccgtggctggactgctcactgtgcttgtctctttcctggatgttcgaaacattattctaggcaaatcacactatgtattgtatgggctggtggctgccatgcagccccgaatgctggttacgtttgatgaggagctgcggccattgccagtgtctgtccgtgtgggccaggcagtggatgtggtgggccaggctggcaagccgaagactatcacagggttccagacgcatacaacctcagtgttgttggcccacgggg

SEQ ID NO: 184601 - DNA, 2104 bp, Homo Sapiens
  misc_feature (1880)..(1932): n is a, c, g, or t
ttggttgagatggaggagggaggccgggacaaggcgccggtgcagccccagcagtctccagcggcggcccccggcggcacggacgagaagccgagcggcaaggagcggcgggatgccggggacaaggacaaagaacaggagctgtctgaagaggataaacagcttcaagatgaactggagatgctcgtggaacgactaggggagaaggatacatccctgtatcgaccagcgctggaggaattgcgaaggcagattcgttcttctacaacttccatgacttcagtgcccaagcctctcaaatttctgcgtccacactatggcaaactgaaggaaatctatgagaacatggcccctggggagaataagcgttttgctgctgacatcatctccgttttggccatgaccatgagtggggagcgtgagtgcctcaagtatcggctagtgggctcccaggaggaattggcatcatggggtcatgagtatgtcaggcatctggcaggagaagtggctaaggagtggcaggagctggatgacgcagagaaggtccagcgggagcctctgctcactctggtgaaggaaatcgtcccctataacatggcccacaatgcagagcatgaggcttgcgacctgcttatggaaattgagcaggtggacatgctggagaaggacattgatgaaaatgcatatgcaaaggtctgcctttatctcaccagttgtgtgaattacgtgcctgagcctgagaactcagccctactgcgttgtgccctgggtgtgttccgaaagtttagccgcttccctgaagctctgagattggcattgatgctcaatgacatggagttggtagaagacatcttcacctcctgcaaggatgtggtagtacagaaacagatggcattcatgctaggccggcatggggtgttcctggagctgagtgaagatgtcgaggagtatgaggacctgacagagatcatgtccaatgtacagctcaacagcaacttcttggccttagctcgggagctggacatcatggagcccaaggtgcctgatgacatctacaaaacccacctagagaacaacaggtttgggggcagtggctctcaggtggactctgcccgcatgaacctggcctcctcttttgtgaatggctttgtgaatgcagcttttggccaagacaagctgctaacagatgatggcaacaaatggctttacaagaacaaggaccacggaatgttgagtgcagctgcatctcttgggatgattctgctgtgggatgtggatggtggcctcacccagattgacaagtacctgtactcctctgaggactacattaagtcaggagctcttcttgcctgtggcatagtgaactctggggtccggaatgagtgtgaccctgctctggcactgctctcagactatgttctccacaacagcaacaccatgagacttggttccatctttgggctaggcttggcttatgctggctcaaatcgtgaagatgtcctaacactgctgctgcctgtgatgggagattcaaagtccagcatggaggtggcaggtgtcacagctttagcctgtggaatgatagcagtagggtcctgcaatggagatgtaacttccactatccttcagaccatcatggagaagtcagagactgagctcaaggatacttatgctcgttggcttcctcttggactgggtctcaaccacctggggaagggtgaggccatcgaggcaatcctggctgcactggaggttgtgtcagagccattccgcagttttgccaacacactggtggatgtgtgtgcatatgcaggctctgggaatgtgctgaaggtgcagcagctgctccacatttgtagcgaacactttgactccaaagnnnnnnnnnnnnnnnnnnnnnnnnnnnnnnnnnnnnnnnnnnnnnnnnnnnnnctcctgctgacatgggagcacatcaggagtggctgttctggggattgctcttattgctatgggggaggagatggtgcagagatggcattacgaacctttggccacttgctgagatatggggagcctacactccggagggctgtacctttagcactggccctcatctctgttt

SEQ ID NO: 184602 - DNA, 586 bp, Homo Sapiens
ttgtctcctattccctctgcaggaggccatgatggatttcttcaacgcccagatgcgcctgggggggctgacccaggcccctggcaacccagtgttggctgtgcagattaaccaggacaagaattttgcctttttggagttccgctcagtggacgagactacccaggctatggcctttgatggcatcatcttccagggccagtcactaaagatccgcaggcctcacgactaccagccgcttcctggcatgtcagagaacccctccgtctatgtgcctggggttgtgtccactgtggtccccgactctgcccacaagctgttcatcgggggcttacccaactacctgaacgatgaccaggtcaaagagctgctgacatcctttgggcccctcaaggccttcaacctggtcaaggacagtgccacggggctctccaagggctacgccttctgtgagtacgtggacatcaacgtcacggatcacgtgagtccccggtcgctggccgctgccgcgtctgtcctttcctgccctgcgctgttgccaaagccatggtcacctctcctcaggggacggggcgggagggggcca

SEQ ID NO: 184603 - DNA, 1820 bp, Homo Sapiens
  misc_feature (800)..(830): n is a, c, g, or t
  misc_feature (1306)..(1341): n is a, c, g, or t
gccaactttgtacaaaaaagttggagaagcaagtgacccccagccagaagaagcagatggaggtctgaagtcttggagagaatcctgtgacagtgctttaagagcctatgtgaaagaccattattccaacggcttctgtactgtttatgctaaaactatcgatgggcaacagactattattgcatgtattgaaagccaccagtttcagcctaaaaacttctggaatggtcgttggagatcagagtggaagttcaccatcacaccacctacagcccaggtggttggcgtgcttaagattcaggttcactattatgaagatggcaatgttcagttggttagtcataaagatgtacaggattcactaactgtttcgaatgaagcccaaactgccaaggagtttattaaaatcatagagaatgcagaaaatgagtatcagacagcaattagtgaaaactatcaaacaatgtcagataccacattcaaggccttgcgccggcagcttccagttacccgcaccaaaatcgactggaacaagatactcagctacaagattggcaaagaaatgcagaatgcttaaaggctgaatgtaggattcttcagtatgtggaaagacaaggattcaacgtgtggtcatatgataaataagtgatttataaacaagagtgatattttgctagggctttcaaagttaaccggttttctagcctcatggaatactgttgaacctatagcgttgtcttgattcttttgtgttctctgccttgtaattttctgttactgctatatctacgtgtaaatcnnnnnnnnnnnnnnnnnnnnnnnnnnnnnnnggttaattctgccacatttaatgttggtgaaaaagtgatctatcctaatgacattttactgtttaaaaaagtttcctagccatgaagccctgctactgatttagacaaggtattatggtcattactttgtacccctatccttccaagcacttctggtacttcagtcgtttttactgatccaccaacacctaaagaggctatgctacagtctctagctaaatggaagacacattcatccttctccctctgactgctttgatcatcatttattgcatctcataactaattttctaaagtttggattgggacttttcaggtcctttttggagggcaaaggaagtgccagcttctctggggaacttgtttttaaatccaaagacttgaaccacattccctgcacatgaacatgtttgcttttatcccttctctcattgtctccttcccatcttagtaccattgtagttataaacatctgnnnnnnnnnnnnnnnnnnnnnnnnnnnnnnnnnnnnaacattcaagaactgctgacgtactgtggatgtagagtataaaacttgaaaaatgcagatgttgaaggaataataggtatcttgtgctttaatactttatggcaggattgtactataagcaaatgaattaaacagctatgtaaatcataaagaaaaactaaaaatgaaccaaagtgaaaggataacttccaggcagtatctttctattgtaacctgttatttaaggaaatactagtgatttcttctaaataggatgtaaaacttctttcaaattactcttcctcagtcctgcctgccaagaactcaagtgtaactgtgataaaataacctttcccaggtatattggcaggtatgtgtgtaatctcaaatacacaggtgacatatatatgatatgacactggtaatggtggaattcatttacatttgtttaccacttctatgaccagcctttaacgggaaaggtcaattttttaaaaaaa

SEQ ID NO: 184604 - DNA, 1134 bp, Homo Sapiens
ttggcaagattaaagtcaagagaagccttgaggatgagccaaggttggtgctttgggcccttctagtttacaatgctaccaacaatactaatttagaaggaaaaatcattcagcagaagctcctaaaaaataatgagtccttggatgaaggcttgaggctacatacagtgaatgtgagacaactgggtcattgtcttgccatggaggaacccaaaggctactactggccatctatccaaccttctgaatacgttcttccttgtccagacaagcctggcttttctgcttctcggatatgtttttacaatgctaccaacccattggtaacctactggggacctgttgatatctccaactgtttaaaagaagcaaatgaagttgctaaccagattttaaatttaactgctgatgggcagaacttaacctcagccaatattaccaacattgtggaacaggtcaaaagaattgtgaataaagaagaaaacattgatataacacttggctcaactctaatgaatatattttctaatatcttaagcagttcagacagtgacttgcttgagtcatcttctgaagctttaaaaacaattgatgaattggccttcaagatagacctaaatagcacatcacatgtgaatattacaactcggaacttggctctcagcgtatcatccctgttaccagggacaaatgcaatttcaaattttagcattggtcttccaagcaataatgaatcgtatttccagatggattttgagagtggacaagtggatccactggcatctgtaattttgcctccaaacttacttgagaatttaagtccagaagattctgtattagttagaagagcacagtttactttcttcaacaaaactggacttttccaggatgtaggaccccaaagaaaaactttagtgagttatgtgatggcgtgcagtattggaaacattactatccagaatctgaaggatcctgttcaaataaaaatcaaacatacaagaactcacgaagtgcatcatcccatctgtgccttctgggatctgaacaaaaacaaaagttttggaggatggaacacgtcacgatgtgttgcacacagagattcagatgcaagtgagacagtctgcctgtgtaacc

SEQ ID NO: 184605 - DNA, 2190 bp, Homo Sapiens
  misc_feature (152)..(200): n is a, c, g, or t
ttggaagaaggagagtatgaggcgagctccggcccgggtgcggccgggcttcgggggcccaggcgccgctgctgccaccgccatctaacgctgcgccctggaggcccggcgcgcggatggtgccggtgcggctcgggtgttgaaacgggtgnnnnnnnnnnnnnnnnnnnnnnnnnnnnnnnnnnnnnnnnnnnnnnnnnggctcaggcagagccatgtctcggggtggctcctacccacacctgttgtgggacgtgaggaaaaggtccctcgggctggaggacccgtcccggctgcggagtcgctacctgggaagaagagaatttatccaaagattaaaacttgaagcaacccttaatgtgcatgatggttgtgttaatacaatctgttggaatgacactggagaatatattttatctggctcagatgacaccaaattagtaattagtaatccttacagcagaaaggttttgacaacaattcgttcagggcaccgagcaaacatatttagtgcaaagttcttaccttgtacaaatgataaacagattgtatcctgctctggagatggagtaatattttataccaacgttgagcaagatgcagaaaccaacagacaatgccaatttacgtgtcattatggaactacttatgagattatgactgtacccaatgacccttacacttttctctcttgtggtgaagatggaactgttaggtggtttgatacacgcatcaaaactagctgcacaaaagaagattgtaaagatgatattttaattaactgtcgacgtgctgccacgtctgttgctatttgcccaccaataccatattaccttgctgttggttgttctgacagctcagtacgaatatatgatcggcgaatgctgggcacaagagctacagggaattatgcaggtcgagggactactggaatggttgcccgttttattccttcccatcttaataataagtcctgcagagtgacatctctgtgttacagtgaagatggtcaagagattctcgttagttactcttcagattacatatatctttttgacccgaaagatgatacagcacgagaacttaaaactccttctgcggaagagagaagagaagagttgcgacaaccaccagttaagcgtttgagacttcgtggtgattggtcagatactggacccagagcaaggccggagagtgaacgagaacgagatggagagcagagtcccaatgtgtcattgatgcagagaatgtctgatatgttatcaagatggtttgaagaagcaagtgaggttgcacaaagcaatagaggacgaggaagatctcgacccagaggtggaacaagtcaatcagatatttcaactcttcctacggtcccatcaagtcctgatttggaagtgagtgaaactgcaatggaagtagatactccagctgaacaatttcttcagccttctacatcctctacaatgtcagctcaggctcattcgacatcatctcccacagaaagccctcattctactcctttgctatcttctccagacagtgaacaaaggcagtctgttgaggcatctggacaccacacacatcatcagtctgattctccttcttctgtggttaacaaacagctcggatccatgtcacttgacgagcaacaggataacaataatgaaaagctgagccccaaaccagggacaggtgaaccagttttaagtttgcactacagcacagaaggaacaactacaagcacaataaaactgaactttacagatgaatggagcagtatagcatcaagttctagaggaattgggagccattgcaaatctgagggtcaggaggaatctttcgtcccacagagctcagtgcaaccaccagaaggagacagtgaaacaaaagctcctgaagaatcatcagaggatgcgacaaaatatcaggaaggagtatctgcagaaaacccagttgagaaccatatcaatataacacaatcagataagttcacagccaagccattggattccaactcaggagaaagaaatgacctcaatcttgatcgctcttgtggggttccagaagaatctgctttcatctgaaaagccaaggaaccagaaacttcagatcagactagcactgagagtgctaccaatgaaaataacacaatcctgagcctcagttccaaacagaagccactgggccttc

SEQ ID NO: 184606 - DNA, 1471 bp, Homo Sapiens
ccaactttgtacaaaaaagttggcttcagccttctacatcctctacaatgtcagctcaggctcattcgacatcatctcccacagaaagccctcattctactcctttgctatcttctccagacagtgaacaaaggcagtctgttgaggcatctggacaccacacacatcatcagtctgattctccttcttctgtggttaacaaacagctcggatccatgtcacttgacgagcaacaggataacaataatgaaaagctgagccccaaaccagggacaggtgaaccagttttaagtttgcactacagcacagaaggaacaactacaagcacaataaaactgaactttacagatgaatggagcagtatagcatcaagttctagaggaattgggagccattgcaaatctgagggtcaggaggaatctttcgtcccacagagctcagtgcaaccaccagaaggagacagtgaaacaaaagctcctgaagaatcatcagaggatgtgacaaaatatcaggaaggagtatctgcagaaaacccagttgagaaccatatcaatataacacaatcagataagttcacagccaagccattggattccaactcaggagaaagaaatgacctcaatcttgatcgctcttgtggggttccagaagaatctgcttcatctgaaaaagccaaggaaccagaaacttcagatcagactagcactgagagtgctaccaatgaaaataacaccaatcctgagcctcagttccaaacagaagccactgggccttcagctcatgaagaaacatccaccagggactctgctcttcaggacacagatgacagtgatgatgacccagtcctgatcccaggtgcaaggtatcgagcaggacctggtgatagacgctctgctgttgcccgtattcaggagttcttcagacggagaaaagaaaggaaagaaatggaagaattggatactttgaacattagaaggccgctagtaaaaatggtttataaaggccatcgcaactccaggacaatgataaaagaagccaatttctggggtgctaactttgtaatgagtggttctgactgtggccacattttcatctgggatcggcacactgctgagcatttgatgcttctggaagctgataatcatgtggtaaactgcctgcagccacatccgtttgacccaattttagcctcatctggcatagattatgacctaaagatctggtcaccattagaagagtcaatgatttttaaccgaaaacttgctgatgaagttataactccaaacgaactcatgctggaagaaactagaaacaccattacagttccagcctctttcctgttgacgatgttggcttcacttaatcatatccgagctgaccggttggagggtgacagatcagaaggctctggtcaagagaatgaaaatgaggatgaggaataataaactcctttttggcaagcacttaaatg

SEQ ID NO: 184607 - DNA, 2298 bp, Homo Sapiens
ttggttccttatactttaagataaatgacccacttactttggaaatggtatttgcctattttagtatgatgctataaggtttaaagggtcagtatccctaaaatatgacagctgttaagatctctttaattattcagaaatgaatggtatgtgacaagatattattggttaattcagtggatcagatgaataaaatgtgctgaaatattttggagactgaaaatataaatttagatgcaagaaatatattttaaataaacatggaaaacagtttttttatccgagtctaatcacgttgaaatattttatgaatatccccagagagttcgtaaattagtgagtgatttttttaaatgcaaaggtaaatacctagaaatcatatatacacttaaagtaaaatctcacagagttctcaaggccattttgcatttactagtgccacagtagtggcgttacagtgagctgcagtaacctgaaacagtactgcatggatgctctaataaattgcatgtctggaggaagcagctaactatggcgaccgccacggagcagtgggttctggtggagatggtacaggcgctttacgaggctcctgcttaccatcttattttggaagggattctgatcctctggataatcagacttcttttctctaagacttacaaattacaagaacgatctgatcttacagtcaaggaaaaagaagaactgattgaagagtggcaaccagaacctcttgttcctcctgtcccaaaagaccatcctgctctcaactacaacatcgtttcaggccctccaagccacaaaactgtggtgaatggaaaagaatgtataaacttcgcctcatttaattttcttggattgttggataaccctagggttaaggcagcagctttagcatctctaaagaagtatggcgtggggacttgtggacccagaggattttatggcacatttgatgttcatttggatttggaagaccgcctggcaaaatttatgaagacagaagaagccattatatactcatatggatttgccaccatagccagtgctattcctgcttactctaaaagaggggacattgtttttgtagatagagctgcctgctttgctattcagaaaggattacaggcatcccgtagtgacattaagttatttaagcataatgacatggctgacctcgagcgactactaaaagaacaagagatcgaagatcaaaagaatcctcgcaaggctcgtgtaactcggcgtttcattgtagtagaaggattgtatatgaatactggaactatttgtcctcttccagaattggttaagttaaaatacaaatacaaagcaagaatcttcctggaggaaagcctttcatttggagtcctaggagagcatggccgaggagtcactgaacactatggaatcaatattgatgatattgatcttatcagtgccaacatggagaatgcacttgcttctattggaggtttctgctgtggcaggtcttttgtaattgaccatcagcgactttccggccagggatactgcttttcagcttcgttacctcccctgttagctgctgcagcaattgaggccctcaacatcatggaagagaatccaggtatttttgcagtgttgaaggaaaagtgcggacaaattcataaagctttacaaggcatttctggattaaaagtggtgggggagtccctttctccagcctttcacctacaactggaagagagcactgggtctcgcgagcaagatgtcagactgcttcaggaaattgtagatcaatgcatgaacagaagtattgcattaactcaggcgcgctacttggagaaagaagagaagtgtctccctcctcccagcattcgggttgtggtcacggtggaacaaacagaggaagaactggagagagctgcgtccaccatcaaggaggtagcccaggccgtcctgctctaggcagagtcccgggaccatggcctcctgccacacaacacgcagagaggactcaagactcccgctggccatggagtggcctgaaagagagcaagaacatgtggatctttgataggattgttaccaaatggtgtcagtatggaccaattgtgtgaccatgagaaagatgcttattttttttaaaaagaaaacacatctaaaagcccaggaactgatttttttaagaggaaaactaatgacagtgtataactgatgtttaaattgtgcatttagtactatttaaatgttttcttatactagtattttatattcttttgttgtcgtttaaaactggagcttcagtgtctc

SEQ ID NO: 184608 - DNA, 2599 bp, Homo Sapiens
ttggcccaagcaggggatattgctgcagaaaaactagtccccaagccacctccagcaaagccttctaggccccggccgaagagtcgaatttctcggtacaggaccagttcagcccaaagactaaagcgtcagaagcaggccaatgcacagcaggcagaattgtcacaagctgccttggaagagggaggaagtaacagtttagtaactcctactgaagctggaagtctagacagttcaggagaaaacaggccattaacagggtctgacccaactgtggtgtcaattactggatcccatgtcaaccgtgctgcatctaaataccccaaaaccaaaaagtatctagttacagaatggttgaatgacaaagcagagaagcaagagtgccctgttgagtgccctttacgtatcacaacggatccaactgtactggcaacgaccctaaacatgttaccaggtcttatccattccccgttaatttgcaccacccccaaacactacattcgctttggctcaccctttatccctgagagacgtcgaaggccccttctgcctgatggcacattcagctcctgtaagaagcgctggataaaacaagccttagaagaagggatgactcaaacatcatctgtaccccaagagactagaactcagcacctataccaaagcaatgagaatagtagctcttctagtatctgcaaagacaatgcagacttgttgagcccattaaagaaatggaagtctcgctatctgatggagcagaatgtcaccaagttacttcggcctctgtctccagtcacaccaccccctcccaattcaggctcaaagagtccccagctggccacacctggctcatctcacccaggagaagaggagtgtcgaaatggatacagcctcatgttttcaccagtcacatctcttactactgctagtcgctgcaacactcctctacagtttgagctttgtcaccgaaaagacctggatttggcaaaagtaggataccttgactccaacactaacagctgtgctgatagaccttccctactcaactcaggtcattctgacctggctcctcatccctccctcggacccacttctgagactggtttcccaagcagaagtggagatggacatcagaccctcgtgagaaactcagaccaggcatttcggacagagttcaacttgatgtatgcctactcccctttgaatgctatgcctcgagcagatggactgtatcgaggatctcctctagtgggggataggaagcctttacatttggatgggggatattgttcccctgcagaaggattttccagcagatatgaacatggcttaatgaaagacctctctcgtggatccttgtcacctggtggtgaaagggcctgtgaaggagtcccatctgccccccagaacccaccacagaggaaaaaagtatccctgctggagtaccgaaacggaaacaagaagctaaggaaaattctgctggtgggggaggtgactctgcacagagcaaaagcaagtctgcaggagctgggcaaggcagcagtaactccgtttccgacactggtgcccatggtgtgcagggatcctcagcccgaactccatcttcccctcacaaaaaattctccccatctcattcctctatgtcccatttggaggcggtaagcccatcagattccagaggcacttcttcatctcactgcagacctcaagagaatatcagcagtagtggatggttcccacatcagtagaacgactccgagaaggagggagcatccccaaggtcctccgaagcagcgtgagggtggcccaaaagggagagccctctcccacatgggagagtaacatcacagagaaagactcagaccctgcagatggagaaggcccagagacattaagctcagcactctctaaaggagcaacagtttacagcccttccagatacagctaccagctcctgcagtgtgatagtcctcggacagaatcacaaagcctccttcagcagagttcctcccccttcagaggacatcctacacagtctccaggatacagttatcgaactactgcactgagacctggaaaccccccctctcacggttcttcagaatcatccctctcttccacgtcctattccagccccgcccaccctgtgtccacagactcgttggccccatttacggggacaccagggtattttagcagccagccacattctggaaacagcactggcagcaatcttccaaggaggagctgcccttctagtgctgctagccctaccctgcagggaccctcagactcgccaacctcagattcagtttctcagtccagcacaggaactctgagttccacctcctttcctcagaactctaggtcgtcattgccatcagacttacggactatcagtctgcccagtgctgggcagtcagctgtctaccaggcctccagggtatctgcggtttccaattcacagcactacccacaccgtgggagtgggggtgtgcaccagtaccgactccagccactgcaagggtcagagtcaagactcagacgggactttcctagggcttctggatttgggcaaacagaactgaatgagcccata

SEQ ID NO: 184609 - DNA, 2051 bp, Homo Sapiens
  misc_feature (1728)..(1767): n is a, c, g, or t
ttggatttcctccgaggctggcgatcggcggagctcccacctccgcttacagctcgctgccgccgtcctgccccgcgcccccaggagacctggaccagaccacgatgtggaaacgctggctcgcgctcgcgctcgcgctggtggcggtcgcctgggtccgcgccgaggaagagctaaggagcaaatccaagatctgtgccaatgtgttttgtggagccggccgggaatgtgcagtcacagagaaaggggaacccacctgtctctgcattgagcaatgcaaacctcacaagaggcctgtgtgtggcagtaatggcaagacctacctcaaccactgtgaactgcatcgagatgcctgcctcactggatccaaaatccaggttgattacgatggacactgcaaagagaagaaatccgtaagtccatctgccagcccagttgtttgctatcagtccaaccgtgatgagctccgacgtcgcatcatccagtggctggaagctgagatcattccagatggctggttctctaaaggcagcaactacagtgaaatcctagacaagtattttaagaactttgataatggtgattctcgcctggactccagtgaattcctgaagtttgtggaacagaatgaaactgccatcaatattacaacgtatccagaccaggagaacaacaagttgcttaggggactctgtgttgatgctctcattgaactgtctgatgaaaatgctgattggaaactcagcttccaagagtttctcaagtgcctcaacccatctttcaaccctcctgagaagaagtgtgccctggaggatgaaacgtatgcagatggagctgagaccgaggtggactgtaaccgctgtgtctgtgcctgtggaaattgggtctgtacagccatgacctgtgacggaaagaatcagaagggggcccagacccagacagaggaggagatgaccagatatgtccaggagctccaaaagcatcaggaaacagctgaaaagaccaagagagtgagcaccaaagagatctaatgaggaggcacagaccagtgtctggatcccagcatcttctccacttcagcgctgagttcagtatacacaagtgtctgctacagtcgccaaatcaccagtatttgcttatatagcaatgagttttattttgtttatttgttttgcaataaaggatatgaaggtggctggctaggaagggaagggccacagccttcatttctaggagtgctttaagagaaactgtaaatggtgctctggggctggaggctagtaaggaaactgcatcacgattgaaagaggaacagacccaaatctgaacctcttttgagtttactgcatctgtcagcaggctgcagggagtgcacacgatgccagagagaacttagcagggtgtccccggaggagaggtttgggaagctccacggagaggaacgctctctgcttccagcctctttccattgccgtcagcatgacagacctccagcatccacgcatctcttggtcccaataactgcctctagatacatagccatcctgctagttaacccagtgtccctcagacttggatggagtttctgggagggtacacccaaatgatgcagatacttgtatactttgagccccttagcgacctaaccaaattttaaaaatactttttaccaaaggtgctatttctctgtaaaacacttttttttggcaagttgactttattcttcannnnnnnnnnnnnnnnnnnnnnnnnnnnnnnnnnnnnnnncttgactaggtattaagcttttgtaattatttttcagtagtcccaccacttcataggtggaaggagtttggggttcttcctggtgcaggggctgaaataacccagatgctcccaccctgccacatactagatgcagcccatagttggctcccctagcttccagcagtccactatctgccagaggagcaagggtgccttagacctaagccaggggaagaagcatcttcataaaaaactttcaagatccaaacattaatttgtttttatttattctgagaagttga

SEQ ID NO: 184610 - DNA, 1197 bp, Homo Sapiens
  misc_feature (147)..(198): n is a, c, g, or t
aactatgggctgcatctagtatgtggcagggtggggggcatctgggttatttcagccgtgcaccaggaagaaccccaaactccttcccactgatgaagtggtgggactactgaaaaataattacaaaagcttaatacgtagtcaagnnnnnnnnnnnnnnnnnnnnnnnnnnnnnnnnnnnnnnnnnnnnnnnnnnnntcaacttgccaaaaaaaagtgttttacagagaaatagcacctttggtaaaaagtatttttaaaatttggttaggtcgctaaggggctcaaagtatacaagtatctgcatcatttgggtgtaccctcccagaaactccatccaagtctgagggacactgggttaactagcagtatggctatgtatctagaggcagttattgggaccaagagatgcgtggatgctggaggtctgtcatgctgacggcaatggaaagaggctggaagcagagaacgttcctctccgtggagcttcccaaacctctcctccggggacaccctgctaagttctctctggcatcgtgtgcactccctgcagcctgctgacagatgcagtaaactcaaaagaggttcagatttgggtctgttcctctttcaatcgtgatgcagtttccttactagcctccagccccagagcaccatttacagtttctcttaaagcactcctagaaatgaaggctgtggcccttcccttcctagccagccaccttcatatcctttattgcaaaacaaataaacaaaataaaactcattgctatataagcaaatactggtgatttggcgactgtagcagacacttgtgtatactgaactcagcgctgaagtggagaagatgctgggatccagacactggtctgtgcctcctcattagatctctttggtgctcactctcttggtcttttcagctgtttcctgatgcttttggagctcctggacatatctggtcatctcctcctctgtctgggtctgggcccccttctgattctttccgtcacaggtcatggctgtacagacccaatttccacaggcacagacacagcggttacagtccacctcggtctcagctccatctgcatacgtttcatcctccagggcacactctgttgggccagaaatacggggcaacagtttagctgtgagggtggaagcagggcatctttgccaacttttttgtacaaagtt

SEQ ID NO: 184611 - DNA, 2235 bp, Homo Sapiens
  misc_feature (257)..(296): n is a, c, g, or t
ttggcagcatgacagacctccagcatccacgcatctcttggtcccaataactgcctctagatacatagccatactgctagttaacccagtgtccctcagacttggatggagtttctgggagggtacacccaaatgatgcagatacttgtatactttgagccccttagcgacctaaccaaattttaaaaatactttttaccaaaggtgctatttctctgtaaaacacttttttttggcaagttgactttattcttcannnnnnnnnnnnnnnnnnnnnnnnnnnnnnnnnnnnnnnncttgactaggtattaagcttttgtaattatttttcagtagtcccaccacttcataggtggaaggagtttggggttcttcctggtgcaggggctgaaataacccagatgcccccaccctgccacatactagatgcagcccatagttggcccccctagcttccagcagtccactatctgccagaggagcaagggtgccttagacctaagccaggggaagaagcatcttcataaaaaactttcaagatccaaacattaatttgtttttatttattctgagaagttgaggcaaatcagtattcccaaggatggcgacaagggcagccaagcagggcttaggatatcccagcctaccaatatgctcattcgactaactaggagggtgagttggccctgtctcttcttttttctggacctcagtttcctcagtgagctggtaagaatgcactaaccttttgatttgataagttataaattctgtggttctgatcattggtccagaggggagataggttcctgtgatttttccttcttctctatagaataaatgaaatcttgttactagaacaagaaatgtcagatggccaaaaacaagatgaccagatttgatctcagcctgatgaccctacaggtcgtgctatgatatggagtcctcatgggtaaagcaggaagagagtgggaaagagaaccaccccactctgtcttcatatttgcatttcatgtttaacctccggctggaaatagaaagcattcccttagagatgaggataaaagaaagtttcagattcaacagggggaagaaaatggagatttaatcctaaaactgtgacttggggaggtcagtcatttacagttagtcctgtgtctttcgacttctgtgattattaaccccactcactaccctgtttcagatgcatttggaataccaaagattaaatccttgacataagatctcatttgcagaaagcagattaaagaccatcagaaggaaattatttaggttgtaatgcacaggcaactgtgagaaactgttgtgccaaaaatagaattccttctagtttttcttgttctcatttgaaaggagaaaattccactttgtttagcatttcaagcttttatgtatccatcccatctaaaaactcttcaaactccacttgttcagtctgaaatgcagctccctgtccaagtgccttggagaactcacagcagcacgccttaatcaaaggttttaccagcccttggacactatgggaggagggcaagagtacaccaatttgttaaaagcaagaaaccacagtgtctcttcactagtcatttagaacatggttatcatccaagactactctaccctgcaacattgaactcccaagagcaaatccacattcctcttgagttctgcagcttctgtgtaaatagggcagctgtcgtctatgccgtagaatcacatgatctgaggaccattcatggaagctgctaaatagcctagtctggggagtcttccataaagttttgcatggagcaaacaaacaggattaaactaggtttggttccttcagccctctaaaagcatagggcttagcctgcaggcttccttgggctttctctgtgtgtgtagttttgtaaacactatagcatctgttaagatccagtgtccatggaaaccttcccacatgccgtgactctggactatatcagtttttggaaagcagggttcctctgcctgctaacaagcccacgtggaccagtctgaatgtctttcctttacacctatgtttttaaatagtcaaacttcaagaaacaatctaaacaagtttctgttgcatatgtgtttgtgaacttgtatttgtatttagtaggcttctatattgcatttaacttgtttttgtaactcctgattcttccttttcggatactattgatgaataaagaaattaaagtgata

SEQ ID NO: 184612 - DNA, 1007 bp, Homo Sapiens
acaaaaaagttggattttattttctctgactaggtattaagcttttgtaattatttttcagtagtcccaccacttcataggtggaaggagtttggggttcttcctggtgcaggggctgaaataacccagatgcccccaccctgccacatactagatgcagcccatagttggcccccctagcttccagcagtccactatctgccagaggagcaagggtgccttagaccgaagccaggggaagaagcatcttcataaaaaactttcaagatccaaacattaatttgtttttatttattctgagaagttgaggcaaatcagtattcccaaggatggcgacaagggcagccaagcagggcttaggatatcccagcctaccaatatgctcattcgactaactaggagggtgagttggccctgtctcttcttttttctggacctcagtttcctcagtgagctggtaagaatgcactaaccttttgatttgataagttataaattctgtggttctgatcattggtccagaggggagataggttcctgtgatttttccttcttctctatagaataaatgaaatcttgttactagaacaagaaatgtcagatggccaaaaacaagatgaccagatttgatctcagcctgatgaccctacaggtcgtgctatgatatggagtcctcatgggtaaagcaggaagagagtgggaaagagaaccaccccactctgtcttcatatttgcatttcatgtttaacctccggctggaaatagaaagcattcccttagagatgaggataaaagaaagtttcagattcaacagggggaagaaaatggagatttaatcctaaaactgtgacttggggaggtcagtcatttacagttagtcctgtgtctttcgacttctgtgattattaaccccactcactaccctgtttcagatgcatttggaataccaaagattaaatccttgacataagatctcatttgcagaaagcagattaaagaccatcaga

SEQ ID NO: 184613 - DNA, 1205 bp, Homo Sapiens
  misc_feature (64)..(81): n is a, c, g, or t
ttggatctcattgttttgcatttctgcattaataatttcttgcatggtaatagcaaaaacaccnnnnnnnnnnnnnnnnnnaagttagtgggcaaaaggctatgtgtatcttaaagagtattcttcttcttttcaggttaccagatgtggtggtttacccaacaacattgtggatgtctgggagtttttgggcaaacctaaacattgccagtatacatgggatacacaaatgaactctaatcttggaataactgctgcttgtaaacttcgttttgatcgaatatttttcaaagcagcagcagaagagggacacattattccccgaagtttggccttcttggattaaaaaaactggactgtggtagatttcctagtgatcactggggtcttctgtgcaacttagatataatattgtaaaatgcttttcaagtgtgggttttgccctgattgttgcaaatacaatttccaccttctggaaaggtaggtttgctgtggaggaaataatgtactagatcattgtcacagaaaaaccaactatgatttatggttgtgttttcagaattcaacattaaagattaatgtttatttaaacgaacacattcctgcattcaggatgtgaggccatttaataaaaagggcacaaagcctgtcagagttttcaacggtgcttatagctgccagctggattccaaacaggtaccccattgtctctgagctaatgtttatatttttccattcaggcaccgaaatagttaatatttaaaataagtcttcaaaagaaaacataagagattattgagttcttgggactggatcctttatttcataagttcagatcatcttaaatgaaaatgccatgattatctgcagttaagtagatgacagctattctacatcagacttgatttttgtcagctaattacataattggtaagctataattgaaaccttatggcttaaaattccttaactcctttttgattcatgtttgtagtcatgttgtcaacagaggcaaagttaagcttgatgatggttaaaatcggtttgatagcaccatgggacatttttctaacaaaataaatgcatgaagagacatagccttttagttttgctaattgtgaaatggaaatgctttacaggaagtaaatgcaaattactttttaagtgtgctttaaagaaaaattattttccccacaagaaaaatt

SEQ ID NO: 184614 - DNA, 1550 bp, Homo Sapiens
  misc_feature (1412)..(1447): n is a, c, g, or t
ttgggttgtggagtggtgtagacgagttaagtcctggtctgcgtggaggtcgacgactccgtcgcagactacggacctgtctgggtctcagccgccaaagaccccgtccggtaggaagtactagccggacatcatgagtggctgtcgggtattcatcgggagactaaatccagcggccagggagaaggacgtggaaagattcttcaagggatatggacggataagagatattgatctgaaaagaggctttggttttgtggaatttgaggatccaagggatgcagatgatgctgtgtatgagcttgatggaaaagaactctgtagtgaaagggttactattgaacatgctagggctcggtcacgaggtggaagaggtagaggacgatactctgaccgttttagtagtcgcagacctcgaaatgatagacgaaatgctccacctgtaagaacagaaaatcgtcttatagttgagaatttatcctcaagagtcagctggcaggtttgttgaaatacagttttgagttattttgatgtggctttttaaaaaagttaatgggtagctaatgttgtattgttttattaaaagtagttttaaattaatggatttaatggaattgtaattttaaacatttaattaaatgtaatttgggggatattttgaactttaatattagtgatcaaatgtaaatgttttgaggatatttttcttgttttttaaaatcaatttttaaccaaatattaaaccctttatttgccagcctgtctgtgtcgttggccttatgacgaggagtgcctgtgggttatcctaatcgttgtcttggtcactcttggttgggcctggttgactttgccagtcagctcctacagtgatcagttggccacctctagatctgtgtttgccggtctagacgttatcggtgcacttccttgaagtgccaggttgcagcgatcccagagcgttgataacgtgatctgatccctaagttgagacctgtcttcctgtaacgcttccgaataagaggtccggtcgaaaagagttgaaagatacgaaattaggtggtcgttggaatcctgatcgcagtaaagtggtccttggtaactgctcgagtagaacatgtctgcatccgccagtagtccgctaatagggagggctgtgcgattaaaggcttccatcgattgggtagtgtccttcaagtgggtggcgaagagccagtcgggcatatgtcatgaaggtttctccgaccgattaatggtttgctgcttgactagcctagggaaataataataaaggtaaagtaaacttttttaatgacatatggggcacaaaataactggtgtcttgtaaatgttctgtttttttaaataaaacttctctactttagtctttactttaaaaatatgtactgtttccnnnnnnnnnnnnnnnnnnnnnnnnnnnnnnnnnnnngtactgagctcagcatagactaatactaccttaatgttaaaatctgaatttcttttagcattttgcttaaaagcaatatgctatttgcttattccgtgccctg

SEQ ID NO: 184615 - DNA, 1200 bp, Homo Sapiens
  misc_feature (603)..(603): n is a, c, g, or t
  misc_feature (805)..(840): n is a, c, g, or t
accagaattttcagcaaagtatgtttgggatttatgtggtttggtttttaaaaaaaggcccacagggcaaggtaatttacagtttgattgccactgtcaactgatctggaccttgatcggggaccgggacctctggcgatccacagatgctggagacttagatctacttgaagaaccacgtttctggctcttctcaggcacgggagattactaacagaacgggacttgctccggctccggctcctgctcctgcttcttgaccggctgtaagatttgcgactacgggaacgggatcggctacgagacctagaggaacttctggtccgggatcgagacctgcttcttgacctactgtgccttttgctgccttcaattaattttatttttctcccatttatttcctttccagaaagtttttcaatagcattctttaagtcaccataagaggcaaactcaaccaccccttcatttaatttaggtcggtgtgcatccgcaaacgttacttccccagcttgtctcatgaaatctttgagatccttaacacaagataattgtgttaagcaaagaagaggaaaggggacacacaaacaatcacatgatatnaaaaaaaacaagactactgaaagagaagatgttagataaagtacaaacatggcatttaccacacttgtattctatcagaattcaaaaattatctatgtcagggcacggaataagcaaatagcatattgcttttaagcaaaatgctaaaagaaattcagattttaacattaaggtagtattagtctatgctgagctcagtacnnnnnnnnnnnnnnnnnnnnnnnnnnnnnnnnnnnnggaaacagtacatatttttaaagtaaagactaaagtagagaagttttatttaaaaaaacagaacatttacaagacaccagttattttgtgccccatatgtcattaaaaaagtttactttacctttattattatttccctaggctagtcaagcagcaaaccattaatcggtcggagaaaccttcatgacatatgcccgactggctcttcgccacccacttgaaggacactacccaatcgatggaagcctttaatcgcacagccctccctattagcggactactggcggatgcagacatgttctactcgagcagttaccaaggaccactttaaaagggatcaggattccccaacttttttgt

SEQ ID NO: 184616 - DNA, 1890 bp, Homo Sapiens
  misc_feature (75)..(110): n is a, c, g, or t
  misc_feature (586)..(656): n is a, c, g, or t
  misc_feature (1407)..(1427): n is a, c, g, or t
ttgggtaaatgttctgtttttttaaataaaacttctctactttagtctttactttaaaaatatgtactgtttccnnnnnnnnnnnnnnnnnnnnnnnnnnnnnnnnnnnngtactgagctcagcatagactaatactaccttaatgttaaaatctgaatttcttttagcattttgcttaaaagcaatatgctatttgcttattccgtgccctgacatagataatttttgaattctgatagaatacaagtgtggtaaatgccatgtttgtactttatctaacatcttctctttcagtagtcttgttttttttatatcatgtgattgtttgtgtgtcccctttcctcttctttgcttaacacaattatcttgtgttaaggatctcaaagatttcatgagacaagctggggaagtaacgtttgcggatgcacaccgacctaaattaaatgaagggtatgtactggaaactgtgaaagtctttaaaaatatccggaaaattttactgtgaacttagttttgaggacttaaaatttgaatatgttagaatgcagagattctccagagacaattttgctgcttccctcctcnnnnnnnnnnnnnnnnnnnnnnnnnnnnnnnnnnnnnnnnnnnnnnnnnnnnnnnnnnnnnnnnnnnnnnncatgtagtcagtaggggctaggcatcctgctaagcatcccacggtgcatagggaaccccctcaacaatgaattggctcaaagtataacagtgccaaaactttgctcttttaatgctgtgttatccagaaataagactcaatagtagcaatagcaaaagtgaacatagaaacgacttacctagactgctgtgtgcaatgtgtgagactacaggatgtatatacttttaaaagtggctgttttccattttagggtggttgagtttgcctcttatggtgacttaaagaatgctattgaaaaactttctggaaaggaaataaatgggagaaaaataaaattaattgaaggcagcaaaaggcacaggtatctctaattttttaaagtcaaaagttgtatttaatgggtttgttgtagagtcttatctaggctgatttcttttcatttttcatagtaggtcaagaagcaggtctcgatcccggaccagaagttcctctaggtctcgtagccgatcccgttcccgtagtcgcaaatcttacagccggtcaagaagcaggagcaggagccggagccggagcaagtcccgttctgttagtaggtctcccgtgcctgagaagagccagaaacgtggttcttcaagtagatctaagtctccagcatctgtggatcgccagaggtcccggtcccgatcaaggtccagatcagttgacagtggcaattaaactgtaaataacttgccctgggggcctttttttnnnnnnnnnnnnnnnnnnnnnttcccaaaccatacttgctaaaaattctggtaagtatgtgcttttctgtgggggtgggatttggaaggggggttgggttgggctggatatctttgtagatgtggaccaccaaggggttgttgaaaactaattgtattaaatgtcttttgataagccttctgctcacatttttgtgaatgtctgaagtatatagtttgtgtatattgacagagctcttttataactaaagcaaatttaatttttttgtactagaaaaaaatttgaacattttagttcttggttataaaaatgttaattcagaattagtttaatgccttaattaaactaattaatagctttggacacttaaaagagctctaaatttgcttgtacataaaggcttaatttgttttccttgttagggtcaagggtgtcctccattctttaacagctgctggaagacacattagaagcaactgtttgt

SEQ ID NO: 184617 - DNA, 929 bp, Homo Sapiens
ttgggtcctcgctgcggaaagttggggggcaacctgttgctagtctggtcgttggtgacagcgaggcttccgcgctcgctgctggtgagcagccccggcgtgccccgcgggctggaagaggcggcggcgtgatgcggcccgtggacgcggacgaggcgcgggagccccgcgaggagccgggcagcccgctgagccccgcgccccgcgccggccgcgagaacctggcctccctggagcgcgagcgcgcccgggcgcactggcgggcccgcaggaagctgctggagatccagagcctgctcgacgccatcaagagtgaggtggaggcagaggagcggggcgcccgggccccagcaccccgcccgcgtgcggaggctgaggagcgggtggctcggctgtgcgccgaagcagagaggaaggctgcggaggcggcgcggatgggcaggcggatcgtggagctgcaccagcggatcgccggctgcgagtgctgctgagccggcgaggccgcgcgggtctggagcggagcgcggcggggagtgtcccgcgtggaaggcgctgggtggccaactgacgaactgtgttcacctgataaggagtcgtggctgcttggacaggctcaaaccaagagagcctttcgttttgtctcccctgtttttctgcctgcgttttctccacattagccactcaatttccagtaccatcctggcggatgacttcagcattagatggtcaggtgtatttttttattaataggcgcattcagtttgaaaagacagcttttcattaatgtcccacgtaaaggaatatggcctatacagtacgtacgctgctgcgtggtcatatttgttcctgtgatcttattgtatttttcaaagttttggaagtatactcgtgtgctttgctgtttttttatgcttcctggaatttgggga

SEQ ID NO: 184618 - DNA, 905 bp, Homo Sapiens
ctttgtacaaaaaagttggattcttttttcataggtaattagagaaaataatttgatatgttgttgtaaagagtcatgaccactggaagtattttcaggacgtagacctggtgggtcactacgtggggggagagaggtgtgaagcggaggtacatgctggaaacgtgtgaatgttgttacgagattggagcgtttgcgatgaccttcctgcaggtggaagcattgtgcacaggtggttgggtttgtttgactcccggatatgagaatatcaagctcaaaatttatgttgtgatgatgaatttctcccacttgtactttaagtggccaactgacgaactgtgttcacctgataaggagtcgtggctgcttggacaggctcaaaccaagagagcctttcgttttgtctcccctgtttttctgcctgcgttttctccacattagccactcaatttccagtaccatcctggcggatgacttcagcattagatggtcaggtgtatttttttattaataggcgcattcagtttggaaaagacagcttttcattaatgtcccacgtaaaggaatatggcctatacagtacgtacgctgctgcgtggtcatatttgttcctgtgatcttattgtattttcaaagtttggaagtatactcgtgtgctttgctgtttttttatgcttcctggaatttggggactcatgagagacttgaggttagagttctgcaagtgagaagacactacatggttgcagctgccacatgaagaacccaagctcctgtcaaagttgtgaatgcgactttggatgagattaagaaggcccagtggttggtcttgaagagtggcagtgtgtggatttgaggacctctgcagaccatcagatcaaaggagggagagctgttttcgggtg

SEQ ID NO: 184619 - DNA, 1650 bp, Homo Sapiens
  misc_feature (1018)..(1029): n is a, c, g, or t
  misc_feature (1270)..(1305): n is a, c, g, or t
ttggatatgttacacttcacatcttcacagtctgtctccgaggcactaaagttcacaagaaatgctaccttgcttcagaaggtttgaagcatttccatgaggccaatgaagactgcatttccaaaggaggaatcctggttatccccaggaactccgacgaaatcaacgccctccaagactatggtaaaaggagcctgccaggtgtcaatgacttttggctgggcatcaatgacatggtcacggaaggcaagtttgttgacgtcaacggaatcgctatctccttcctcaactgggaccgtgcacagcctaacggtggcaagcgagaaaactgtgtcctgttctcccaatcagctcagggcaagtggagtgatgaggcctgtcgcagcagcaagagatacatatgcgagttcaccatccctaaataggtctttctccaatgtgtcctccaagcaagattcatcataacttataggttcatgatctctaagatcaagtaaaaatcataatttttacttattaaaaaattgcaacacaagatcaatgtccatagcaatatgatagcatcagccaattttgctaacacatttctttgggattttgcccttcctggggtataggggatcagaaatattgatccatgtgcacgcagataaaatggcttctgctaaacagactaaaatctttctctctagtctttctcacttgtacaaacccagtttgttttcaaaaaatcacagtagcaatgcaactcatcactctagaaaagcaagcttaggctacctgaaagattttcccttggaagtttatcgtatgtttgactaacaaaaattccctacatcagagactctaggtgctatataatccaaaaacttttcagcctgttgctcattctgtcccatgctggcaataataccttgtcagcccattacccttattttgaattgctccatctcctcgtgggacttgtatcttgtctgccatatcacaacacaaacccctgaagaggttctgatttgannnnnnnnnnnncttcatgccaaccctttttttggaagtttccagccgcaatttgaaatgaaatgacaaggtgtatatttgatcaattttcattcccaccattgcattacaacctctaacttaaatgggtaacccaaaggcatatcaaaaaagcagactgcatgataaacggaaatagaaaaaaagaacctacatttattttgctttagcatccttactctcaccttttatgagattgagagtggacttacannnnnnnnnnnnnnnnnnnnnnnnnnnnnnnnnnnnagccatcattatatgtttaagtctattatgggcaaccaatctttggaagctgaatactgaatttaaagaatgctatcttggaaaattgcatacgtctgtgcaattttttattctgcctagtgctattctgcttgtttaactagattgtacaaaataacttcattgcttaatatcaaattacaaagtttagacttggagggaaatgggctttttagaagcaaacaattttaaatatattttgttcttcaaataaatagtgtttaaacattgaatgtgttttgtgaacaatatcccactttgcaaactttaactacacatgcttggaattaagttttagctgttttc

SEQ ID NO: 184620 - DNA, 1026 bp, Homo Sapiens
ttgggtctccttccatagctgctctaagggggctggcaacatggctcagcaggcttgccccagagccatggcaaagaatggacttgtaatttgcatcctggtgatcaccttactcctggaccagaccaccagccacacatccagattaaaagccaggaagcacagcaaacgtcgagtgagagacaaggatggagatctgaagactcaaattgaaaagctctggacagaagtcaatgccttgaaggaaattcaagccctgcagacagtctgtctccgaggcactaaagttcacaagaaatgctaccttgcttcagaaggtttgaagcatttccatgaggccaatgaagactgcatttccaaaggaggaatcctggttatccccaggaactccgacgaaatcaacgccctccaagactatggtaaaaggagcctgccaggtgtcaatgacttttggctgggcatcaatgacatggtcacggaaggcaagtttgttgacgtcaacggaatcgctatctccttcctcaactgggaccgtgcacagcctaacggtggcaagcgagaaaactgtgtcctgttctcccaatcagctcagggcaagtggagtgatgaggcctgtcgcagcagcaagagatacatatgcgagttcaccatccctcaataggtctttctccaatgtgtcctccaagcaagattcatcataacttataggttcatgatctctaagatcaagtaaaaatcataatttttacttattaaaaaattgcaacacaagatcaatgtccatagcaatatgatagcatcagccaattttgctaacacatttctttgggattttgcccttcctggggtataggggatcagaaatattgatccatgtgcacgcagataaaatggcttctgctaaacagactaaaatctttctctctagtctttctcacttgtacaaacccagtttgttttcaaaaaatcacagtagcaaatgcaaactcatcactctagaaaaagcaagcttaaggctacctgaaa

SEQ ID NO: 184621 - DNA, 1878 bp, Homo Sapiens
  misc_feature (1550)..(1589): n is a, c, g, or t
  misc_feature (1788)..(1797): n is a, c, g, or t
ggcgggggtaggtgagggtttggagcatgtggtctttttaaaaaattgtaaccctctagaaaatatcaaagaaatgaaccagacgtggtttaaatagttgattttcctattttaacagtaccaactagttaattgggaaatgtaagttctgaatgttcacattgctttaccagtttggcactggaaccaagagcacatgtcgtggctggctacaaggttgtaaagcagaaatcgaagtttaccatgtctgtaatgtgtacatgaagtgtcaatttagaacagttactaggataaactccattattgccatggctgtcatggtacccaagtgacttggaagatgcatttaaattactcagctgaaatcacttgatcatcttgtgccaagatatgctgttggtgcctgatagggattagtcttttaggtgccctgttctcctaccataattgtgaatgatttgtgagaagtgcaagccatgtttatcctgaatttttacttaataatttgtattactagtcatatgcatgtagctttctgtttacatcctatgccacatggtcttcatttatgccaggtaaactgtatttgaactatgtgcagctagctttgttttaatctgcttggcaaccagtgtagctgctgtaacaatctatcttattgttcaaatatataagagccaaactcttttccattccatctaaaatgttttcatttagtactcttctttcctcctactctatgaacttcaaaacaaaaacaaaactttgagagcagcacatgcatccaggtatttatagattattgccagtgtcttttctgtatgctataagcaagggagcttaggtgttatttctttaatttatgcttgaatctgaaaaattatttctgacttactccatggcctccttataataagtagaagttttatatataattaattttcagcattgggcactgaattaggacagtcctcatctcattgcttggcccttcaagcaacctagctaaaaggtgctgatattttatttagtactgccaacttcaagtgatttagatatctatctatctatctagatttctgaaccaagatatatttatagttcacttttgggtttttatacccacggtaggattctgcattccagcattaaatctgcttcattttagaacctttataaaagcaatagctggaatatactcccagttttaaaataaataaatgcctgattgatttaaagcaagtaggttatgctgaagtatataaagaagttttatattctctcaaaaatggtattatctttctttatttgctagattcttacaaatcttttaagagggctgtaacagttgctgctagtattagggttccacatcattctaatgtatagtttcaagtcttaatagacaatctgaattccactacatttcttttggctccaacattccttttagcttgaccagtctaatttaaaatgtgtttgttggaggtcattaacgttacttgtacaatgctgtcactgtgtgacatccatatgaattttggtatatnnnnnnnnnnnnnnnnnnnnnnnnnnnnnnnnnnnnnnnntcagctgtgattgattatgcttagaaatactatagtaactagatgcagtgtgaattttttccattaacaaacaaacaagtcagtggcttaaatgtgattatggtcctgcaaggtgattcttgctaaaatatctaaacttttgttttgttttaactgaatcattttttaacttaaaaagctggaaaatatcaaatgctgnnnnnnnnnncattgtcaacagtggtgtgtcattttatgtatgttcctaatgcttatggaactcctccaaaataaagttactcaaagagaa

SEQ ID NO: 184622 - DNA, 888 bp, Homo Sapiens
ttggggcgcgtttcctgaaggtcgatggccaggtggtcttcataaactatactgccttgtgatgcctccctagaaatgagaggtctcaataccagctcagaccatgtggaccgcggatgagattgctcagctatgctatgaacactatgggatcaggctgcccaagaaggggaagcctgagccaaaccatgagtggacattattggcagcggtggtgaagatacaatctccagctgacaaggcctgcgacacccctgataagccggtgcaagtgacaaaggaagttgtgtcaatgggaacaggaacaaaatgcataggacagtccaaaatgaggaagaacggagacatcctcaatgatagccatgctgaggtcatagccagaaggagtttccaaaggtaccttctccaccaactccagttggcagccaccctgaaagaggatagcatctttgtcccaggaactcaaaaaggagtgtggaaacttagacgagacctcatttttgtgtttttctccagccatacaccctgtggggatgcctccatcattccgatgcttgagtttgaagatcagccttgctgtcctgtcttcagaaattgggcccacaactcatcagtagaagccagtagtaacctggaagctcctggaaatgaaagaaaatgtgaagaccctgacagtcctgtaaccaaaaagatgaggcttgagcctgggactgcagccagggaggtcaccaacggagcagctcaccatcagagttttggcaagcagaaaagtggcccaatctcaccaggcatccacagctgtgatctcactgtagagggactggctactgtcaccagaatagcccctggtagtgccaaagtgatagacgtttatagaactggagccaa

SEQ ID NO: 184623 - DNA, 1822 bp, Homo Sapiens
actttgtacaaaaaagttgggttccaagtggtggtgaccttgcggagagaagattttgatgtggaagcagctgactcagcgggaaactgccttgacagtttagtttttgttgcaggagatcggcaatttggtccttactgtggtcatggattccctgggcctctaaatattgaaaccaagagtaatgctcttgatatcatcttccaaactgatctaacagggcaaaaaaagggctggaaacttcgctatcatggagatccaatgccctgccctaaggaagacactcccaattctgtttgggagcctgcgaaggcaaaatatgtctttagagatgtggtgcagataacctgtctggatgggtttgaagttgtggagggacgtgttggtgcaacatctttctattcgacttgtcaaagcaatggaaagtggagtaattccaaactgaaatgtcaacctgtggactgtggcattcctgaatccattgagaatggtaaagttgaagacccagagagcactttgtttggttctgtcatccgctacacttgtgaggagccatattactacatggaaaatggaggaggtggggagtatcactgtgctggtaacgggagctgggtgaatgaggtgctgggcccggagctgccgaaatgtgttccagtctgtggagtccccagagaaccctttgaagaaaaacagaggataattggaggatccgatgcagatattaaaaacttcccctggcaagtcttctttgacaacccatgggctggtggagcgctcattaatgagtactgggtgctgacggctgctcatgttgtggagggaaacagggagccaacaatgtatgttgggtccacctcagtgcagacctcacggctggcaaaatccaagatgctcactcctgagcatgtgtttattcatccgggatggaagctgctggaagtcccagaaggacgaaccaattttgataatgacattgcactggtgcggctgaaagacccagtgaaaatgggacccaccgtctctcccatctgcctaccaggcacctcttccgactacaacctcatggatggggacctgggactgatctcaggctggggccgaacagagaagagagatcgtgctgttcgcctcaaggcggcaaggttacctgtagctcctttaagaaaatgcaaagaagtgaaagtggagaaacccacagcagatgcagaggcctatgttttcactcctaacatgatctgtgctggaggagagaagggcatggatagctgtaaaggggacagtggtggggcctttgctgtacaggatcccaatgacaagaccaaattctacgcagctggcctggtgtcctgggggccccagtgtgggacctatgggctctacacacgggtaaagaactatgttgactggataatgaagactatgcaggaaaatagcaccccccgtgaggactaatccagatacatcccaccagcctctccaagggtggtgaccaatgcattaccttctgttccttatgatattctcattatttcatcatgactgaaagaagacacgagcgaatgatttaaatagaacttgattgttgagacgccttgctagaggtagagtttgatcatagaattgtgctggtcatacatttgtggtctgactccttggggtcctttccccggagtacctattgtagataacactatgggtggggcactcctttcttgcactattccacagggataccttaattctttgtttcctctttacctgttcaaaattccatttacttgatcattctcagtatccactgtctatgtacaataaagga

SEQ ID NO: 184624 - DNA, 985 bp, Homo Sapiens
ttggcttatgaacagaaccaggacagggaggctggccggaggttcctgcagagggagcgtcaaggccctgtgctgctgtccctgggggccagaggggttgcccagcatgcccactggcaggagagagggaactgacccacttgctcctaccagcttctgaaggtgacactgagccccaggtgacgccgcaccaccaaagaaggtgcttgtgtttgtcagacaaatacagccaggcctgccaccccttaggctccaaagtccggaggtgcagaaagccaggaccaagagacaggcagctcaccagggtggacaaatcgccagagatgtggtgcattgtcctgttttcacttttggcatgggtttatgctgagcctaccatgtatggggagatcctgtcccctaactatcctcaggcatatcccagtgaggtagagaaatcttgggacatagaagttcctgaagggtatgggattcacctctacttcacccatctggacattgagctgtcagagaactgtgcgtatgactcagtgcagataatctcaggagacactgaagaagggaggctctgtggacagaggagcagtaacaatccccactctccaattgtggaagagttccaagtcccatacaacaaactccaggtgatctttaagtcagacttttccaatgaagagcgttttacggggtttgctgcatactatgttgccacagacataaatgaatgcacagattttgtagatgtcccttgtagccacttctgcaacaatttcattggtggttacttctgctcctgccccccggaatatttcctccatgatgacatgaagaattgcggagttaattgcagtggggatgtattcactgcactgattggggagattgcaagtcccaattatcccaaaccatatccagagaactcaagtgtgaataccagatccggttggagaaagggttccaagtggtggtgaccttgccggagaga

SEQ ID NO: 184625 - DNA, 1218 bp, Homo Sapiens
ttggaatcttatgaacagaaccaggacagggaggctggccggaggttcctgcagagggagcgtcaaggccctgtgctgctgtccctgggggccagaggggttgcccagcatgcccactggcaggagagagggaactgacccacttgctcctaccagcttctgaaggctccaaagtccggaggtgcagaaagccaggaccaagagacaggcagctcaccagggtggacaaatcgccagagatgtggtgcattgtcctgttttcacttttggcatgggtttatgctgagcctaccatgtatggggagatcctgtcccctaactatcctcaggcatatcccagtgaggtagagaaatcttgggacatagaagttcctgaagggtatgggattcacctctacttcacccatctggacattgagctgtcagagaactgtgcgtatgactcagtgcagataatctcaggagacactgaagaagggaggctctgtggacagaggagcagtaacaatccccactctccaattgtggaagagttccaagtcccatacaacaaactccaggtgatctttaagtcagacttttccaatgaagagcgttttacggggtttgctgcatactatgttgccacagacataaatgaatgcacagattttgtagatgtcccttgtagccacttctgcaacaatttcattggtggttacttctgctcctgccccccggaatatttcctccatgatgacatgaagaattgcggagttaattgcagtggggatgtattcactgcactgattggggagattgcaagtcccaattatcccaaaccatatccagagaactcaaggtgtgaataccagatccggttggagaaagggttccaagtggtggtgaccttgcggagagaagattttgatgtggaagcagctgactcagcgggaaactgccttgacagtttagtttttgttgcaggagatcggcaatttggtccttactgtggtcatggattccctgggcctctaaatattgaaaccaagagtaatgctcttgatatcatcttccaaactgatctaacagggcaaaaaaagggctggaaacttcgctatcatggagatccaatgccctgccctaagaagacactcccaattctgtttgggagcctgcgaaggcaaaatatgtctttagagatgtggtgcagatacctgtctggatgggtttgaagtt

SEQ ID NO: 184626 - DNA, 1534 bp, Homo Sapiens
  misc_feature (134)..(197): n is a, c, g, or t
  misc_feature (199)..(236): n is a, c, g, or t
ttggagtgctttatatgtagtaacttgtttaatattcaaaacattatgaagaaaccatggcccaaaaaggtgaagtaatttaatccaaatcacattgctattaagtggtgggcctggacttaaacctaggtagnnnnnnnnnnnnnnnnnnnnnnnnnnnnnnnnnnnnnnnnnnnnnnnnnnnnnnnnnnnnnnnncnnnnnnnnnnnnnnnnnnnnnnnnnnnnnnnnnnnnnnaaagagacaataaaaggaggtttttttattcaaaggtataactggataagtaaatttgtttacaatcattcttgtgaaatacttttttaaaaaaatacgatcaacttctttgcaaatagtaaacacatacctcaacaatgatgacctaatttttgatccataatgtaagattaggtagaaataggcaagctcacactgctaaattaactatcaaatactcagtcaaaactccatttgtggcccccacttcttgatctatttctgttccacttcgtcttctaccatcttgccgactttcctgagcaactgctttgtcgactctctctacctgaccaattgccagatcgacaacctgactggcctgaccagccactcctctgtctggaattaaaagatgtttccatcataatattctttaatttcaggtaatttagctggcactgagagtatccagccggaatcatgccactttgcctgtaacctttgactcaattggaggaatatcaaagcaaacacccatatttcctttcaggaggcacactctggtaatctgagacactgcattactattcagctttgctaagttctttccaagcacagctgacatcctgtatttcctctaggctttccagagtcatggtcacaaaccccttatcagaggtgatcaaagatcgtggttcaaagcttgatgcaccagaaatgtgggctaaagctgcagccaatgcatccactgcacctttctcttctatcagtctctgagctgatggtcggaaaaaatcaacagcagcataagaaacggaagccagagacctgatggcatccatgcttttagatttaactaaatccattgtagaaggaacacctacacgtttaaaagtaattcctgctttttgttccacatatcttagttgacctctttctcttggttgataaaaacatatacaaatccctgtccgtccagctctacctgtgcgtccagagcgatggatataggactcaacatcctgaggaggagaactttgaatcaccaggtcaacttcaggaatgtccaaaccacgggcagccacattggttgccaccaaaactttaaaactaccttctctgaagccttttagtgtaatttctctttgtgactgtgcaatgtccccatgtaaacactgggcattctgttttatgtgtggattcatggccatttcagttacattcttcttggtctcacagaaaataatagccctcccttcagacccactgtagacttgaaggacaccaacttttttgtacaaagttggcttttaaag

SEQ ID NO: 184627 - DNA, 1471 bp, Homo Sapiens
  misc_feature (66)..(74): n is a, c, g, or t
aaatatacacaagaatttaaaaaatttacaaatggatgaataaagtcaataaatagttttgctttnnnnnnnnnttgaagattcatagttgagtggtgttttgataattcacacacaaaaaaattcttttcacatggttaaattatcttctttctcttgctcctgtaatttacagcattccatttggtggtcctccaataggtcctaggtccgggctattcttcaaataatacttttccaacttggccagtatatgcttcccgtatgtgtatttgcgcaaagtagtaatgtgaggtcgaatcttgtgcatgattatctttctctgagcaggttcagccatatcaatcatcttttgaaccacgtaattggcatactggtccttcatcatggtgtataaggcactgtgaggaccatcattctggcagcaaacctcgtcaatcagtaaagctctctcagcacgggaggcatgagtaacacacttttctactacattgctggcaaatttgtgttgactcagggctaaaacctttcccctgatttcggaaacaattttgctcttgtcttcaggtcgaccgtgttccagtacatgctgaataacataattgccatactgatcctgtaccaactgctctgtatgttggtggagttcttctaagataggtaaggtctgttctgcagtgcaatgctctaggatgcgctgaattactctgcagccataaggatgagttgaaagcacaaatacttgtcccttgaaagcatcaatgatgaactgtagtgactgtggctgaacacattcgatacatttttgtacaacatggtttccattctgatctttcacacatttgagcacatgaccatccagctcctttaccatttcactctgctggtcagaagaaatagattctaatgctttctgaataacgcggcagccatacatctgcaaggctaagggtagaacatgaccacgaatacgagtagccagggctaatttttgatccagactcccaaactcaaaaaacttctgtataacatagttgccaaaaacatcagtcattaattgataggctgcttgcagaatttcattaaataccatctgtcgctcagctggagtagctctctctagtttttgctgtatgaatctagaaccatgctggtcttgagaaaactcaactatatgtccaatcaagtctctaagctgaaggtttgggaagcggttgtttctgaaatcttccaataatctactgcggccagaaggcataatatcagacctattataccgaagccgggaaggaggaaagagctggctgctggagctaaatagactggaagtgcttgaagcacttcgatattttgcttctgctccaggtgctgcagagatatatcgaccactaccatttgtcagtcctcctacaacaaagcagctatggtcagcaagtatttttgacaaagttattcctcaaataaaatccaa

SEQ ID NO: 184628 - DNA, 1151 bp, Homo Sapiens
  misc_feature (153)..(175): n is a, c, g, or t
gaaaaattgcatactgagtggcttaaatgttctctctaaattttaaataagtgcaagaagtttctacactcaggaattgcatacatttttatctttcctcaacagaaaatattgaatgatatagaggtagcataacttactaaattaactctnnnnnnnnnnnnnnnnnnnnnnngcaaggttattttccatagtctttatagaactattacaaatgtttaaaatcttacaatctaggcttccttctacctggtttcagatatctcattattctcaccccctcttttactgtgagaatagttattagtccaggcaccccgtggcccagtggcatctattgcaacatcaatgatagaatctggagtcatccatctcaagaaaatgaggaagaggaagttgaaaactgccaacaaagcaaagatgtagcctgttactgggccgcagtgagaaataagtctgtccagtcgtttgtccattggcaacacagcttccactgatacccggtcatataccttttcagttctttctgcaacattcctccaggtgtagaaagtctttactatgttatggatgttttctggagctggcaatgtccctgacttcagttggaaaatagccttttccaatccttcacacaaagattttactgaaggctcacataaaataataaggttttctggaagcacctcaggaattccaccaactctggtacttacaacctgtaaaccacaactggctgcttccacgatcgccatgcagaatgcttcagtaagggaggtattcagaaaaatatgtccttgaactaagacatttctaacatccttgtgttctaaagctcccaaaagacgcaccctgtcatgcagctggtatctttcccgaacttcttccaaaatgattctctttggtccctctcctccaattatgaaatttaaatctggatatttctgacagagttcaggtattataccactaagcaaatcgatcccttttctgtaaacaagtctgctgacaacaacaatagttatactatcatgccttctaaatgggtctggagtgaagtcagtaggatctacagcattaggaatgacggacactatttcaggattcagtgctgctcttagtacagtattttccttactagtataagccaa

SEQ ID NO: 184629 - DNA, 2744 bp, Homo Sapiens
  misc_feature (2363)..(2418): n is a, c, g, or t
ttggatgtctgcgatgatcaagagatccagaagaggctcgctgagcagcaggatctacagcgagatattgaacaacacagcgcaggggtggagtccgtgtttaacatctgtgacgtcctactgcacgactccgatgcctgtgcaaatgagaccgagtgtgactcgatccagcagaccaccaggagcctggacagacgctggaggaacatttgtgccatgtccatggagcggcgcatgaaaatcgaggagacgtggcgcctgtggcagaagtttttagacgactattctcgctttgaggactggctcaagtcagctgagaggacggcagcctgcccaaattcctcagaggtgttgtacacgagtgccaaagaggaactgaagaggtttgaggcctttcagcggcagattcatgagcggctcactcagctggagctcatcaacaagcagtaccggcggctggcccgggagaaccgcacagacacggccagcaggctgaagcagatggtccacgagggcaaccagcgctgggacaaccttcagaggcgggtcacagccgtcctgcggagactcaggcatttcaccaaccagagggaagaatttgagggcaccagggagagcattctggtgtggctcacagagatggacctgcagctgaccaacgtggagcacttctcagagagtgacgccgatgacaagatgcgccaactgaatggcttccaacaggaaattacattaaataccaacaagattgatcagctcattgtgtttggggagcagctgattcagaagagcgagcccctggatgctgtgctgattgaggatgagctggaggaactccaccgctactgccaggaggtgtttggaagggtctcccggttccaccggcggctcacctcctgcactccgggcttggaagatgaaaaggaggcccctgagaatgaaacagacatggaagaccccagagaaatccagactgattcttggcgtaaacggggagagagcgaggaaccgtcatctcctcagtccctgtgtcatctagtggccccagggcacgagcggtctggctgcgagacccctgtcagcgtggactccatccccctggagtgggaccacacaggcgacgtggggggctcctcctctcacgaagaggacgaggagggcccatactacagcgcactgtcaggtaaatccatttcggatggccactcgtggcatgttcccgacagcccttcctgtcccgagcatcactacaagcaaatggaaggtgacaggaatgttccacctgttccccctgcgtccagcaccccttataaaccaccctatggaaagctactattacctccaggcacggatggtggcaaagaaggcccgcgagtcctgaatggcaacccacagcaggaagacgggggactggccggtatcacagagcagcagtcaggtgccttcgacagatgggagatgattcaagcacaggagcttcacaataagctcaaaataaaacaaaatttgcaacagctgaactctgatatcagcgccatcactacttggctgaaaaaaactgaagcagagctggaaatgttaaagatggcaaagcctccctctgatatccaggaaatagaactgagagtgaagagacttcaggagatactgaaagcctttgacacttacaaggcattagtggtctctgtcaacgtgagcagcaaggaatttctgcaaaccgagagccccgaatccacagagctccaaagtagactccgccagctgagcctgctctgggaagcagcacagggcgcagtggacagctggagagggggcttacgacagtcgctcatgcagtgccaggacttccaccagttgagtcaaaatctgctgctgtggttagcgagtgccaagaaccggaggcagaaggctcatgtcaccgatccaaaggcagacccccgggctctcctagagtgtcggagggaactaatgcaactggaaaaggagctggtagaacgtcaacctcaagtggacatgttacaggagatttcaaacagccttctcattaagggacatggagaagactgtattgaagctgaagaaaaggtgcatgttattgagaagaaactcaaacagttacgggagcaagtgtcccaagatttaatggccttgcagggaacccagaacccagcctcacccctgcccagcttcgacgaggtagactcgggggaccagcctcctgcaacatccgtgccagctccccgagcaaagcagttcagagcagtgagaactacagaaggcgaggaggagacagagagcagggtccccggcagcacacggccacagcgctccttcctctcaagggtggtccgggcagccctacnnnnnnnnnnnnnnnnnnnnnnnnnnnnnnnnnnnnnnnnnnnnnnnnnnnnnnnngaagaagactacagctgcactcaggccaacaactttgcccggtccttttaccccatgctgaggtacaccaatgggccaccccccacatagagggcatagctggccacagtgctacaccacctgcctgattgccaagggtgcccagcacgtggccccagaccaatctgagtgacttagtgttggcaaggtcccgggacctgtgcagacttcttctgggcttacccagcacgggctccctggtgcccagggcagctttcagattgtgttcctcctccaggagcaaggaacctgtgtggcaagttgccccgggtattttggcagaacta

SEQ ID NO: 184630 - DNA, 1292 bp, Homo Sapiens
  misc_feature (316)..(370): n is a, c, g, or t
ttggctgagcgccgagctggacaaggacctgcgggcaattgagacccgactgccgtcccccaaggtaccagcccccagggttcacccgcggggcacgccggcgaccgcagggtcggggcaagccgggagcctcggcggctgggctgggcggaggacgggcagccgaggtccggcctccagcggcgcgcaccggcctcgggccctcctgggcgctggcgggctcgctcctccataaataaaatacagggcgtcgactttcgcaagtgaccccgaggagcctttctaagcggactccacgtcagcccgacgaccgggnnnnnnnnnnnnnnnnnnnnnnnnnnnnnnnnnnnnnnnnnnnnnnnnnnnnnnntagttcccgccccgctcccgggatcggccgcgcgggcgcctctaggaccccgcgtcccgcccgctctcctcccctcccgagccgcgaacttttccggaggcggcggcctcggctgccgctgggtcccggggtcgcgggccctgattgcgccgtttccccgcgcagagctcgccggcgccccgacgggccccggagcagcggcccccggccggcccggcctcagcctggagctccagctacccacatgcaccttacctgggttccgcccggtccctgagtccccacaaaatggctgatggaggaagccccttcctaggtcggagggactttgtctacccttcctcaacccgagaccctagtgcctctaacggagggggcagcccagccaggagggaagagaagaagagaaaggccgccaggctcaagtttgacttccaggcgcagtcccccaaggagctgactctgcagaagggtgacattgtctacatccacaaggaggtggacaagaactggctggagggagagcaccacggccgcctgggcatcttccctgctaattatgtggagagtgaagcaaagagaacgtgaggattctgggctccggctggggtagatggggaggaagaaccgagacgctggaacccagggacacccggttctcagcagtgagaaaagggtgctgcccgcagatgagatccctaagcccatcaagcccccgacctaccaggtgctggagtatggagaggctgtggcccagtacaccttcaagggggacctggaggtggagctgtccttccgcaagggagagcacatctgcctgatccgcaaggtgaacgagaactggtacgaggggacgcatcacgggcacgggggcgccaaggcatattccctgccagctacgtgccaggtgtctcgtgaaccc

SEQ ID NO: 184631 - DNA, 1333 bp, Homo Sapiens
  misc_feature (73)..(117): n is a, c, g, or t
ttgggtcggaaaaaagccgagaaaaaaccggcaccctctctgagaggcaacagaagcagcaattgtttcagcnnnnnnnnnnnnnnnnnnnnnnnnnnnnnnnnnnnnnnnnnnnnngggcgacacgcaagtgcctgtaggggtgaaaggagcagggaccggcgatctagggggggatcagctacaaaagaaactgtcactgggagcggtgcggccaaggaggaagcagtgctgccaggctctgctccagggcacagctggctggcggctgccctgtccgcagcaaaggggcacaggccggggaccgcgagaggtggcaaagtggcaccgggcgccgaggctgctgagcgctcgccgagacggcgaccggactggctgccccggaactgcggcgactctccctcctcagaacttggcctacgtttcccaggactctccccatctccagaggcccccacaaaaccgggaaaggaaggaaaggacagcggcggcagcagctcaatgagtgcctacagcagaaagcctgaacgagctcggtcgtaggcgggaagttcccgggggggctgcccagtgcagccgcaatgctgccgcgagctgccccagcagtccgggctccgtagacgctttccgcatcactctccttcctcgggctgccgggagtcccgggacctggcggggccggcatgacgggcttctcgggggcccgccgcacgcccggcagcctccggagacgcgcgccgagcccggctcccacggcctctgaggctcggcggggctgcggctgcctggcgggcgggctccggagctttcctgagcggcattagcccacggcttggcccggacgcgaccaaaggctcttctggagaagcccagagcactgggcaatcgttacgacctgtaacttgagggccaccgaactgctactcccgttcgcctttggcgatcatcttttaaccctccggagcacgtcagcatccagccaccgcggcgctctcccagcagcggaggacccaggactatcccttcggcgagacggatggaaaccgagccccctggaggacctgcccctgcagttctgcctcacacggctcaagtcaccaccgtgaacaagggtgggtgaatgccttttcttccccctgaatgtctttccttccgcggtattttctgccccgatctatagtcccttgagtctccacacacactcctcacagagatctgtagcgtaggtacgtgacagctctgcctacatctgacgtccggagtcattaaccaggaatgtatgtgtgtctgtgtgtctctctgtggagtcgtcagaattcttcataggggccaa

SEQ ID NO: 184632 - DNA, 1722 bp, Homo Sapiens
  misc_feature (1498)..(1507): n is a, c, g, or t
ttggatttattccaaatactttccctccttacctccccccacctcccttgctgcttagatggtggtctgtcggagaatcaatgttctttttgtctacccatctcccttcagtcttaataaaaggtcttaaacagttacatgagaaccaaaaaaacaacccaacgcttttggagaataaatcaggatctggagttccaaacagtaataccaattccagtgtgcagcatgttcagataagagttgcccgcttggaagataatacagccatctcttctagccccatggcagcattgcagattccagtccagatcacccatgtttcttcagcagactctcctgctaccgttgactcagaaacaataacactaaacagtggaacactacagacatttgagattcttccctctttccatctacagcccactggcactccaggcacctacctacttcaaacaagctcaagccaaggccttcccctaactctgactgctagtcccacagtaaccctgacagctgctgctcctgcttctcctgaacagattattgttcatgctttatccccagaacatttgttgaacacaagtgataatgttacagtgcagtgtcacacaccaagagtcatcattcagactgttgccacagaggacatcacttcttccatatcccaagcagaactgacagtcgatagtgatattcagtcatctgattttcctgagcctccagacgccctagaagcagacactttcccagatgaaattcatcaccctaagatgactgtggagccatcatttaatgatgctcatgtatccaaattcagtgaccaaaatagcacagaactgatgaatagtgttatggtcagaacagaagaagaaatctctgacaccgaccttaaacaagaggaatcaccctctgatttagccagtgcttatgttactgaggtaagttgtactttaagaacaactgaatggattcttgccttgagcctcaaacctgcagtttgggaaacttttttctgaagactcatgaaattaagctcaaacccccaacctcacacctcacaaagtgttgtcactggcagaaatgggcaggcagtgatcctgtggcagtcaggaagaataagaaaaccatgttctatcttaccacagttcctcactaaaactttttcctctttacctacaatacattgagaaatgtttgttagaacccatagaagcattttcctgagtggttagtaatctttgtggttcagcctaggaacatcatcctacactgtaacagcattgtttcttctgttatattcagctgacctataactgacctagtccttatgagttccttttgttaaaagtatgttagattgtgaggtcatcttttgtccctgtgagaccttaactttttattttatattctgatttttaaatgggttatgtttaagtctaacctatacatacctatacatgggattttaaggaagactagtaagaatatgagtcaatannnnnnnnnnaatgttatttaaggtttagagtctcccactatagaagaacaagttgatcaaacaattgatgatgaaacaatacttatcgttccttcaccacatggctttatccaggcatctgatgttatagatactgaatctgtcttgcctttgacaacactaacaggtactgtaatataatactttactatgtgcctgataaattttagatggaaaaaaacaga

SEQ ID NO: 184633 - DNA, 1516 bp, Homo Sapiens
ttgtacaaaaaagttgggattttcctgaccctcacagacgccctagaagcagacactttcccagatgaaattcatcaccctaagatgactgtggagccatcatttaatgatgctcatgtatccaaattcagtgaccaaaatagcacagaactgatgaatagtgttatggtcagaacagaagaagaaatctctgacaccgaccttaaacaagaggaatcaccctctgatttagccagtgcttatgttactgagggtttagagtctcccactatagaagaacaagttgatcaaacaattgatgatgaaacaatacttatcgttccttcaccacatggctttatccaggcatctgatgttatagatactgaatctgtcttgcctttgacaacactaacagatcccatactccaacatcatcaggaagaatcaaatatcattggatcatccttgggcagtcctgtttcagaagattcaaaggatgtcgaagatttggtaaactgtcattagaataattcttagaaataggcagttcaagcaaagaaggcacactgttaattacaacctcttcaaagaaataggagcaacccccaagaggcttaatttaccaatttaaatagccacagtccttaagccacacacattgttgctgctatgactttttacctcctttaaacacatcatctgaggttgagttttatgacagtatgtagttgagtggaggctgggagttttaagcataaatccctgtttagtgttacatgggaataaggaatttcattcacttcagccactaagaaaagtttagaatcacgaaagcttaactgctgtggtttaaagtacagtttctctaaagatcagacatggcactgtctcctctcaagcctggttgtagttcagatgagtcttttcaacatggtcttcaacatggtctagagcttaccagtgatcttctgatcttcaagaagactaagtttgagacttgaccagcatacaagtatagagacctaggaggtggtcttgtggtggtacatttggttaacccattgctggcagtgggagctgatttaggcagggtaaacaggaaagcattaaaagttaaaattcactacaggttttttgttacttttaaagggaatatggataagcatagtaacaaaacccaccagaatctaagcagttttcaccccctcagaaaccactgtcattagtttacaaagttagcactttgaagtaaaactaaatgaggaaggaagtaatgttacctatccttgataccatgaccatttattagatgttttgctatataaattaccgagagaatagtttgtcatccacttagtgtgttagctggtggggtacaatataacctctcatctcaggctattttaaaaaaacaatatttgcttctataacaaaaggaaacaaatctaagaatcattcctgtactacagaaagggttaaaggcaaaggtagccttttgggctttttaatgatatgacccctatagaaagtcaag

SEQ ID NO: 184634 - DNA, 2736 bp, Homo Sapiens
  misc_feature (1320)..(1380): n is a, c, g, or t
ttggctcgctcacggcggcggcggcggagcggagaggccagagccggagaccgagctgggatcgggccccgggcgggggcggtgcgagcggcgccaagcagatcttaggggcggggacggagccggggcgggcgggactgaagcggagcccgggaacggggcgggaggtcccagggtcccgggttgggggggtggagcagcatttcgtcgccgcgggggtgccgggactccggccgcagtgtcgccgccatcacggacttcctgtgggacaagcgcacgggcctcgccgccagaacgatgccgcatcctcgaaggtaccactcctcagagcgaggcagccgggggagttaccgtgaacactatcggagccgaaagcataagcgacgaagaagtcgctcctggtcaagtagtagtgaccggacacgacggcgtcggcgagaggacagctaccatgtccgttctcgaagttatgatgatcgttcgtccgaccggagggtgtatgaccggcgatactgtggcagctacagacgcaacgattatagccgggatcggggagatgcctactatgacacagactatcggcattcctatgaatatcagcgggagaacagcagttaccgcagccagcgcagcagccggaggaagcacagacggcggaggaggcgcagccggacatttagccgctcatcttcggtgagtgccagcccaggcccttcctctccccactcttctgcaggccctctaggactctggtaagtgagcagtatccttgttctcagctgaacattggggcatgaacactgaggtggggactgagtttgcctactttcttggaagctctccgactcttgaagggccctggatctgctttggagatggatgggcacggagcatttgtgacccccagtgctctccctggcatgttgggcttattgtgttgggagcagcttctccgccccagcggcctccactctttaatggggaccttgcttgtgaactgcctttttcccccaagccctgggctctgtagcccccttggcaggcgggcttgggtgggggcaaggggagatctgtgtctgcccggaagggcattgtgtagagcatggggttgtgggtgacattggcaacaacaccacttctctgctctgcccatgcctctccctgttcctgttttgggtttggggacttgggattatgcgccgctctctcttctcacaccgatccaccttactgcatctgacgtgttcccttccactgttccccatcatcgtctgtcccccctggctgggcgcctgtgaccggtgacccctctaccacccnnnnnnnnnnnnnnnnnnnnnnnnnnnnnnnnnnnnnnnnnnnnnnnnnnnnnnnnnnnnngacagcagcacagcagccggagagccaagagtgtagaggacgacgctgagggccacctcatctaccacgtcggggactggctacaagagcgatgtacaagccaaatcgtaacaatcctatagcctgtaatggtcccatagccatcctaacgtcccaagccaacctgagtcacagcctcttgccttttctcagtggtgttgtttatctgggtggtttgagttgctgttgagaattgacctctgttgtccactcccagctctcacggcccctgggttaaaggtggtgggaatcacgcaggggttttcttcccctgtgaccatctgtatctgttccccttccttcatctccaccccaggttgctgtccccttttttcttccaactcagctcattccccaccttctctccctccctctccccgaccctgctctctttcatttcagatgaaatcgttagcaccttaggagaggggaccttcggccgagttgtacaatgtgttgaccatcgcaggggtggggctcgagttgccctgaagatcattaagaatgtggagaagtacaaggaagcagctcgacttgagatcaacgtgctagagaaaatcaatgagaaagaccctgacaacaagaacctctgtgtccagatgtttgactggtttgactaccatggccacatgtgtatctcctttgagcttctgggccttagcaccttcgatttcctcaaagacaacaactacctgccctaccccatccaccaagtgcgccacatggccttccagctgtgccaggctgtcaagttcctccatgataacaagctgacacatacagacctcaagcctgaaaatattctgtttgtgaattcagactatgagctcacctacaacctagagaagaagcgagatgagcgcagtgtgaagagcacagctgtgcgggtggtagactttggcagtgccacctttgaccatgagcaccatagcaccattgtctccactcgccattaccgagcaccagaagtcatccttgagttgggctggtcacagccttgtgatgtgtggagtataggctgcatcatctttgaatactatgtgggattcaccctcttccagacccatgacaacagagagcatctagccatgatggaaaggatcttgggtcctatcccttcccggatgatccgaaagacaagaaagcagaaatatttttaccggggtcgcctggattgggatgagaacacatcagctgggcgctatgttcgtgagaactgcaaaccgctgcgggtcagacagaaaagataaactacctttgaagagcttacattttaatgaggaactaaagaaggattcatgaagttgacaaggatat

SEQ ID NO: 184635 - DNA, 888 bp, Homo Sapiens
  misc_feature (827)..(835): n is a, c, g, or t
gaatattcagtcgttggcacataaactatgttctcttctgtcatttcagggtaggagtcaatgaagacatcttagtcttaacaagttacagataatctctgactggcatgttttctgcttctagcttggagctaaatgctgctcatgctgaaaagaataatgtctatttctttgtttgggtattagctctattttgatctatagcacagttttgtaattcagatcatcacccctgcactttgtaccacatgggcgtattctttcttcccagtcattgctgcaattatcttgtctgttctttgtgtaatatgttctgtgtgagcctctgcattaaactcgatttcttgggcaattatggaaattccagtgtggctgcagtttaactttgcactctctatgcatatgaggtttcctaaataaatgaggagtagcatagtttaaaatatatatatcttataactttctacaacaaagaattattgagtccaaatgtcatcagtgctcattttgagataccctgctatcgatggtcgctacaaaccaggaaatactcaagttattatgtgtatacatttggttttagttttatgaaacaatttaccttcatgatctcatagttaaaattgtaataaatttaggaatataaaggatcaatatgggaagcaaaatttctaaaggcagtttctgttgttttaattagtatttgtgtagttcaaaccaggaaggatttgactatcattagattttgcttaactttatgaaagctaaaatattctctgttataaaggggcaactccatctggtcctatagcatctttactactgannnnnnnnngtttaatttgaaaatgcaaagaattgttaaatgttcttaaatgttctcactac

SEQ ID NO: 184636 - DNA, 1048 bp, Homo Sapiens
tagcctgcagtttcacaggtatatgaggcatctcctggaacccctagactctttgcaatcgtttgacttcttctaaaagttctattcttcgagccagaacataattaactcttccatacgtgctgaaatctttctctgtctccagctcttcttctccatgaccaagacgcagtaggtggcgctcatcaatgtctaatgccatgattttctcaaacaactggtttagggcctgattggaatgagtaacaattagagtcctctgttctgggaagttgtggtagatgttggatatgatctgaactgccacatctgttttgcctgtaccaggtgggcccacaaccatagtcagcccaggctgcattccagcacggatggcttctatctgtgtatgagtgaactgaatcgtattacgtttgggttgattataaggataaggacccctattaggaataacatggggctcaacaattaaggtttttgcttcctcggtgtcttcatcttccacatccgcatctttccttttcttcccttttccacttcttactggaaaagttatcctgaaagggggtatttgtagagcagggtcttctacagttactttaacattatgaccagggaagctggcttttaaatgctcaatggagagaaatgtatcattgaaatcaagggtggcaatctgattgggcattttcgaataatgtgcactacttgggtccccataacctaaaatgatatcgtgcagccagtcaggtaccacacaatcagtattcatcaggttccgaatagtctccagcacagccttaaagttattttcctttggttttctcctcattattatattaaaagtttcatacacatcctctgctccattttgtatagtattggtcatatcttgttgatactggtttggatccaaaaacactctaaatgtccttgattctcctctaagattgggtctgggttcaggtccatcttcaatgacacgtcctttatcatccagcatgccctgaatttcacagcctgtgacataaaccccaacttttttgta

SEQ ID NO: 184637 - DNA, 1798 bp, Homo Sapiens
  misc_feature (194)..(202): n is a, c, g, or t
ttatttggaagtccctatatgtgtcaaatattgagctttctggcacataagttgataatactgactttgttttataaacagggtttgtgataagcatgttgtgaacacttctgggccagttaaatggtaaagaccacaaagcatttttatttatgagaagacatcctacaatacaatgaattaacatacccacnnnnnnnnnccagatacagtttatgtaacttgatggaagaaaatggaattactccaaaaagacaagtgctcaagcagcaaaatccttacttccagcaaaatccaaactgctgtctcttaaatctcttaaactctcttcttccattagaatgctacaagtaactcagtgaaggcccatgaaggaaattgggactagtttataggagaacgtatcaatacagtttataaagccaagaattgctatgatttaagactaagatctgtctttttggtgactaacccttcaattctttcaactcctgttaatacccataatcagtaacctatcaagaaaagcccttatttggaaagtgtgaaatttgtatttggaaaagctgcctggagagaagaactgtgtcctttactgtatttcaacaggactcttttgggggatcaaaattaaaattcctaattatgcattatctttcttttctccagtcctcacaaatacagaaacaataactgaaattaacttttctttttttaaaaaaaattatattcagtttgcagtagacattccttaagtatttgtatttatttatgattatcaattttacataacattaatattgtatcagacctccttatgaaaatgagtatggatgtgcacagtatgtttgatttttatccacaagaatgaatctgattcagaatgcttttctcagctgacatacagagcactaaatattttaaggcaagtccataggtctgaatctcttaagaattctcggcctctgtgggatttagggaagcattataaatgcattaatccttatagtcaattctgtgcctaggattttgccagggaacagttcactgactaggaaaagcactacattttaaattcagcattagtgcattgggaaggatctttactgctttgtgcttggcatgtcattattttccatttgacattagggcctttccaaaatgaatgtgaggaattgctttcacttcaagactttccttcttttcactaaaactctagaaggtgttacaagggggagggaaggggggcaaagtccttgaacattttctttggctcgtgccatgttatgatcatataccttttaaataaggggaaatagtatctttaaagttaatgtctagccaagagtttagtaaacgaagaattaaactgcactgttgatcggtgctttgtgtaaatacatctttaacatttgggtggagaggggccttaagaaggacagttcattgtaggaaagcaattctgtacatgagtttaagcattcttgttgcattgtctctgcagattctatttttgtttacaatattaaaatgtatgttagcaaaatgggtggattttcaataaaatgcagcttccacaaaagttttgttatggtattctggtctgagatgcattttcatttttcctttctctttttattatcaatattgtcatttttccctaataaaatatacccaggtgattatatttgttgatctaataacatggaaggtttgttttatatgaattttcaaaaagatgtctctttacactttttgttaccttgtagactcttattgataaatgcaactacttatt

SEQ ID NO: 184638 - DNA, 1503 bp, Homo Sapiens
ttggcatttattaggcggtatagtagatatttaaatgagaaagcagtttcatacagacaagttgcatttgatttcacaaaagtgaagagaggggctgatggagttatgagaacaatgaacacagaaaaactcctaaaaactgtaccaattattcagaatcaaatggatgcacttcttgattttaatgttaatagcaatgaacttacaaatggggtaataaatgctgccttcatgctcctgttcaaagatgccattagactgtttgcagcatacaatgaaggaattattaatttgttggaaaaatattttgatatgaaaaagaaccaatgcaaagaaggtcttgacatctataagaagttcctaactaggatgacaagaatctcagagttcctcaaagttgcagagcaagttggaattgacagaggtgatataccagacctttcacaggcccctagcagtcttcttgatgctttggaacaacatttagcttccttggaaggaaagaaaatcaaagattctacagctgcaagcagggcaactacactttccaatgcagtgtcttccctggcaagcactggtctatctctgaccaaagtggatgaaagggaaaagcaggcagcattagaggaagaacaggcacgtttgaaagctttaaaggaacagcgcctaaaagaacttgcaaagaaacctcatacctctttaacaactgcagcctctcctgtatccacctcagcaggagggataatgactgcaccagccattgacatattttctacccctagttcttctaacagcacatcaaagctgcccaatgatctgcttgatttgcagcagccaacttttcacccatctgtacatcctatgtcaactgcttctcaggtagcaagtacatggggagatcctttctctgctactgtagatgctgttgatgatgccattccaagcttaaatcctttcctcacaaaaagtagtggtgatgttcacctttccatttcttcagatgtatctacttttactactaggacacctactcatgaaatgtttgttggattcactccttctccagttgcacagccacacccttcagctggccttaatgttgactttgaatctgtgtttggaaataaatctacaaatgttattgtagattctgggggctttgatgaactaggtggacttctcaaaccaacagtggcctctcagaaccagaaccttcctgttgccaaactcccacctagcaagttagtatctgatgacttggattcatctttagccaaccttgtgggcaatcttggcatcggaaatggaaccactaagaatgatgtaaattggagtcaaccaggtgaaaagaagttaactgggggatctaactggcaaccaaagttgcaccaacaaccgcttggaatgctgcaacaatgcctccacaaatgggaagtgttcctgtaatgacgcaaccaaccttatatacagccagcctgtcatgagacctccaaacccctttgg

SEQ ID NO: 184639 - DNA, 1345 bp, Homo Sapiens
ttggcctagttcttctaacagcacatcaaagctgcccaatgatctgcttgatttgcagcagccaacttttcacccatctgtacatcctatgtcaactgcttctcaggtagcaagtacatggggagatcctttctctgctactgtagatgctgttgatgatgccattccaagcttaaatcctttcctcacaaaaagtagtggtgatgttcacctttccatttcttcagatgtatctacttttactactaggacacctactcatgaaatgtttgttggattcactccttctccagttgcacagccacacccttcagctggccttaatgttgactttgaatctgtgtttggaaataaatctacaaatgttattgtagattctgggggctttgatgaactaggtggacttctcaaaccaacagtggcctctcagaaccagaaccttcctgttgccaaactcccacctagcaagttagtatctgatgacttggattcatctttagccaaccttgtgggcaatcttggcatcggaaatggaaccactaagaatgatgtaaattggagtcaaccaggtgaaaagaagttaactgggggatctaactggcaaccaaaggttgcaccaacaaccgcttggaatgcggcaacaatgaatggcatgcattttccacaatacgcaccccctgtaatggcctatcctgctactacaccaacaggcatgataggatatggaattcctccacaaatgggaagtgttcctgtaatgacgcaaccaaccttaatatacagccagcctgtcatgagacctccaaacccctttggccctgtatcaggagcacagatacagtttatgtaacttgatggaagaaaatggaattactccaaaaagacaagtgctcaagcagcaaaatccttacttccagcaaaatccaaactgctgtctcttaaatctcttaaactctcttcttccattagaatgctacaagtaactcagtgaaggcccatgaaggaaattgggactagtttataggagaacgtatcaatacagtttataaagccaagaattgctatgatttaagactaagatctgtctttttggtgactaacccttcaattctttcaactcctgttaatacccataatcagtaacctatcaagaaaagcccttatttggaaagtgtgaaatttgtatttggaaaagctgcctggagagaagaactgtgtcctttactgtatttcaacaggactcttttgggggatcaaaattaaaattcctaattatgcattatctttcttttctccagtcctcacaaatacagaaacaataactgaaattaacttttcttttttt

SEQ ID NO: 184640 - DNA, 1164 bp, Homo Sapiens
ttgggataaagttggttttatttcaagaagtcgatcaaaaagaaagccccagcgctctagagctcagctgacgggaaagggggtgcgcagcctcgagtttgagagctacccggagctccaagacaggggtgggttccagctgcccgcacgccccgaccttccatcgtaggtaacgcggaagagcccgggagagcgttggtggcgtccgagagcgaggagcgggaaagaggatgggtctgcacggagagtggaaaggcaggctgtgtactctggggaaagtggagcaaggaaggagctacagtggccgacgctggaggtcggctgcagaaaaactagaaaaagtagggaggaaagaggaaaagaggaggcgtctacactgagggggttctagagagggaggggtggactccgtagatgggggtagttcagtctcgaaacctggggcgtgctctgtcctggaggagggaggcgggcagtcggaggggaattgaatggaagttctgtgttggaaatgttttgggagatcttctgtagggggactgtggaagggggtctacattggggtaagtgcaggaggtagaggcttacacgtgaatcgattctgcactgaaataactagggaaagaggatgctaccctgaaagtggggatacttactttcgatgatgtgggggagggaggaggtctatactggcggaattgagggagtggagggtctgcactgaagacgctggggaaggatgtgccatggatatgggaaggaaccctagctgattagagagcctctcgggaggatgggaggatgggaagaggaggtttcctgtttgtacccccgaaaatatgggtgaaggacctgtgccgtggcccgtgagaaggaggtctgggtgcggaaactccaggccaggtgggtccgggggaggccggtcgcgcccaggaaatgccctatacgcgcaggccggaccatgggaaccccaaagccacggatcctgccctggctggtgtcgcagctggacctggggcaactggagggcgtggcctgtgtgaacaagagccgcacgcgcttccgcatcccttggaagcacggcctacggcaggatgcacagcaggaggatttcggattcttcaggcctgggccgaaggccacctggtgcatatgttcccggga

SEQ ID NO: 184641 - DNA, 955 bp, Homo Sapiens
  misc_feature (365)..(383): n is a, c, g, or t
  misc_feature (408)..(452): n is a, c, g, or t
  misc_feature (500)..(621): n is a, c, g, or t
ttggcaaaaacagcctcctctccatagctgggaagtttattttgttttgtctctgaagacagcagttttattgcatcactaaatctaatcaagctaaaacatccctgtttccttttgcaaaacagtgcctggcatgggtgggatccaggcgttctttaggatccttggataccacatcgtgaaatcttttatttttttactctgagaccagcaccagatgtaagtaagcatctcatatatttcagccaaataaatgggccaagggaaaaaaatatatatatatagacaggactagagaaaacctatttttgtaatgatgtttctttggatactgtctagtcacccagaaaaatgtatggatgaannnnnnnnnnnnnnnnnnngagacaaagtctcactgtgtcatgnnnnnnnnnnnnnnnnnnnnnnnnnnnnnnnnnnnnnnnnnnnnntgtctcagcctcctaaataactgggattacaggtgcccaccaccatgnnnnnnnnnnnnnnnnnnnnnnnnnnnnnnnnnnnnnnnnnnnnnnnnnnnnnnnnnnnnnnnnnnnnnnnnnnnnnnnnnnnnnnnnnnnnnnnnnnnnnnnnnnnnnnnnnnnnnnnnnnatgagccaccatcttcagccagatgatttttttattgagagagtgaaatgctattttgttccccaaatggcgctagtgaatcactaggagggtcccactgataggccatgtttagcactggttgccagggattctctttttgagagagggaaagcaaaatgaatggaagtacccagctggaggtttcagggcttctggaggatgctctcgcatagctcgaggtcctctgcccacctcttctctccaaggaaaatgaggactgccccttccccctgcaggattggcccccagcctgcgcatgcaccctcctcttgccaagtggggagcacagagg

SEQ ID NO: 184642 - DNA, 1332 bp, Homo Sapiens
  misc_feature (177)..(234): n is a, c, g, or t
ctttgtacaaaaaagttgggtcattcggagccctgcggatttgattcgattcatagaggagctgaaaggtggaacaaaaaaggggaagccaaatataggccaagagcagcctgtggatgatgctgcagaagtccctcagagggaaccggagaaggaaaggggtgatccagaacggcnnnnnnnnnnnnnnnnnnnnnnnnnnnnnnnnnnnnnnnnnnnnnnnnnnnnnnnnnnacggcagttactgggagaatttgagaaggaactggaagggatcctgcttccgtcagaccgagaccggctccgttcggaggtgaaggctggcatggagcgggaactggaaaacatcatccaggagacagagaaagagctggacccagatgggctgaagaaggagtcagagcgggatcgggcaatgctggctctcacatccactctcaacaaactcatcaaaagactggaggaaaaacagagtccagagctggtgaagaagcacaagaaaaagagggttgtccccaaaaagcctcccccatcaccccaacctacagggaaaattgagatcaaaattgtccgcccatgggctgaagggactgaagagggtgcacgttggctgactgatgaggacacgagaaacctcaaggagatcttcttcaatatcttggtgccgggagctgaagaggcccagaaggaacgccagcggcagaaagagctggagagcaattaccgccgggtgtggggctctccaggtggggagggcacaggggacctggacgaatttgacttctgagaccaacactacacttgacccttcacggaatccagactcttcctggactggcttgcctcctccccacctccccaccctggaacccctgagggccaaacagcagagtggagctgagctgtggacctctcgggcaactctgtgggtgtgggggccctgggtgaatgctgctgcccctgctggcagccaccttgagacctcaccgggcctgtgatatttgctctcctgaactctcactcaatcctcttcctctcctctgtggcttttcctgttattgtcccctaatgataggatattccctgctgcctacctggagattcagtaggatcttttgagtggaggtgggtagagagagcaaggagggcaggacacttagcaggcactgagcaagcaggcccccacctgcccttagtgatgtttggagtcgttttaccctcttctattgaattgccttgggatttccttctccctttccctgcccaccctgtcccctacaatttgtgcttctgagttgaggagccttcacctctgttgctgaggaaatggta

SEQ ID NO: 184643 - DNA, 1967 bp, Homo Sapiens
  misc_feature (1268)..(1320): n is a, c, g, or t
ttggaacagattctctgcataagaaggggggcgaaagatggcggcggaaacgctgctgtccagtttgttaggactgctgcttctgggactcctgttacccgcaagtctgaccggcggtgtcgggagcctgaacctggaggagctgagtgagatgcgttatgggatcgagatcctgccgttgcctgtcatgggagggcagagccaatcttcggacgtggtgattgtctcctctaagtacaaacagcgctatgagtgtcgcctgccagctggagctattcacttccagcgtgaaagggaggaggaaacacctgcttaccaagggcctgggatccctgagttgttgagcccaatgagagatgctccctgcttgctgaagacaaaggactggtggacatatgaattctgttatggacgccacatccagcaataccacatggaagattcagagatcaaaggtgaagtcctctatctcggctactaccaatcagccttcgactgggatgatgaaacagccaaggcctccaagcagcatcgtcttaaacgctaccacagccagacctatggcaatgggtccaagtgcgaccttaatgggaggccccgggaggccgaggttcggttcctctgtgacgagggtgcaggtatctctggggactacatcgatcgcgtggacgagcccttgtcctgctcttatgtgctgaccattcgcactcctcggctctgcccccaccctctcctccggcccccacccagtgctgcaccgcaggccatcctctgtcacccttccctacagcctgaggagtacatggcctacgttcagaggcaagccgtagactcaaagcagtatggagataaaatcatagaggagctgcaagatctaggcccccaagtgtggagtgagaccaagtctggggtggcaccccaaaagatggcaggtgcgagcccgaccaaggatgacagtaaggactcagatttctggaagatgcttaatgagccagaggaccaggccccaggaggggaggaggtgccggctgaggagcaggacccaagccctgaggcagcagattcagcttctggtgctcccaatgattttcagaacaacgtgcaggtcaaagtcattcgaagccctgcggatttgattcgattcatagaggagctgaaaggtggaacaaaaaaggggaagccaaatataggccaagagcagcctgtggatgatgctgcagaagtccctcagagggaaccagagaaggaaaggggtgatccagaacggnnnnnnnnnnnnnnnnnnnnnnnnnnnnnnnnnnnnnnnnnnnnnnnnnnnnnggatgaacggcagttactgggagaatttgagaaggaactgtaagggatcctgcttccgtcagaccgagaccggctccgttcggagacagagaaagagctggacccagatgggctgaagaaggagtcagagcgggatcgggcaatgctggctctcacatccactctcaacaaactcatcaaaagactggaggaaaaacagagtccagagctggtgaagaagcacaagaaaaagagggttgtccccaaaaagcctcccccatcaccccaacctacagaggaggatcctgagcacagagtccgggtccgggtcaccaagctccgtctcggaggccctaatcaggatctgactgtcctcgagatgaaacgggaaaacccacagctgaaacaaatcgaggggctggtgaaggagctgctggagagggagggactcacagctgcagggaaaattgagatcaaaattgtccgcccatgggctgaagggactgaagagggtgcacgttggctgactgatgaggacacgagaaacctcaaggagatcttcttcaatatcttggtgccgggagctgaagaggcccagaacgacgccagcggcagaaagagctggagagcaattaccgccgggtgtggggctctccaggtggggaggg

SEQ ID NO: 184644 - DNA, 1065 bp, Homo Sapiens
ttgggtctgcagctgctccgggtagcccgctaggcgcgccgtccccagccccgccgccggccctcggtgcgcccggccgcctgcacccccaggagcagctgctgtgaataaacacagaagtggagctgggggactgattagaagcctcattcagtgcacctgggccccagcaggcccagccaggcgtggaggaagaggcattgaggactttccttacctgtttttccagctcacccactgccagcagagaatgctgtccagtttcaacgagtggttttggcaggacaggttctggttaccacccaatgtcacgtggacagagctagaagaccgggatggccgtgtctacccccacccccaggacttgttggcagccctgcccctggcgctggtcctcctggccatgcgccttgcctttgagagattcattggcctgcccctgagccggtggctgggtgtgagggatcagaccaggaggcaagtgaagcccaacgccacgctggagaaacacttcctcacggaagggcacaggcccaaggagccccagctgtctctcctggccgcccagtgtggcctcacgctgcagcagacccagcgatggttccggagacgccggaaccaggatcgaccccagctgaccaagaagttctgtgaggccagctggaggtttctcttctacctgtcctccttcgtgggcggcctctcggtcctgtaccacgagtcatggctgtgggcaccagtaatgtgctgggacaggtacccaaaccagactctgaagccatccctgtactggtggtacctcttggagctgggtttctacctctcactgctaatcaggctgccctttgatgtcaagcgcaaggatttcaaggagcaggtgataccccacttcgtggcggtcatcctgatgaccttctcctacagtgccaacctgctgcgcattggctctctggtgctgctgttacactattcttctgactacctgctggaggcctgtaagatggtcaactacctgcagtatcagcaagtgtgcgacgctctcttcctcatcttctcctttgtctt

SEQ ID NO: 184645 - DNA, 1315 bp, Homo Sapiens
ttggccagaagtgatcccagatcccgccaagcagacagacagagtggtgaaaatagcaggaattagtgctggaattttggtgttcatcctccttctcctagttgtcatattaattgtaaaaaagagcaaacttgctaaaaaacgcaaagatgccatggggaatacccggcaggagatgactcacatggtgaatgcaatggatcgaagttatgctgatcagagcactctgcatgcagaagatcctctttccatcaccttcatggaccaacataactttagtccaagatatgagaaccacagtgctacagcagagtccagtcgccttctagacgtacctcgctacctctgtgaggggacggaatccccttaccagacaggacagctgcatccagccatcagggtagctgatttactgcagcacattaatctcatgaagacatcagacagctatgggttcaaagaggaatatgagagcttttttgaaggacagtcagcatcttgggatgtagctaaaaaagatcaaaatagagcaaaaaaccgatatggaaacattatagcatatgatcactccagagtgattttgcaacccgtagaggatgatccttcctcagattatattaatgccaactatattgatggctaccagagaccaagtcattacattgcaacccaaggtcccgttcatgaaacagtgtatgatttctggaggatgatttggcaagaacaatctgcttgcattgtgatggttacaaatttagttgaggttggccgggttaaatgctataaatattggcctgatgatactgaagtttatggtgacttcaaagtaacgtgtgtagaaatggaaccacttgctgaatatgtagttaggacattcaccctggaaaggagggggtacaatgaaatccgtgaagttaaacagttccatttcacgggctggcctgaccatggagtgccctaccatgctacagggctgctttcctttatccggcgagtcaagttatcaaaccctcccagtgctggccccatcgttgtacattgcagtgctggtgctggacgaactggctgctacattgtgattgacatcatgctagacatggctgaaagagagggtgttgttgatatttacaattgtgtcaaagccttaagatctcggcgtattaatatggtccagacagaggaacagtacatttttattcatgatgccattttagaagcctgcttatgtggagaaactgccatacctgtctgtgaatttaaagctgcatattttgatatgattagaatagactcccagactaactcttcacatctc

SEQ ID NO: 184646 - DNA, 1596 bp, Homo Sapiens
gcaaagcgaaattatttactctctggccatttacagagaatgtttcagactcctggcccggtctgtcccttcccagtccagccagatcccacgacctgccccagcccagccacatctggctgcacccacctgtacatgaggacaatgatgatgacacccagagccagaagagaggtgcccacccccaagcccacctgggctgccacaggaaaagccccagggctctcgccgtcatactgcacgtgacccagggagaagcgcaagttccccatctgcaccgtgaactcaggcaaagagtcaggtgcctctcggagggcatggtgccgtggcaggggctgctccacggggggctcgcagtacaggtggtgccgcgtcagcgtcttcaccacacaggggccatcccctatcatagccaccacctcctccttggacattgcaaggtccaggttctccccctccacggagaacacactcccaggcttgtgccggaatggcatggtggggtcctcagggttgagtggctgcagggtggggtcggcctcataggagaaaggtgtggggttcagtgttgcaaagtcaaagaccaggttgtcaaggataaattccacccggacccaggggtcctcaggcaggcctgggagggcaggtgtgcggcacgtgatgagctgggaggagttgacatggcacggctcctcaaattgctggctactgcaggagggtccaagggaacatgccgtctccgggaccacgcgacgcctccgtccaagcccctggctgggctgcagcattctcgagaccacggtcacccggattcttggcgtctgtaccacgtccagattctggccacggacgcatatctcacgtcctccactgaggaagctcttggtggggccagcagaggtgatgttgccaaccaaggtatacttgaactgtccgcgttgaagcctccgctccgtggccccaaaccacacagccacagggagcgtggcaggcgtggggcgtgggctggtctcacaccgcagttgttctgactgctgctccggcagcaagtgacaaggctggtctccaaccaccactcggatgtcctccagccgcccagtcaggagcttggagccattcagggtgagacgggtgcccccagctctggggccgcgggccgggaagatggaatggaccttcggatcctggtaggcaaagtcgtgttctgagacaccacgtcctcttcccggcacctccaccgctgtggcgccggccacctcctccccactggccccggtgatgcacacgaggctgtaggcacagggcaggctagggggtgccaggctgcatcaagggcccctcaagcttacctggcagcccctctccctgccctactgtcaggtggtcttccccttcccatgctccataagattgacagagaccctctctcactttggagggaattctttatgacacatcagaaggccttggtatctgagaattaatatttgtggcttcaatcatttaagttcaaccccaggggcccccaataaggaagaatttatctgtggcataaatttacaaaggggccctgtcagcctggttgtggggcgccaa

SEQ ID NO: 184647 - DNA, 1979 bp, Homo Sapiens
  misc_feature (165)..(176): n is a, c, g, or t
ttggcttaaaactataatcctagcagaggacatcagatattgtgtagtcgttagcaagatcatcataggcaaacatatatccgttccaaggctaaaagtgaccttaactgtatttattctcaaagggaaaggaaatatcagatgtttatttggttatagaatgcnnnnnnnnnnnngggtccatttcctgctgtgttgagtattttgcttcaacagtattgccaggttcctaaaattgtctaaaaacatgatttggcttccatttttgcagctgcactgtaccatgcacctggtttctatatagtaacagtgtgcaattctaattattggactgtgccctgtttttagttttcaaatcaatttctaattctggtgattgtgtgatgtaaagaggtgctatgatggtcatgcaattaatactaaatattgaatcaatgcccagagctttattggattcactttgtgtgtgttagtgctctaaagtagcagtattattattaaactgtccccagagtaaccctgtaggcctaaagtactcagttttaagacaaacactacttcccatgcggggtactttccttatggtaaatgtaaacatgtagactgcattcgaggtgacctaaagtagagaggtcatgaactttgagaatgggcttcctttttggttcagtattagtgagagggagagggagatggatggtggggtaggttttctagtctatcattttacatttttcatggagtccctgcttagtgcagtttccattggaatgggtggaagatgataaagctctcttttttatctactaataatgtgattgcaacttaaaatagcaaaacccaactctccctgtccctccaatccctctcctaaaaagttcagtttggaatctcattctggaaaagatggaatcgcatggagattctctagctgttaggtagacctaaataaaaagttctcaatagattcctcttttgagtaaatataagacctcttgtagctacaatgttttagagcatgtttcatcttcatttttaatatcctgaactgaatgatagtgtttttttagatgaagaactgatgtcagcctgccaggtactgtaatttattctatcatattattatattatatatcaagtaggacagtgaaaaatgtttccttgcaaacttgtagtccagtatcagttacttcctatttttatccttaaaagaccattgcaaatcagtgtaagggtttttccagtaattactcacagcactttgttaaagtttgcaatttcttcagccatttaataatatctttctgtgaagaaactttgctgagttaaccataaatgttcattcattgactgggtgggatgtgaatggaatgttagaaatgttgtgtgaattgaagttctgtattcattatagatgtagcccttatttaaaaaagtgaattccatactaaaactaggaatgaaagtgagagatttctaaacttttgcgaaagtgggtcattttttgtttgactataatagcaggaagaattatagcaatctgtcattttacctgaaacagacaagcctatgtattatgaatactttcaagcttccctttggaatatacaagacatgcgtttggagttacctttgtttttctatcgtaaatttagattctggaattggggtttggtggtgcaatgtgttgctcacaagtggccagaactcctattcctaaaaggattttgagatggaggaacacatatttaattcccctttatgccttggttcttgctcctctttccacgttggataacaattttttggttgttttgtttaagttggtgctctgaagcttaatctcagtaccctttactctgaattgtcaaattttgataaaacgtgccattttctttggtaagagaaagcaggtcttaatgtctgccagaacacaatttatatgccttattggcttcattaaacttttagaaaacttt

SEQ ID NO: 184648 - DNA, 963 bp, Homo Sapiens
ttggcccctcttagcagcagcgtctatgggtcatgcatcagttgtaaatacacttttgttttggggtgcagctgtggatagtattgatagtgaaggtaggacagtcctcagtatagcttcagcacaaggaaatgttgaggtggtacgtactctactggatagagggttagatgaaaatcacagagatgatgctggatggacacctttgcacatggcagcttttgaagggcacagattgatatgtgaagcacttattgaacaaggtgctagaacaaatgagattgacaatgatggacgaatccctttcatattagcttcacaagagggtcattatgattgtgttcaaatattactggaaaacaaatccaacattgatcaaagaggttatgatggaagaaatgcactgcgggttgctgcattagaagggcacagggacattgttgaattgctttttagccatggtgctgatgttaactgcaaagatgctgatggtcggcctacactttatatcttggccttagaaaatcagcttacaatggccgaatattttttagaaaatggtgcaaacgtagaagcaagtgatgctgaaggaaggacagcacttcatgtgtcttgttggcaaggccatatggaaatggtgcaggtcctgatagcataccatgctgacgtcaatgctgcagacaatgaaaagcgctctgctttgcagtctgcagcctggcagggccatgtaaaagtggttcagcttctgattgagcatggtgctgtagttgaccatacatgtaaccaaggtgcaactgcactctgtattgcagcccaggaagggcacattgatgttgttcagtcttattagagcatggtgctgatccaaaccatgctgatcaatttggacgcactgctatgcgtgttgcagccaaaaatgggacattctcagataattaaattattagaaaaatatggtgcatc

SEQ ID NO: 184649 - DNA, 2627 bp, Homo Sapiens
ttggcccagcctccagtgccccaaggggaggcagaagaagacagtcaaggaaaagagggcccaagtggatcaggggactctcagctgagtgcttcctctagatcagaaagtggacggatgaaaaaaagtgataataaaatgggcataaccccgcttagaaattatcaccccattgtagttcccggactggggcgttctctaggatttctgcccaaaatgcctcgcctgcgggtggtccacatgtttctgtggtacctcatctacgggcaccctgccagcaacaccgtggagaagccaagcttcatcagtgaacggagaacgataaagcaggagtcaggcagggcaggcgtccggccgtcctcctctggaagtgcctgggaggcctgctctgaagccccatctaaaggcagccaagatggtgtcacctgggaggctgaagtggagcttgccacggagacagtgtatgtcgacgatgcctcgtggatgcgctacatccccccaatcccagtccacagggacttcggctttggctgggctctcgtcagcgacatcctcctctgccttcccctctccatcttcatccagattgtgcaagtcagctacaaggtggacaacctggaggaatttctgaacgacccgctgaagaagcacacgctgatccgctttctccccaggcccattcggcagcagcttctgtacaagaggcgttacattttttcggtggtggagaaccttcagaggctgtgctacatggggctgctacagtttggtcccacggaaaagtttcaggataaagatcaggtctttatcttcttgaagaagaatgcagtcattgttgacactaccatctgcgacccacattacaacctggcccgcagcagccggcccttcgagaggcgcctctatgtcctgaactcaatgcaggatgtggaaaactactggtttgacctgcagtgcgtctgcctcaacaccccactaggcgtggtgcgctgcccgcgcgtcaggaagaacagcagcacagaccagggcagcgacgaggagggcagcctgcagaaggagcaggagagcgccatggacaagcacaacctggagcgcaagtgcgccatgctggagtacaccactggaagccgtgaggtggtggatgaaggcttgatccctggagatgggctgggtgccgcagggctcgattccagcttctacggacacctcaagcgcaactggatctggaccagctacatcatcaaccaggccaaaaaggagaacactgccgcagagaatggactcacagtgaggctccagacatttctgtccaagcgcccaatgcccctcagtgccagaggcaacagcaggttgaatatttggggggaagcaagagtaggctccgagctctgtgctggctgggaagagcagtttgaggtggaccgagagccctcgctggaccgaaaccggagagtgaggggtgggaaaagccagaagcggaagcggctgaagaaggaccctgggaagaagatcaagagaaagaagaaaggagagttcccaggagaaaaaagcaaaaggctgcgctaccatgatgaagccgaccagagtgccctgcagcggatgacgcggcttcgtgtcacctggtctatgcaggaggatgggctgcttgtgctgtgccgcattgccagcaatgtcctcaacaccaaggtgaaggggccatttgtcacctggcaggtggtacgggacattttgcatgccacgtttgaagagtctttggataaaacatctcattccgttggacgaagagctcgctacatagtcaaaaacccacaggcctatctcaactataaagtgtgcctggccgaggtgtaccaggataaagcacttgttggagatttcatgaatcgaagaggtgactatgatgacccaaaggtttgtgccaacgagtttaaagaatttgtggagaagcttaaagaaaagttcagttcagccctaaggaattctaaccttgaaatcccagacacactccaggagctgttcgccaggtaccgagttttggcaattggggatgaaaaagatcaaaccaggaaagaggatgaacttaacagcgtggatgacatccactttctggtgcttcagaacctgatccagagcacgctggccctctcagacagtcagatgaagtcctaccagtcattccagactttccgcctctatcgggagtacaaggaccacgttcttgtgaaggccttcatggagtgccagaagaggagcttggtcaaccggcgccgggtcaaccacacgctgggccccaagaagaaccgggccctccccttcgtgccaatgtcctaccagctatcccagacctactacaggatttttacgtggcgatttccaagcaccatctgcacggagtcattccagtttttggacagaatgcgggctgccggcaagttggaccagcctgatcgtttctctttcaaagaccaggataataacgagcccacaaacgacatggtggccttttcactggacggccctggaagaaattgtgtggccgtcctgaccctcttctctctgggcctcatttctgtggatgtcaggatcgcggagcagatcatcgtggtagacagctcaatggtggagaa

SEQ ID NO: 184650 - DNA, 2183 bp, Homo Sapiens
gagacccagagacaagaagcaccaactcccagtgtgatgaggccagttcccaaggggaaggcccagaagagcctgggggatgggcaggtcggggagcccctctttccagagttccagtacagtgggaaacgtgtcagtctgtgactctggccaaagcacccgtcccatgctgcaggaggctcggcagacccaaggccagggcacagtggggtctgccgagcaccaggcaggagtggtgtggcaggcggtggctgggagggaggggacgcccacaggggtcctagaggtggatccacttgttccagttgacctcgtgggggaacacacggcccagccggagggtacagtccaaggtgggctcatagaaagccatggggctcttgtccaggctggagggcacttccacctcttccaccacgggtgtagagaagagcgagacaggccttggctttctcagccagcgcttccggatgcagccgagggactccaggccctggagcaactccagcacggcgacgggctgcaggaccccctggtagtggcgcagcagggagctctcggggatgccaggcctggtcatgatgtggtacagcatggcctccatcatacccttgcatacaggaaggttcaggtggccatccacgacacgccacggccggccgatgaagcagacactctcacagtccctttcccgtgctgcctgggagatgttggcagctccgaaactctctgtgaaccctctggggtcttcagagccctctggaggctgcgcctggccgctcagctgctcttggcctggggaactgaactcaccgacaccctcatggtcttcctgtgctgctcccgctgcagcggtgtcttcaagagctgggggtggagatggggcctgggcttctgccccatcttcagctccgggcccaaggctgggggccaaatttgagtcctggagcgctggcctcttggcaggggtcatctgggtgccctcggcgtcggtctccccattctcactggcccagctggcgcgcctcttggtgccccgggggctgtgagaaggaggtgcctgcccctcgggggggctgtcctcactggaagacccctccaggggtctggcctgggggtcttctctctggatgtcggcgtcttctctgtctttcagccgcacggagtgcaggagccaaggccaggcagagcccatggctaccaggcgcgcagtgttgccaccgacctccagcacctgatgctgctccaggagggcctggatgcaatctgcgaatgtcctggtgcgcccaccacctgccttctccaaggccgagaaccgtctgcgcagctcctccttgtcaatcccaaaacaacccgtggctataatggcttccaagatctccaaggcagcagtcaggtcttcgggactatacccagacagctccagctggaggacaaactcctccaagctgcaggtgttttcctgggggtttatcagcttggtgaacgtatcagggaggcaggaggttcccattgttagctcttccagaggagcggcagcgggcctgagccgggcgggcacaggggtgcagcggagctggaacttcatctggcaggagttgaccacaatgctgtcgttggggttgaggttgcgggtgctgacgatgccgggggagtagtagcccctcatcagcaggtagttggtgtgggaggcttgcgcaggtttcacctccatgctccggcgcttgccccctacaccttcgtccaagtcatcctcttcatcctcgtcatcctccaggctgccgtccttccccaagcttttgatgacctcattctccaccattgagctgtctaccacgatgatctgctccgggatcctgacatccacagaaatgaggcccagagagaagagggtcaggacggccacacaatttcctccagggccgtccagtgaaaaggccaccatgtcgtttgtgggctcgttattatcctggtctttgaaagagaaacgatcaggctggtccaacttgccggcagcccgcattctgtccaaaaactggaatgactccgtgcagatggtgcttggaaatcgccacgtaaaaatcctgtagtaggtctgggatagctggtaggacattggcacgaaggggagggcccggttcttcttggggaccgcagcgtgtgccaacttttttgtacaaagt

SEQ ID NO: 184651 - DNA, 1791 bp, Homo Sapiens
  misc_feature (1298)..(1310): n is a, c, g, or t
ttgggttatctcatccctcgcctcccacaggatcagtgaatgcttgtgaaaagacctcatttatgtttctgcggcaagagttgcctgtcagactggcaaatataatgaaagaaataagtctccttccagataatcttctcaggacaccatccgttcaattggtacaaagctggtatatccagagtcttcaggagcttcttgattttaaggacaaaagtgctgaggatgctaaagctatttatgactttacagatactgtgatacggatcagaaaccgacacaatgatgtcattcccacaatggcccagggtgtgattgaatacaaggagagctttggggtggatcctgtcaccagccagaatgttcagtactttttggatcgattctacatgagtcgcatttcaattagaatgttactcaatcagcactctttattgtttggtggaaaaggcaaaggaagtccatctcatcgaaaacacattggaagcataaatccaaactgcaatgtacttgaagttattaaagatggctatgaaaatgctaggcgtctgtgtgatttgtattatattaactctcccgaactagaacttgaagaactaaatgcaaaatcaccaggacagccaatacaagtggtttatgtaccatcccatctctatcacatggtgtttgaacttttcaagaatgcaatgagagccactatggaacaccatgccaacagaggtgtttacccccctattcaagttcatgtcacgctgggtaatgaggatttgactgtgaagatgagtgaccgaggaggtggcgttcctttgaggaaaattgacagacttttcaactacatgtattcaactgcaccaagacctcgtgttgagacctcccgcgcagtgcctctggctggttttggttatggattgcccatatcacgtctttacgcacaattggtgcgtccccagcagagaacccaaagacatgacgacgttccgcagtgcctagacacacttgggacatcggaaaatccaaatgtggcttttgtattaaatttggaaggtatggtgttcagaactatattataccaagtactttatttatcgttttcacaaaactatttgagtagaataaatggaaactgaattccatttgtgcccgttaaacctcctaaaggatgaaattgcacctattttacacttatattttcacagttaattgaacatatttttaaacaactgtagttttgggcaacttttcactttgtggtagacttcagaagtgtggaaatcttcgggtttctataggaaactagnnnnnnnnnnnnnaagaaatactttcatttatgtttgctagaaacattttctaaatgatagtgattagctggttagccatcttcctgttatttggaggagttctgccatcttttattcggtagtgacagctgtaatatggtcttcatgtttatcagtgacttgactacaagtaaagcagaaaacagttggcctgtaatcacagaaccagccacccttcggcgtctacatgcattgtcttagctctgaggttaatttaccatttttaaattttattgtaaagaagtgtaatgactagctctctgtggatctatgccaaaatcatgggccatcttttctaagtgtacttctgattaatgcaaggggaaatttttatactgaaaacaaacaaacaaactagcagctactaaaatagagaagaaattgaggggcaaagtaatatgtctccaaaactgaactgattgcttgttgagattacctagaaagcttttgaaaa

SEQ ID NO: 184652 - DNA, 2208 bp, Homo Sapiens
  misc_feature (1716)..(1728): n is a, c, g, or t
ttgggcccctgctgcccgccacgtccctcacgtaccactcggcagaggcgcggggaaacctggcgtactggctgtggcttctctagcgggactcggcatgaggctggcgcggctgcttcgcggagccgccttggccggcccgggcccggggctgcgcgccgccggcttcagccgcagcttcagctcggactcgggctccagcccggcgtccgagcgcggcgttccgggccaggtggacttctacgcgcgcttctcgccgtccccgctctccatgaagcagttcctggacttcggatcagtgaatgcttgtgaaaagacctcatttatgtttctgcggcaagagttgcctgtcagactggcaaatataatgaaagaaataagtctccttccagataatcttctcaggacaccatccgttcaattggtacaaagctggtatatccagagtcttcaggagcttcttgattttaaggacaaaagtgctgaggatgctaaagctatttatgactttacagatactgtgatacggatcagaaaccgacacaatgatgtcattcccacaatggcccagggtgtgattgaatacaaggagagctttggggtggatcctgtcaccagccagaatgttcagtactttttggatcgattctacatgagtcgcatttcaattagaatgttactcaatcagcactctttattgtttggtggaaaaggcaaaggaagtccatctcatcgaaaacacattggaagcataaatccaaactgcaatgtacttgaagttattaaagatggctatgaaaatgctaggcgtctgtgtgatttgtattatattaactctcccgaactagaacttgaagaactaaatgcaaaatcaccaggacagccaatacaagtggtttatgtaccatcccatctctatcacatggtgtttgaacttttcaagaatgcaatgagagccactatggaacaccatgccaacagaggtgtttacccccctattcaagttcatgtcacgctgggtaatgaggatttgactgtgaagatgagtgaccgaggaggtggcgttcctttgaggaaaattgacagacttttcaactacatgtattcaactgcaccaagacctcgtgttgagacctcccgcgcagtgcctctggctggttttggttatggattgcccatatcacgtctttacgcacaatacttccaaggagacctgaagctgtattccctagagggttacgggacagatgcagttatctacattaaggctctgtcaacagactcaatagaaagactcccagtgtataacaaagctgcctggaagcattacaacaccaaccacgaggctgatgactggtgcgtccccagcagagaacccaaagacatgacgacgttccgcagtgcctagacacacttgggacatcggaaaatccaaatgtggcttttgtattaaatttggaaggtatggtgttcagaactatattataccaagtactttatttatcgttttcacaaaactatttgagtagaataaatggaaactgaattccatttgtgcccgttaaacctcctaaaggatgaaattgcacctattttacacttatattttcacagttaattgaacatatttttaaacaactgtagttttgggcaacttttcactttgtggtagacttcagaagtgtggaaatcttcgggtttctataggaaactagnnnnnnnnnnnnnaagaaatactttcatttatgtttgctagaaacattttctaaatgatagtgattagctggttagccatcttcctgttatttggaggagttctgccatcttttattcggtagtgacagctgtaatatggtcttcatgtttatcagtgacttgactacaagtaaagcagaaaacagttggcctgtaatcacagaaccagccacccttcggcgtctacatgcattgtcttagctctgaggttaatttaccatttttaaattttattgtaaagaagtgtaatgactagctctctgtggatctatgccaaaatcatgggccatcttttctaagtgtacttctgattaatgcaaggggaaatttttatactgaaaacaaacaaacaaactagcagctactaaaatagagaagaaattgagggcaaagtaatatgtctcccaaactgaactgattgcttgttgagattacctagaaagcttttgaaaa

SEQ ID NO: 184653 - DNA, 1805 bp, Homo Sapiens
  misc_feature (1698)..(1732): n is a, c, g, or t
ctttgtacaaaaaagttggagttgtgtctgttcccaggagtccttcggcggctgttgtgtcagtggcctgatcgcgatggggacaaaggcgcaagtcgagaggaaactgttgtgcctcttcatattggcgatcctgttgtgctccctggcattgggcagtgttacagtgcactcttctgaacctgaagtcagaattcctgagaataatcctgtgaagttgtcctgtgcctactcgggcttttcttctccccgtgtggagtggaagtttgaccaaggagacaccaccagactcgtttgctataataacaagatcacagcttcctatgaggaccgggtgaccttcttgccaactggtatcaccttcaagtccgtgacacgggaagacactgggacatacacttgtatggtctctgaggaaggcggcaacagctatggggaggtcaaggtcaagctcatcgtgcttgtgcctccatccaagcctacagttaacatcccctcctctgccaccattgggaaccgggcagtgctgacatgctcagaacaagatggttccccaccttctgaatacacctggttcaaagatgggatagtgatgcctacgaatcccaaaagcacccgtgccttcagcaactcttcctatgtcctgaatcccacaacaggagagctggtctttgatcccctgtcagcctctgatactggagaatacagctgtgaggcacggaatgggtatgggacacccatgacttcaaatgctgtgcgcatggaagctgtggagcggaatgtgggggtcatcgtggcagccgtccttgtaaccctgattctcctgggaatcttggtttttggcatctggtttgcctatagccgaggccactttgacagaacaaagaaagggacttcgagtaagaaggtgatttacagccagcctagtgcccgaagtgaaggagaattcaaacagacctcgtcattcctggtgtgagcctggtcggctcaccgcctatcatctgcatttgccttactcaggtgctaccggactctggcccctgatgtctgtagtttcacaggatgccttatttgtcttctacaccccacagggccccctacttcttcggatgtgtttttaataatgtcagctatgtgccccatcctccttcatgccctccctccctttcctaccactgctgagtggcctggaacttgtttaaagtgtttattccccatttctttgagggatcaggaaggaatcctgggtatgccattgacttcccttctaagtagacagcaaaaatggcgggggtcgcaggaatctgcactcaactgcccacctggctggcagggatctttgaataggtatcttgagcttggttctgggctctttccttgtgtactgacgaccagggccagctgttctagagcgggaattagaggctagagcggctgaaatggttgtttggtgatgacactggggtccttccatctctggggcccactctcttctgtcttcccatgggaagtgccactgggatccctctgccctgtcctcctgaatacaagctgactgacattgactgtgtctgtggaaaatgggagctcttgttgtggagagcatagtaaattttcagagaacttgaagccaaaaggatttaaaaccgctgctctaaagaaaagaaaactgggaggctgggcgcagtggctcacgcnnnnnnnnnnnnnnnnnnnnnnnnnnnnnnnnnnnatgtgagcccaccgtgcctagccaaggatgacatttttaaagtatggttcatttctgtgtcatggttggaaga

SEQ ID NO: 184654 - DNA, 1770 bp, Homo Sapiens
ttggatctggaatgagcttcattcctccaatgcagcccgctgggccgctggcagtgtcactgacctcgccttcaaagtggcttctcgtgagctaaagaatggtttcgctgtggtgcggcccccaggacaccatgcagatcattcaacagccatgggcttctgcttcttcaactcagtggccatcgcctgccggcagctgcaacagcagagcaaggccagcaagatcctcattgtagactgggacgtgcaccatggcaacggcacccagcaaaccttctaccaagaccccagtgtgctctacatctccctgcatcgccatgacgacggcaacttcttcccggggagtggggctgtggatgaggtaggggctggcagcggtgagggcttcaatgtcaatgtggcctgggctggaggtctggacccccccatgggggatcctgagtacctggctgctttcaggatagtcgtgatgcccatcgcccgagagttctctccagacctagtcctggtgtctgctggatttgatgctgctgagggtcacccggccccactgggtggctaccatgtttctgccaaatgttttggatacatgacgcagcaactgatgaacctggcaggaggcgcagtggtgctggccttggagggtggccatgacctcacagccatctgtgacgcctctgaggcctgtgtggctgctcttctgggtaacagggtggatcccctttcagaagaaggctggaaacagaaacccaacctcaatgccatccgctctctggaggccgtgatccgggtgcacagtaaatactggggctgcatgcagcgcctggcctcctgtccagactcctgggtgcctagagtgccaggggctgacaaagaagaagtggaggcagtgaccgcactggcgtccctctctgtgggcatcctggctgaagataggccctcggagcagctggtggaggaggaagaacctatgaatctctaaggctctggaaccatctgcccgcccaccatgcccttgggacctggttctcttctaacccctggcaatagcccccattcctgggtctttagagatcctgtgggcaagtagttggaaccagagaacagcctgcctgctttgacagttatcccagggagcgtgagaaaatccctgggtctagaatgggaactggagaggaccctgagaggagacgggctgggcggcgacccccacagggctctcgagaacagattctcccctccagtatgggccctggctgtggcccccattcctcaggactgcacagaggaggactggctccggctccgtcgggctcacccttaaccactattcctggctctgcaaaccccagactttgcacacagccccaggctccacacagaaatgtgaacttggcctcagacaggctggcccttcctaggctctaggggctaggggggagtggggagccaagaggtcccatattcctgagtgcaggggtagtccctctcacctgcttcctcagacgactctggaagcttccctctaccaccgggcactgagacgaagctccctgacaaccgagactggcagccctccatctggtccgtaccctcgccagaggcccccctacatcaacctccctggcgatgccctggtggagcagatgggtgctcttgggagtcctgtgcttcctgatccaatgggtgccaaacccttcatcttcccccagaagcgcagcataccccggggacccctcggccactgccccacttcggggagccttctct

SEQ ID NO: 184655 - DNA, 896 bp, Homo Sapiens
tttgtacaaaaaagttggttttgttttaccaccagattaattttagtgctgggattacaggtgtgagccacagcgcctggcccagtgtaatatttttgaaagaggagggacaattgtgaaatcagtaggttatctttaatctttacactacatgcagatccatagtatcctttgtagtgttgtaaatacttttgctttgaaaactttttcattgtcctaaatcaccctgactctgaccagtctttcagttctccaaaagcccaatttaattgtatagttttgtcatggcttcatataataaagagcctattttaagttgaaagtagtagtcagaaaattgttaatttcctaaagctcaggaaactagggtgtcactttttttgcactgcagcatatacactaactagcttattaaaatttacaaaatgtctttttgaatgtatcaaggatatatttagtttgagtggaatttgtcagcagatatcagtaacttattgccgcttatattgtacaatgttaaacttcaattcctgtaacctggttagtattaatgtcagtgactaaaaaacttagagttagttttagggcactttttattttgagagcatgaagtgtggaatgtgtcactacgattgttgataaagctgaggccacttgcaacttgattttttaaatgaaatagataaagtctttttgaataatatagtatgcactgctatttgcttgattatgtaatgtcaaaagtttaactatattccaagtacaaaaacatactggattacattgaggatgttgaatagcattcatgatggctttgttttggtttggggcagctgtcaccagctaaagcaatgttgtttaaaattagctcaataaaaatgtctttaaaaatgtaa

SEQ ID NO: 184656 - DNA, 1632 bp, Homo Sapiens
ttggcatcctcggggccccagaacttgcgggtgtccgaggaatggtataaccggttgcgcattacgtgggaccccccatcttccccggtgaaaggctatagaattgtctacaaacctgtcagtgttcctggtccaacactggaaacgtttgtgggagctgacattaacaccatccttatcacaaacctcctcagcggaatggactacaatgtgaagatatttgcctcccaggcctcaggcttcagcgacgccctgacaggcatggtgaaaacattgttcttgggtgttaccaatctccaagccaaacatgttgaaatgaccagcttgtgtgcccactggcaggtacatcgccatgccacagcctatagggttgttatagaatccctccaggataggcaaaagcaagaatccactgtgggtggagggacaaccaggcattgcttctatggacttcagcctgattctgaatataaaatcagtgtttatacaaagctccaggagattgaaggacctagtgtgagcataatggaaaaaacacaatcacttcctacacgaccaccaacttttcctccaaccattccaccagcaaaagaagtatgtaaggcggccaaggctgacctggtatttatggtggatggatcctggagcattggagatgaaaatttcaataagatcatcagctttctatacagcactgttggagccctgaacaagattggcacagatggaacccaagttgcaatggttcagttcactgatgatcccagaacagaatttaaactaaatgcttacaaaaccaaagagactcttcttgatgcaattaaacacatttcatacaaaggaggaaatacaaaaacaggaaaagcaattaagtatgttcgagataccttgttcactgcagagtcaggtacaagaaggggcatcccaaaggttatcgtggttataactgatggaagatcacaagatgatgtgaacaaaatctccagggagatgcaattagatggctatagcatttttgcaattggtgtggccgatgcagattactcggagttggttagcattggcagtaagcccagcgcacgccatgtcttctttgtggatgactttgacgcctttaagaaaatcgaagatgagttaattacttttgtctgcgaaacagcatcagcaacctgtccagtggtacacaaggatggcattgatcttgcaggatttaagatgatggaaatgtttggtttggttgaaaaagatttttcatcagtggaaggggtttctatggagcctggtaccttcaatgtgtttccatgttaccaactccataaagatgccctggtttcccagccaaccaggtacttgcacccagaaggattgccctccgactacacaatcagttttctattccggattcttcctgacactccacaggagccatttgctctttgggagattttaaataaaaattctgacccattggttggggttattttagacaatggtgggaaaactctaacatatttcaactatgaccagagtggggattttcaaactcttactttcgaagacctgaaattaggaaaattttttatggaagctttcacaagctacacattgtttgtcagtgagactttggtcaaa

SEQ ID NO: 184657 - DNA, 1298 bp, Homo Sapiens
  misc_feature (918)..(947): n is a, c, g, or t
  misc_feature (951)..(989): n is a, c, g, or t
ttggcacttgttgttgtccaagtggagctcccggatgatcgagaacgggagcctgagcttcctgcccaccctccgggagctccacttgttgttgtccagggtgccctcagggctcccagacctcaagctcctccaggtggtctatctgcactccaacaacatcaccaaagtgggtgtcaacgacttctgtcccatgggcttcggggtgaagcgggcctactacaacggcatcagcctcttcaacaaccccgtgccctactgggaggtgcagccggccactttccgctgcgtcactgaccgcctggccatccagtttggcaactacaaaaagtagaggcagctgcagccaccgcggggcctcagtgggggtctctggggaacacagccagacatcctgatggggaggcagagccaggaagctaagccagggcccagctgcgtccaacccagccccccacctcaggtccctgaccccagctcgatgccccatcaccgcctctccctggctcccaagggtgcaggtgggcgcaaggcccggcccccatcacatgttcccttggcctcagagctgcccctgctctcccaccacagccacccagaggcaccccatgaagcttttttctcgttcactcccaaacccaagtgtccaaggctccagtcctaggagaacagtccctgggtcagcagccaggaggcggtccataagaatggggacagtgggctctgccagggctgccgcacctgtccagacacacatgttctgttcctcctcctcatgcatttccagcctttcaaccctccccgactctgcggctcccctcagcccccttgcaagttcatggcctgtccctcccagacccctgctccactggcccttcgaccagtcctcccttctgttctctctttccccgtccttcnnnnnnnnnnnnnnnnnnnnnnnnnnnnnnttcnnnnnnnnnnnnnnnnnnnnnnnnnnnnnnnnnnnnnnncttgtgcttcctcagacctttctcgcttctgagcttggtggcctgttccctccatctctccgaacctggcttcgcctgtccctttcactccacaccctctggccttctgccttgagctgggactgctttctgtctgtccggcctgctttctttccctgcccacaaaaccccagggacagcggtctccccaccctgccctgctcaggccttgcccccaaacctgtactgtcccggaggaggttgggaggtggaggcccaacatcccgcgcagatgacaccatcaaccgccagagtcccagacaccggttt

SEQ ID NO: 184658 - DNA, 1384 bp, Homo Sapiens
ttggctacaggagtccagggctggagagaaaacctctgcgaggaaagggaaggagcaagccgtgaatttaagggacgctgtgaagcaatcatggatgcaatgaagagagggctctgctgtgtgctgctgctgtgtggagcagtcttcgtttcgcccagccaggaaatccatgcccgattcagaagaggagccagatcttaccaaggttgcagcgagccaaggtgtttcaacgggggcacctgccagcaggccctgtacttctcagatttcgtgtgccagtgccccgaaggatttgctgggaagtgctgtgaaatagataccagggccacgtgctacgaggaccagggcatcagctacaggggcacgtggagcacagcggagagtggcgccgagtgcaccaactggaacagcagcgcgttggcccagaagccctacagcgggcggaggccagacgccatcaggctgggcctggggaaccacaactactgcagaaacccagatcgagactcaaagccctggtgctacgtctttaaggcggggaagtacagctcagagttctgcagcacccctgcctgctctgagggaaacagtgactgctactttgggaatgggtcagcctaccgtggcacgcacagcctcaccgagtcgggtgcctcctgcctcccgtggaattccatgatcctgataggcaaggtttacacagcacagaaccccagtgcccaggcactgggcctgggcaaacataattactgccggaatcctgatggggatgccaagccctggtgccacgtgctgaagaaccgcaggctgacgtgggagtactgtgatgtgccctcctgctccacctgcggcctgagacagtacagccagcctcagtttcgcatcaaaggagggctcttcgccgacatcgcctcccacccctggcaggctgccatctttgccaagcacaggaggtcgcccggagagcggttcctgtgcgggggcatactcatcagctcctgctggattctctctgccgcccactgcttccaggagaggtttccgccccaccacctgacggtgatcttgggcagaacataccgggtggtccctggcgaggaggagcagaaatttgaagtcgaaaaatacattgtccataaggaattcgatgatgacacttacgacaatgacattgcgctgctgcagctgaaatcggattcgtcccgctgtgcccaggagagcagcgtggtccgcactgtgtgccttcccccggcggacctgcagctgccggactggacggagtgtgagctctccggctacggcaagcatgaggccttgtctcctttctattcggagcggctgaaggagctcatgtcagactgtacccatccagccgctgcacatc

SEQ ID NO: 184659 - DNA, 933 bp, Homo Sapiens
ataaaaaatactgtaataaaagtacttataaacatactaatcctctttcaggaccctaaagttgcaggttagtaggtcttcaaggacaaatctgtaagtttcttatttctgtagtgcaagtaaaatttcactttttgaaactatagagagatccctttctgattagcctacagaacttaaagtgagggaaccatttcctctcacagacaaagaggcctgggatattaggactttggggtttgagagcatcatggggcagacagatggtggatggtctggacaagaagcgagtaagccactgcggttggtcatactgaagggaattgatggcaagaggatcccctgagcaagtcagaagttactctcatcagtcgttcatggtcacaacctgaggtactctgctgagtgggcaaggctgaagaagaggcctgtggaatgcagcattacctgctggacagagcagggcaggcagttctatgccttggagctcctgactgcagggactctgtccccacactcaaaaagactcagctcactcaatgagagaatgtgatttactttatagaacgtataatcaactttgttgaataatttgttctattaaggctgtctaaagtatgtgatgtcttcatcatagtatgaagtgttgaaaattaataacgagcctagtttaggaaaaagctgcttaaaactgtggctctaagagagtaatcataaaataccttagataaaattgcactatggaattttcattgagtatgtttaaattattggcttgtctactaatacacatctgcttcaaaatgaacatatttcataaaattggcatcaattttaatgacgctcctggtatggaacctcagatataccctattggagacaatcctttgatcataaattctccccaactataaatcattttatgtctttatc

SEQ ID NO: 184660 - DNA, 2112 bp, Homo Sapiens
ttggatcaggctgttgaatgttcggacacctactctccgtacatccatgtaccagaagtgtaccactgtggatgaagcagagaaagcaattgagctgcgtctggcaaaaattgaccatactgcaattcacccacatttacttgacatgaagattggacaagggaaatatgagccgggcttcttccctaagctgcagtctgatgtactttccactgggccagccagcaacaagtggacgaaaaggaatgcccctgcccagtggaggcggaaagatcggcagaagcagcacacagaacacctgcgtttagataatgaccagagggagaagtacatccaggaagccaggactatgggcagcactatccgccagcccaaactgtccaacctctctccatcagtgattgcccagaccaattggaagtttgtagagggcctgctgaaggaatgccgcaataagaccaagaggatgctggtggaaaagatgggccgagaagctgtggagctagggcatggggaggtgaacatcacaggggtggaagagaacaccctgattgccagcctttgtgatctcctggaaaggatctggagtcatggactacaagtgaaacaggggaaatcagccttatggtcccacctgttacattatcaggacaaccggcagagaaaactcacatcaggaagcctcagtacctcaggaatacttcttgattcagaacgtaggaagtctgatgccagctcactcatgcctcccctgaggatctccctgattcaggatatgaggcacatccagaacatcggggaaatcaagactgatgtgggaaaggccagagcatgggtgcgactgtccatggaaaaaaagttactttccagacacctgaagcagctcctctcagaccatgagctcaccaaaaagttatataagcgctatgccttcctgcgctgtgatgacgagaaggagcagttcctctatcacctcctgtctttcaatgccgtcgattacttttgcttcaccaatgtcttcacaactatcctgatcccgtaccacattctgatcgtaccaagcaagaagctggggggctccatgttcactgccaacccatggatctgtatatcaggagaattgggtgagacacagatcatgcagattcccaggaatgtgctagagatgaccttcgagtgccagaacttggggaagcttactactgtccagattggccatgataactctgggctgtatgccaaatggctggtggagtatgtgatggtcaggaatgagatcacaggacatacctacaagttcccgtgtggccggtggttagggaagggcatggatgatggaagcctggagcggatcctagttggggagctgctcacatcccagcctgaggtggatgagaggccatgccggaccccgccgctgcagcagtcccccagtgtcatccggaggcttgttaccatctcacccaacaacaagcccaagctgaacactgggcagatccaggagtccatcggggaggcagtcaatggcattgtgaagcacttccataagcctgagaaagagcgaggcagtctgacgctgttgctctgtggagagtgtggccttgtctcggccttggaacaggctttccagcatggatttaaatcgccccggctcttcaaaaatgtcttcatttgggatttcctggaaaaagcacaaacctattatgagacattagagaagaatgaagtagtccctgaggaaaactggcatacaagagcccggaacttctgccgatttgtcactgcaatcaacaatactccccggaacatcggcaaggatggcaagtttcagatgctggtgtgcttgggagccagagatcacctcctacaccactggattgccctgctggctgactgccccatcactgcacacatgtatgaggatgtggcactgatcaaaagaccatacacttgtcaattccttgattcgtgtgctgcagacattgcaggagttcaacatcacgctggagacgtcccttgtcaagggcatcgacatctgacctcccagcacccagccagcagcggactgagaaagactcaccctgcagctctgacctttttttccaaagggac

SEQ ID NO: 184661 - DNA, 1647 bp, Homo Sapiens
ctttaaaaccaactttgtacaaaaaagttggctttcgtagctctggtgctgcggctccgctctcgtcgcaacgagatctttcgagatcttctccgcccccgctaccggcgcctcctctgcggccactgagccggagccggcctgagcagcgctctcggttgcagtacccactggaaggacttaggcgctcgcgtggacaccgcaagcccctcagtagcctcggcccaagaggcctgctttccactcgctagccccgccgggggtccgtgtcctgtctcggtggccggacccgggcccgagcccgagcagtagccggcgccatgtcggtggtgggcatagacctgggcttccagagctgctacgtcgctgtggcccgcgccggcggcatcgagactatcgctaatgagtatagcgaccgctgcacgccggcttgcatttcttttggtcctaagaatcgttcaattggagcagcagctaaaagccaggtaatttctaatgcaaagaacacagtccaaggatttaaaagattccatggccgagcattctctgatccatttgtggaggcagaaaaatctaaccttgcatatgatattgtgcagttgcctacaggattaacaggtataaaggtgacatatatggaggaagagcgaaattttaccactgagcaagtgactgccatgcttttgtccaaactgaaggagacagccgaaagtgttcttaagaagcctgtagttgactgtgttgtttcggttccttgtttctatactgatgcagaaagacgatcagtgatggatgcaacacagattgctggtcttaattgcttgcgattaatgaatgaaaccactgcagttgctcttgcatatggaatctataagcaggatcttcctgccttagaagagaaaccaagaaatgtagtttttgtagacatgggccactctgcttatcaagtttctgtatgtgcatttaatagaggaaaactgaaagttctggccactgcatttgacacgacattgggaggtagaaaatttgatgaagtgttagtaaatcacttctgtgaagaatttgggaagaaatacaagctagacattaagtccaaaatccgtgcattattacgactctctcaggagtgtgagaaactcaagaaattgatgagtgcaaatgcttcagatctccctttgagcattgaatgttttatgaatgatgttgatgtatctggaactatgaatagaggcaaatttctggagatgtgcaatgatctcttagctagagtggagccaccacttcgtagtgttttggaacaaaccaagttaaagaaagaagatatttatgcagtggagatagttggtggtgctacacgaatccctgcggtaaaagagaagatcagcaaatttttcggtaaagaacttagtacaacattaaatgctgatgaagctgtcactcgaggctgtgcattgcagtgtgccatcttatcgcctgctttcaaagtcagagaattttctatcactgatgtagtaccatatccaatatctctgagatggaattctccagctgaagaagggtcaagtgactgtgaagtcttttccaaaaatcatgctgctcctttctctaaagttcttacattttatagaaaggaacctttcactcttg

SEQ ID NO: 184662 - DNA, 1414 bp, Homo Sapiens
ttggatttagagtgaagatgaaatcaggacactgaaacagaaaaaaattgatgaaacttctgagcaggaacaaaaacataaagaaaccaacaatagcaatgctcagaaccccagcgaagaagagggtgaagggcaagatgaggacattttacctctaacccttgaagagaaggaaaacaaagaatacctaaaatctctatttgaaatcttgattctgatgggaaagcaaaacatacctctggatggacatgaggctgatgaaatcccagaaggtctctttactccagataactttcaggcactgctggagtgtcggataaattctggtgaagaggttctgagaaagcggtttgagacaacagcagttaacacgttgttttgttcaaaaacacagcagaggcagatgctagagatctgtgagagctgtattcgagaagaaactctcagggaagtgagagactcacacttcttttccattatcactgacgatgtagtggacatagcaggggaagagcacctacctgtgttggtgaggtttgttgatgaatctcataacctaagagaggaatttataggcttcctgccttatgaagccgatgcagaaattttggctgtgaaatttcacactatgataactgagaagtggggattaaatatggagtattgtcgtggccaggcttacattgtctctagtggattttcttccaaaatgaaagttgttgcttctagacttttagagaaatatccccaagctatctacacactctgctcttcctgtgccttaaatatgtggttggcaaaatcagtacctgttatgggagtatctgttgcattaggaacaattgaggaagtttgttcttttttccatcgatcaccacaactgcttttagaacttgacaacgtaatttctgttctttttcagaacagtaaagaaaggggtaaagaactgaaggaaatctgccattctcagtggacaggcaggcatgatgcttttgaaattttagtggaactcctgcaagcacttgttttatgtttagatggtataaatagtgacacaaatattagatggaataactatatagctggccgagcatttgtactctgcagtgcagtgtcagattttgatttcattgttactattgttgttcttaaaaatgtcctatcttttacaagagcctttgggaaaaacctccaggggcaaacctctgatgtcttctttgcggccggtagcttgactgcagtactgcattcactcaacgaagtgatggaaaatattgaagtttatcatgaattttggtttgaggaagccacaaatttggcaaccaaacttgatattcaaatgaaactccctgggaaattccgcagagctcaccaagggtaacttggaatctcagctaacctctgagagttacta

SEQ ID NO: 184663 - DNA, 1305 bp, Homo Sapiens
  misc_feature (107)..(118): n is a, c, g, or t
ttggcttaatttgggggattaacacttttgctgagggagaaaaagaaaacatacattatgaagcctttccaaaattaggtgcttggtaatcacgttaatggtataannnnnnnnnnnnaatatctggagaacattaataacaagttaaattattctttagtggtcattttttaagtgcacaattaataagaagcacaacttgttcacaaactcattcagaaatgattctcccaacaatgcatatcagctattcattgatacttagagtgggtggatttatttgacattttactgcttctttctgtctgtgtgttttaatttgcatctgccaagcataatgcatcttttttcctctgccattcttgtgttgattggagaatttttctgtatgtaattagaaaaaaatgtaaaacatgatttatgtgaaatactgtatagtaaaagttggtctaatagtagaactttaaaattttttcttattgtgaggaatctgttaaaagtttaaagctttgctgaaaactgaattcattctcaggaatttcataaatcttctccccaggtaaataattgaaatagctgtaaaataagtagatagctgctgttaatataatacagtacattttggggggcatatgtgtggttggggggtccttaaaaatcaaaatttgccatttcagttggatgaattactagaggtaataacaaatcttactataaaatcaagaggtttaagaacatacactgggcagatgttgattccgtgcatgcccaccttttattaccaaacaaggttttgtttatatgattgtattagaaatgctcagacttccccagaaatgaaccataaattttggaacttcctttcagctcaagaggttcagctatattgtatttgtgcagtgtaatcactactatttctgctcggtttcctaaaaggaaaaaaaaggcgcagtggtgatgaccctcatgaatgagccacgcttctgcattcttcttagaaactgctgtgaaaaacaatttatgtttgcagggtttaaaaatcagtaaaaatgggaatgattgagctaaaacccactctatgagaaggaagatactgaaagcatgtgacatattgctacaaagattttttttcctaaatgattcagtaattgaatgattatttaatatatagtgctatcaagcatcccctggtacttttggacttccttggcttgttatataaaattacatttttacctgtaaaaataaaactaatcgaaccaaaggaaaaaatataaaaataatgtcagatccatgttccaaaaa

SEQ ID NO: 184664 - DNA, 2101 bp, Homo Sapiens
  misc_feature (1915)..(1925): n is a, c, g, or t
ccaactttgtacaaaaaagttgggtttatgtacaaacctgtggtcacacattacatatagattgtcataaatcttacatggaatcattacggaatgaccaggttcttcagggcttctcggtggacaaaggagaattcacgtgtccactctgtaggcagtttgctaacagtgttcttccatgttatcctggaagcaatgtggaaaataacccttggcaacgtcctagcaacaaaagcatacaagatctcataaaggaagtggaggagctgcagggacgaccgggagctttcccagtaagcatcagttcagaaacaaatttaagtaaagaaatggaatctgtaatgaaagatataaaaaataccactcagaagaaatatagagactatagcaagaccccgggctcaccagacaatgattttctctttatgtactctgttgctagaaccaatttagaacttgaattgattcatcgaggaggcaatttgtgttcaggtggtgcaagcacagctggcaaaaggtcttgtttaaatcagctgtttcatgtattagccttgcacatgcggctttatagcattgactctgagtataatccctggagaaagctcacccagttagaagagatgaatccacagctgggatatgaagaacaacagcctgaggttccaattctttatcatgatgtaacatcccttttgctcatccagatcttaatgatgccacaacccttacgcaaagaccactttacctgcattgtgaaggtactttttaccctactgtacacacaggctcttgcagcactctcagttaaatgcagcgaagaagataggtcagcctggaaacacgcgggagctctcaaaaagagtacatgtgatgcagaaaagtcttacgaagtattactgagctttgtgataagtgaactatttaaaggaaagttataccatgaagaaggaactcaggaatgtgcaatggttaaccctattgcttggtctcctgaatccatggaaaaatgcttacaggacttctgcttaccttttctcagaatcaccagccttcttcagcaccacctttttggggaagatttacctagctgccaggaagaagaagaattttcagttcttgccagctgcctgggacttctgccaacgttttaccaaacagaacatccattcatcagtgcctcctgtctggattggccagttccagcatttgatattataactcagtggtgttttgagataaaatcatttactgaaagacatgcagaacaaggaaaggccttgcttatccaagagtcaaaatggaaattaccacacctactacagttgcctgagaattataacaccatttttcagtactaccacagaaaaacctgtagtgtctgcaccaaggttcctaaagatcctgctgtttgccttgtgtgtggtacttttgtatgcctgaaaggactttgctgcaagcaacaaagttactgtgaatgtgtactgcactctcagaactgtggtgcaggaacaggtattttccttttgatcaatgcatcggtaattatcatcattcgaggtcaccgcttctgcctctggggttccgtgtatttggatgctcatggagaggaagaccgggatcttaggcgaggcaaacctctctacatttgtaaggaaagatacaaagttcttgagcaacagtggatttctcatacttttgatcacatcaataaaagatggggtccacattacaatgggctgtgactctccacctcagcattgcatcgtatcatcattttcgctacgaatttatttttcaacaataagctttaacttaatttgggggattaacacttttgctgagggagaaaaaagaaaacatacattatgaagcctttccaaaattaggtgcttggtaatcacgttaatggtataannnnnnnnnnnaatatctgggagaacattaataacaagtttaaattattctttagtgggtcattttttaagtgcacatttaataagaagcaccaacttgttcacaaactcatcagaaatgattctcccaacattgcgtatcaccaattcattgatacttagagtggggggtgatttatttgacattt

SEQ ID NO: 184665 - DNA, 1385 bp, Homo Sapiens
ttggcccgaggtgggggccggggcgggatggctgcagcggcggccggggccgggagcgggccctgggcggcccaggagaagcagttcccgccggcgctgctgagtttcttcatctacaacccgcgcttcgggccgcgcgaaggacaggaggaaaataagattttattttatcatccaaatgaggtagaaaagaatgagaagattagaaatgtcggattgtgtgaagctattgtacagtttacaaggacatttagcccatcaaaacctgcaaaatctttacatacacagaagaacagacagttcttcaatgaaccagaagaaaatttctggatggtcatggttgttcggaatcctataattgaaaaacagagtaaagatggaaaaccagttattgaatatcaagaggaggagttgttggacaaggtttatagctcggtgctgcggcagtgctacagcatgtacaagctttttaatggtacatttctgaaagccatggaagacggaggcgtcaagcttctgaaagaaagattagagaaattcttccatcggtatttgcaaacgctacatttgcagtcatgtgacctacttgacatttttggtggaatcagcttcttcccgttggataaaatgacttatttgaaaatccagtcctttattaatagaatggaggaaagcctgaatatagtcaaatacactgcttttctctataacgatcagctcatctggagtggattagaacaagatgacatgagaattttatacaaataccttaccacctccctttttccaaggcacatcgaacctgagttagcaggaagggattctccaataagagcagaaatgccaggaaatcttcaacactatggaagatttcttaccggacccttgaacctcaatgatccagatgcaaaatgcagattccccaaaatttttgtaaatacagatgacacttatgaagagctccatttaatcgtttataaggccatgagtgcggctgtgtgctttatgatcgacgcctctgtccacccaacgttggatttttgccgaagactggacagcatcgttgggccccagctcacagtgctggcctctgacatctgtgaacagtttaacatcaacaagaggatgtccgggtctgagaaagaaccccagtttaagtttatctacttcaaccacatgaatctcgccgagaagagcacagttcacatgaggaaaacgcccagcgtgtcgctcacttccgtgcacccggatttaatgaagattctcggtgacatcacagtgactttaccagagtgatgaagatgaggagatcattgtgaggccatgagtgattactgggttgttggaaaagagtctgatccggcgggagctctatgttatttttg

SEQ ID NO: 184666 - DNA, 854 bp, Homo Sapiens
  misc_feature (332)..(345): n is a, c, g, or t
ttggatagagataaagttagttatctaacaaattggttatattctaagatctgctttggaaattattgcctctgatacatacctaagtaaacataacattaatacctaagtaaacataacattacttggagggttgcagtttctaagtgaaactgtatttgaaacttttaagtatactttaggaaacaagcatgaacggcagtctagaataccagaaacatctacttgggtagcttggtgccattatcctgtggaatctgatatgtctggtagcatgtcattgatgggacatgaagacatctttggaaatgatgagattatttcctgtgttnnnnnnnnnnnnnntcttaaattcctacaatgtgaaactgaaactaataatttgatcctgatgtatgggacagcgtatctgtaccagtgctctaaataacaaaagctagggtgacaagtacatgttccttttggaaagaagcaaggcaatgtatattaattattctaaaagggctttgttcctttccattttctttaacttctctgagatactgatttgtaaattttgaaaattagttaaaatatgcagttttttgagcccacgaatagttgtcatttcctttatgtgcctgttagtaaaaagtagtattgtgtatttgctcagtatctgaactataagcccatttatactgttccatacaaaagctatttttcaaaaattaatttgaaccaaaaactactactatagggaaaagatgccaaaacatgtcccctcacccaggctaaacttgatactgtattatttttgttcaatgtaaattgaagaaaatctgtaagtaagtaaacccttaagtgtgaaaact

SEQ ID NO: 184667 - DNA, 1004 bp, Homo Sapiens
  misc_feature (877)..(887): n is a, c, g, or t
ggagcgctgcgggaggcctgtctcggtggagagtcactctgctccgggagcggctctgcgacttggacccaccagatgtggagccgctgtcacttttcctcctcttaggagacgctgatcgggatggggacctcgagtagctctgctcacggctccggctccgactccgactctctcgcccctttggcaagccgttcacggggctgtccgccttggctttcttggcgccctccagcctcctcttggtgttcttcacagacagtggggaaggcttgctccctttaccttctttgggggattccaccagcttgggggcaggagagaaccccgaggtaccatccagcacctgtgtgcccccaggcaacaggccccgggcttgggcctttgcctcttcgatagcgtgctttcttttttccacttcaccctccaggtgtgtgagatcaacctttttccgagcataaagctgcaagatctttaagcagatttcctgaatttcttcttcagttgctccaaacaaaagaaaccaatggggacgattgggcaaagggatctccagcgtccgggcagcaagataaatgcaggcacaggcgatgctctctggctggaaccgcacgaagacgtcggtgcgaaggctgtcgttcatgtaattcctggaagccaaacacaggaagaactgcaatgccccacccgggaacccaggtcttccgcctgcattatctagagaaaatctagataaacgtactactcctctaaggagtctattgctaggactcagagctagacagtcctgtgaatctcaagagttaatggagaaatattctagctgctttttctaaatacagtaaatacaggacagaaaggcacagaaattattagnnnnnnnnnnngctggctgaatgtcagacaatacgtgttgctatgaaagagaaccgactttaactttacttttcccctcaaccttggcctgctctcatgcaaagcacgatgcctcagaaagaaaccaa

SEQ ID NO: 184668 - DNA, 2715 bp, Homo Sapiens
  misc_feature (94)..(102): n is a, c, g, or t
  misc_feature (1490)..(1499): n is a, c, g, or t
ttggattgattagagttggtaactgtcttgacttgaattttgtccctttaaaactgctgtacctgtatgataaagatgcagtacctttctcttnnnnnnnnntgctatggaaagctgtgagaattgaagagacaaattggctgtgtcagtgtggggttatgtcatgatttctagaagccctgaagttgctcttttgagcagctttgcatgacacgctctggtaaaaggtgtgcatctttaaattatttcatggatactttgaaaaatattgtatcacttcaaatacagcaataagtttatatgttctcaagatttcatttgtttttaagaattttaagttcgtggattaatatcactacttgaatactgacagttgttgattagacaccgaaaggttactgattgttgaatgtatctgtgttagagctgtgcactggcacgcttgcatcaggggctggggccacacggccgccacacagattcccccgtgatgcctggagctgcttccagagccgggtgtctccaagaggcacctgtaggacttcccatttagaaatctcttgagtgggtttgtatgttaccttctccaaggtttatttaggacagagatattgctggaaggtcatgggtcagattccctcacaacccacctcgtctgcgggtgcagccccactccaaggctccccgttattggggtatgtgaggagcagtaaatataaaaccagttcaactgtcctcatggaatcaccctttctgtttttgcagtattcataaagctagtgtaaggtctggttttagtctattaaatcttagagatctaaaggaaatgctcaaaatgtagccaggttttaaatgctttaacttttaaaaaatgtaaatttttgtatgtttatagcttctaaatatgaaagttaaagaatgtactgtgatgaaatgttcagtattatgttgcttctcagtatcatgttgcttctcagtattgtgttgcttctgattctatgaatgttcattttaagaccccttgttgaaatgggacagttggcagcggctctgatgagcccgagaagaggcctgcccttgggtgcggagtctccctccgcacgatgctcccacgcgtccaacttgcacccaaggggcttttccctcttccaagtggactccttcaaggaagctgcagctcggtcagcagagaaggggcctgccgccagcgccctggaggaagaggaagaggaacccaagaggatggcttgtctcccagcagccacaccggctttgtgctcagccagttcatttgagtttgcatgtttctctgcactatggattttgagcatttagatttctttaatcaaaagcgttttagtgactccagtagacattttctttctgaggcatcgtgctttgcatgagagcaggccaaggttgaggggaaaagtaaagttaaagtcggttctctttcatagcaacacgtattgtctgacattcagccagcnnnnnnnnnnctaataatttctgtgcctttctgtcctgtatttactgtatttagaaaaagttgctagaatatttctccattaactcttgagattcacaggactgtctagctctgagtcctagcaatagactccttagaggagtagtacgtttatctagattttctctagataatgcaggcggaagacctgggttcccgggtggggcattgcagttcttcctgtgtttggcttccaggaattacatgaacgacagccttcgcaccgacgtcttcgtgcggttccagccagagagcatcgcctgtgcctgcatttatcttgctgcccggacgctggagatccctttgcccaatcgtccccattggtttcttttgtttggagcaactgaagaagaaattcaggaaatctgcttaaagatcttgcagctttatgctcggaaaaaggttgatctcacacacctggagggtgaagtggaaaaaagaaagcacgctatcgaagaggcaaaggcccaagcccggggcctgttgcctgggggcacacaggtgctggatggtacctcggggttctctcctgcccccaagctggtggaatcccccaaagaaggtaaagggagcaagccttccccactgtctgtgaagaacaccaagaggaggctggagggcgccaagaaagccaaggcggacagccccgtgaacggcttgccaaaggggcgagagagtcggagtcggagccggagccgtgagcagagctactcgaggtccccatcccgatcagcgtctcctaagaggaggaaaagtgacagcggctccacatctggtgggtccaagtcgcagagccgctcccggagcaggagtgactccccaccgagacaggccccccgcagcgctccctacaaaggctctgagattcggggctcccggaagtccaaggactgcaagtacccccagaagccacacaagtctcggagccggagttcttcccgttctcgaagcaggtcacgggagcgggcggataatccgggaaaatacaagaagaaaagtcattactacagagatcagcgacgagagcgctcgaggtcgtatgaacgcacaggccgtcgctatgagcgggaccaccctgggcacagcaggcatcggaggtgaggcggggttgcagtgactggtggccgcaagcccttccctggggagtacctgatggctgccctttgacccccggtggctgcctttga

SEQ ID NO: 184669 - DNA, 685 bp, Homo Sapiens
  misc_feature (407)..(419): n is a, c, g, or t
acaaattgatgagcaatgcttttttttaaatgaaaactttgtacaaaaaagttgggtgcctttctgtcctgtatttactgtatttagaaaaagcagctagaatatttctccattaactcttgagattcacaggactgtctagctctgagtcctagcaatagactccttagaggagtagtacgtttatctagattttctctagataatgcaggcggaagacctgggttcccgggtggggcattgcagttcttcctgtgtttggcttccaggaattacatgaacgacagccttcgcaccgacgtcttcgtgcggttccagccagagagcatcgcctgtgcctgcatttatcttgctgcccggacgctggaggtcagtgtgttgctactatggagagattctagtctgannnnnnnnnnnnnctccagcctccagtaaactttactgtgttattcttcaaattactctaatctgggccaaagcattttcgtgaccaacaggctgttttttaattgtcctgaatcttgctggccgtgaagttgaggaaagtgtaatgatgataatgtttgtttttacagatccctttgcccaatcgtccccattggtttcttttgtatggagcaactgaaaaaagaaattcaggaaatctgcttaaagatcttgcagctttatgctcggaaaaaggttc

SEQ ID NO: 184670 - DNA, 2248 bp, Homo Sapiens
  misc_feature (1490)..(1501): n is a, c, g, or t
ttggcaatgggcgcgcgagcggggccgcccgcagcttcccagcccgaggcccaggcgcgcccctctgctccggctcggggcgggcactggcggagggactggccagtcccctcctccgcgccggccccaaccctgtcgctgccgccgcgctccgagtccccattcccgagctgccgctgttgtcgctcgctcagcgtctccctctcggccgccctctcctcgggacgatggcgcgcggtggccgcggccgccgcctggggttagccctggggctgctgctggcgctggtgctggcgccgcgggttctgcgggccaagcccacggtgcgcaaagagcgcgtggtgcggcccgactcggagctgggcgagcggccccctgaggacaaccagagcttccagtacgaccacgaggccttcctgggcaaggaggactccaagaccttcgaccagctcaccccggacgagagcaaggagaggctagggaagattgttgatcgaatcgacaatgatggggatggctttgtcactactgaggagctgaaaacctggatcaaacgggtgcagaaaagatacatctttgataatgtcgccaaagtctggaaggattatgatagggacaaggatgataaaatttcctgggaagaatacaaacaagccacctatggttactacctaggaaaccccgcagagtttcatgattcttcagatcatcacacctttaaaaagatgctgccacgtgatgagagaagattcaaagctgcagacctcaatggtgacctgacagctactcgggaggagttcactgcctttctgcatcctgaagagtttgaacatatgaaggaaattgtggttttggaaaccctggaggacatcgacaagaacggggatgggtttgtggatcaggatgagtatattgcggatatgttttcccatgaggagaatggccctgagccagactgggttttatcagaacgggagcagtttaacgaattccgggatctgaacaaggacgggaagttagacaaagatgagattcgccactggatcctccctcaagattatgatcatgcacaggctgaggccaggcatctggtatatgagtcagacaaaaacaaggatgagaagctaactaaagaggaaatattggagaactggaacatgtttgttggaagccaagctaccaattacggggaagatctcacaaaaaatcatgatgagctttgatagacactcaccagaatatggcagactgtcataggcattctgttattgtcttggattgttgctacaactctctaatttacagcagttgtgatcccacaaaaagcaagtttatacctcagattggggtataaaaattgtttttcgctcagtatttactggaaaatggacatcactagtctttcagtaagatttctctcaaaacacgtgaaaaccttggtaaattgcaattcttgctggggatatattggtacaacatgacttaaaacnnnnnnnnnnnnctattaaaacttaaaggggaacaaaacttgaaaaagccctgttcttcagaagttgagtgggttgagggaggcagtaatatgaagtgactgctgtgtattttaactaccagattttttatatttgccactgttaaatagttggaaaggggaaattctgattaagcgaaagtggtatcatcctaggtaagcttatttcagaacaagtctaatatttcagattctttcttttcgactttatactctgagttattacttactgtaagtggtgtatatgaaacctccatgcattttccagtatggatctgctaatatgcacagtaaatccatgtcttgtttgtttttctattaaaaagcaatcaagaaagataatgtgaaaaagaaaggaatttagaggtagggaaaagatgaatgtcagacatttgaagaactatagtaaaatgataaacactaaatatacttgagaaaactttcttaatatgccaatgaggtaggcctgatctttgaaatagtgaataggaatacaatgcatttcctcagtgatcactgattagaatgagttggtgggatccttgggaagccaaacggagcggagttctggatcatgtcccatcgagtccagtgaatccacgacccgcagacctgtcccgccgcaacagcttataccatggaatgaggacgaggtgatactctgagctgtggactgaaactggcagacacaaccctgtacagattgaaatttcacctttg

SEQ ID NO: 184671 - DNA, 1316 bp, Homo Sapiens
ttggcaatgccttaaaactaggctgtcatcacatttttccccccgttttacatacttaaattggctaaatcaagaataggggctggctctcagtccctacctcgtggggggtgcctcccctccctgcgatgggggtcctaagagcctggggcggaagaggggctggctctcagccaccacaaaatggggagcctttatgttcaggttttgcccaagagtcagcttatttgcttctggtactagcagggcagttgatgccgtggccttcaaacatgggggccatcctttagaaaccctttctatttgtttagacacgtaggccaccggcctcagccagggccccagagtttcggttaaaattccagctgccatcttttctctatctgacgcattcaatggaaaaggctttgtcagatctggtagccccggggctggggctgccagaagtttttcctttaactcatgaaagacttgctgttgttgggatccccattctaaaggttcccggtccccgccccctttgtgacctcatacaaagacttggctaatactgcaaagtttgggatgcacagtctacaaaaccccacagcccctaagaattccctcacctgccttctgcccttaggctccggtagattgcaaatgacctgctttctttctgttcccgggcgtttggacccctgtcttggaccgctgtcggatagtaaatcccaagtaaggtacctgccgtcggcagatttgagctttcttcttggacacctaatacccagagtcctccaggctccggtagattgcaaatgacctgctttctttctgttcccgggcggcatcggacccgtcggagagtaaatcccaagtaaggtacctgccgttggcagatttgagctttcttcttggacacctaatacccacagtcctccaggctccggtagattgcaaatgacctgctttctttctgttcccgggtggcatcgacccgtcggagagtaaatcccaagtaaggtacctgccgttggcagatttgagctttcttcttggacacctaatacccacagtcctccaggtgagtcctaaggatcttaggatacgcgatgggggtcctaaggcacggggggaagaggggatggctgtcacccaacccaaaaatgggcggcctttatgttcaggttttgcccaagagtcagcttatttgcttcttgtactatcacggcagttgatgccacggccctcacacatgagggggccatcctttataaaccctctctagttgtttagacaactaggccaccgggcctcagccagggccccagagtttc

SEQ ID NO: 184672 - DNA, 1519 bp, Homo Sapiens
ttggcacacacgttcgaggacctgaaaaatgagattaaaaaccctgagatccgggagaaactgaaaaggttgtatggctcgacactcaacatcgacctgtttccggcgctcgtggtggaggacctggtgcctggcagccggctgggccccaccctgatgtgtcttctcagcacacagttcaagcacctgcgagatggggacaggttgtggtatgagaaccctggggtgttctccccggcccagctgactcagatcaagcagacgtcgctggccaggatcctatgcgacaacgcggacaacatcacccgggtgcagagcgacgtgttcagggtggcggagttccctcacggctacggcagctgtgacgagatccccagggtggacctccgggtgtggcaggactgctgtgaagactgtaggaccagggggcagttcaatgccttttcctatcatttccgaggcagacggtctcttgagttcagctaccaggaggacaagccgaccaagaaaacaagaccacggaaaatacccagtgttgggagacagggggaacatctcagcaacagcacctcagccttcagcacacgctcagatgcatctgggacaaatgacttcagagagtttgttctggaaatgcagaagaccatcacagacctcagaacacagataaagaaacttgaatcacggctcagtaccacagagtgcgtggatgccgggggcgaatctcacgccaacaacaccaagtggaaaaaagatgcatgcaccatttgtgaatgcaaagacgggcaggtcacctgcttcgtggaagcttgcccccctgccacctgtgctgtccccgtgaacatcccaggggcctgctgtccagtctgcttacagaagagggcggaggaaaagccctaggctcctgggaggctcctcagagtttgtctgctgtgccatcgtgagatcgggtggccgatggcagggagctgcggactgcagaccaggaaacacccagaactcgtgacatttcatgacaacgtccagctggtgctgttacagaaggcagtgcaggaggcttccaaccagagcatctgcggagaaggaggcacagcaggtgcctgaagggaagcaggcaggagtcctagcttcacgttagacttctcaggtttttatttaattcttttaaaatgaaaaattggtgctactattaaattgcacagttgaatcatttaggcgcctaaattggttttgcctcccaacaccatttctttttaaataaagcaggatacctctatatgtcagccttgccttgttcagatgccaggagccggcagacctgtcacccgcaggtggggtgagtctcggagctgccagaggggctcaccgaaatcggggttccatcacaagctatgtttaaaaagaaaattggtgtttggcaaacggaacagaacctttgatgagagcgttcacagggacactgtctgggggtgcagtgcaagcccccggcctcttccctaggaacctctgaactccttcc

SEQ ID NO: 184673 - DNA, 1390 bp, Homo Sapiens
  misc_feature (511)..(530): n is a, c, g, or t
actttgtacaaaaaagttgggaacctttgatgagagcgttcacagggacactgtctgggggtgcagtgcaagcccccggcctcttccctgggaacctctgaactcctccttcctctgggctctctgtaacatttcaccacacgtcagcatctaatcccaagacaaacattcccgctgctcgaagcagctgtatagcctgtgactctccgtgtgtcagctccttccacacctgattagaacattcataagccacatttagaaacagatttgctttcagctgtcacttgcacacatactgcctagttgtgaaccaaatgtgaaaaaacctccttcatcccattgtgtatctgatacctgccgagggccaagggtgtgtgttgacaacgccgctcccagccggccctggttgcgtccacgtcctgaacaagagccgcttccggatggctcttcccaagggaggaggagctcaagtgtcgggaactgtctaacttcaggttgtgtgagtgcgttnnnnnnnnnnnnnnnnnnnngaatccctatacctcatttgtatttttaaaatgcgtgatgttttatgaaattgtgtccattttttaggtattagatatggcagaaaaaccatttccactatgcaaagttcttttagacgtcagtgaaaatcaactctcatacctcatggtctctctttaattgaccaaaaccttccatttttctctaaatacaaagcgatctgtgttctgagcaacctttccccgaacacacagcttcagtgcagcacgctgacctgagtatccaccatgtgccaggcacagtgctgggcacacgaggcaccaaggtccgggccacctgcccgcagcaaggcccagctgaggtggtggagggagcccctgaggtcaggggccgtttcggttcagggtggcaggtgtccagcactggggtatggcgtcgaggcttccatggggtgggggaggccagcttccttctgacaggatgggcgcatacagtgcctggtgtgatttgtgcacaacccgtgttccaggtgcacatcctcccaaggagacacccagacccttccagcacgggccggccaagttgctgcggcggaggcagcatttcagctgtgaggaaggtcattggattcatgtgttttatctgtaaaaatggttgtcttaacttcttaacctcatattggtaagtgattgataaaaattggttggtgtttcatgacatgtggacttcttttgaaatagcaagtcaaatgtagtgaccaaattgtggaagagatttctgtcaaataggaaatgtgtaagttcgtctaaaagctgatggttatgtaagttgctcagcactcagatgacagcagattctgggttctgggagtgttctgtgc

SEQ ID NO: 184674 - DNA, 1262 bp, Homo Sapiens
  misc_feature (981)..(1000): n is a, c, g, or t
actttgtacaaaaaagttggggcagggagctgcggactgcagaccaggaaacacccagaactcgtgacatttcatgacaacgtccagctggtgctgttacagaaggcagtgcaggaggcttccaaccagagcatctgcggagaaggaggcacagcaggtgcctgaagggaagcaggcaggagtcctagcttcacgttagacttctcaggtttttatttaattcttttaaaatgaaaaattggtgctactattaaattgcacagttgaatcatttaggcgcctaaattggttttgcctcccaacaccatttctttttaaataaagcaggatacctctatatgtcagccttgccttgttcagatgccaggagccggcagacctgtcacccgcaggtggggtgagtctcggagctgccagaggggctcaccgaaatcggggttccatcacaagctatgtttaaaaagaaaattggtgtttggcaaacggaacagaacctttgatgagagcgttcacagggacactgtctgggggtgcagtgcaagcccccggcctcttccctgggaacctctgaactcctccttcctctgggctctctgtaacatttcaccacacgtcagcatctaatcccaagacaaacattcccgctgctcgaagcagctgtatagcctgtgactctccgtgtgtcagctccttccacacctgattagaacattcataagccacatttagaaacagatttgctttcagctgtcacttgcacacatactgcctagttgtgaaccaaatgtgaaaaaacctccttcatcccattgtgtatctgatacctgccgagggccaagggtgtgtgttgacaacgccgctcccagccggccctggttgcgtccacgtcctgaacaagagccgcttccggatggctcttcccaagggaggaggagctcaagtgtcgggaactgtctaacttcaggttgtgtgagtgcgttnnnnnnnnnnnnnnnnnnnngaatccctatacctcatttgtatttttaaaatgcgtgatgttttatgaaattgtgtccattttttaggtattagatatggcagaaaaaccatttccactatgcaaagttcttttagacgtcagtgaaaatcaactctcatacctcatggtctctctttaattgaccaaaaccttccatttttctctaaatacaaagcgatctgtgttctgagcaactttccccgaacacacagcttcagtgcagcacgctgacctgagtatc

SEQ ID NO: 184675 - DNA, 1052 bp, Homo Sapiens
ccatttgaaaatgtgacccatttatttgaactgaaaggcatcattacaaagtgcaaacatttctttggtaatgaactgaatacaatggtcataaaaaaggcatttggctgttggagcagttaaaaaagtaaataaatatgtacattccactcctgttacagcgatcccgcacagtggctgctaaacacgttcacccaggcactgcccactgttctgattacagagagtatcaaactggtgattccgcaaacattttggtttgaattacagaattttttttggtaaatcacagtcagcttccccctttggcttagacaacacaattccttgtgactggcccagaccgcacattacgcaggtgtgctacaggtgtgccgcctcagcactgagaccatgaggcctccagggcatgtaagaggcacagaacactcccagaacccagaatctgctgtcatctgagtgcctgagcaacttacataaccatcagcttttagacgaacttacacatttcctatttgacagaaatctcttccacaatttggtcactacatttgacttgctatttcaaaagaagtccacatgtcatgaaacaccaaccaatttttatcaatcacttaccaatatgaggttaagaagttaagacaaccatttttacagataaaacacatgaatccaatgaccttcctcacagctgaaatgctgcctccgccgcagcaacttggccggcccgtgctggaagggtctgggtgtctccttgggaggatgtgcacctggaacacgggttgtgcacaaatcacaccaggcactgtatgcgcccatcctgtcagaaggaagctggcctcccccaccccatggaagcctcgacgccataccccagtgctggacacctgccaccctgaaccgaaacggcccctgacctcaggggctccctccaccacctcagctgggccttgctgcgggcaggtggcccggaccttggtgcctcgtgtgcccagcactgtgcctggcacatggtggatactcaggtcagcgccaacttttttgtacaaagt

SEQ ID NO: 184676 - DNA, 1691 bp, Homo Sapiens
ttggcactgaccccaagcttctgacctgcctggggcagaacctccacagccctgacctggccaggccacgctgcccgctcccacctgaagcttccccctcaagggagaagccaggcctgagggaatcgtctgaaagaggccctcccacagccagaagcgagcgctctgctgcgagggctgacacatgcagagagccctccatggaactgtgctttccagaaactgcgaaaaccagtgacaactccaaaaatctcctctctgtgggaaggacccacccagatttctatacacagacccaggccatggagaaagcatgggcgccgggtgggaaaacgaaccacaaagatggcccaggtgaggcgaggcccccgcccagagacaactcctctctgcactcagctggaattccctgtgagaaggagctgggcaaggtgaggcgtggcgtggaacccaagcccgaagcgcttcttgccaggcggtctctgcagccacctggaattgagagtgagaagagtgaaaagctctccagtttcccatctttgcagaaagatggtgccaaggaacctgaaaggaaggagcagcctctacaaaggcatcccagcagcatccctccgccccctctgacggccaaagacctgtccagcccggctgccaggcagcattgcagttccccaagccacgcttctggcagagagccgggggccaagcccagcactgcagagcccagctcgagcccccaggaccctcccaagcctgttgctgcgcacagtgaaagcagcagccacaagccccggcctggccctgacccgggccctccaaagactaagcaccccgaccggtccctctcctctcagaaaccaagtgtcggggccacaaagggcaaagagcctgccactcagtccctcggtggctctagcagagaggggaagggccacagtaagagtgggccggatgtgtttcctgctaccccaggctcccagaacaaagccagcgatgggattggccagggagaaggtgggccctctgtcccactgcacactgacagggctcctctagacgccaagccacaacccaccagtggtgggcggcccctggaggtgctggagaagcctgtgcatttgccaaggccgggacacccagggcctagtgagccagcggaccagaaactgtccgctgttggtgaaaagcaaaccctgtctccaaagcaccccaaaccatccactgtgaaagattgccccaccctgtgcaaacagacagacaacagacagacagacaaaagcccgagtcagccggccgccaacaccgacagaagggcggaagggaagaaatgcactgaagcactttatgctccagcagagggcgacaagctcgaggccggcctttcctttgtgcatagcgagaaccggttgaaaggcgcggagcggccagccgcgggggtggggaagggcttccctgaggccagagggaaagggcccggtccccagaagccaccgacggaggcagacaagcccaatggcatgaaacggtccccctcagccactgggcagagttctttccgatccacggccctcccggaaaagtctctgagctgctcctccagcttccctgaaaccagggccggagttagagaggcctctgcagccagcagcgacacctcttctgccaaggccgccgggggcatgctggagctt

SEQ ID NO: 184677 - DNA, 1696 bp, Homo Sapiens
  misc_feature (1393)..(1447): n is a, c, g, or t
ttggatggcattttgtgactgtaaatggaattgaacaaacaaaagatggtttcagaaataattttggcaggatcagttaatccaaccagtctttaaagagcaagtgtgcctatctgtagtattccgaagtattttgactagtgaatatataaaccttaccattctaatttaaaaatggttttcactttcaaaaaaaacatcagtagactgcattaaaaatgggttttccaaacagattggagatcagtcctggtttttattttgttagcagttgcaccaccagcaccaccttccagtagtcagctctgccgttacttccctgcttgtaagaagatggaatgtcccttctatcatccaaaacattgtaggtttaacactcaatgtacaagaccggactgcacattctaccatcccaccattaatgtcccaccacgacatgccttgaaatggattcgacctcaaaccagcgaatagcacccagtcctgcctggcagaagatcatgcagtttggaagttttcatgtactgatgaaagatactctacagaacttgtcaaatctttgaaacttggaatatattgctttcataatatgaagttttattgcctatctatctgaagtgtctaatttttcaagtttgtaagtttattatgtggttttaacattgggtggttttgttttgtttttactatgaaaagacagcttaaggaagagctaaattctgttaaaatatttggggcatgtttgtgcactgctgttgtgaggatcagcatatgaaattgacatcatggttagtcatggtactgcagcttagggggctacacggttgctgtgtgagtggagagatgcagtgaggcagttgtcattattctaaaaattgtactactttcacttttcccaaagattatataatgttcataatccaccatgaaaacagcattggccaaaggtactgaggctgcttaaaatattcaattctgctttttaatttttaagtgaatttagtttgaaaagcatgattatacaggcctctcaggctgagtgctactttggtaaagttcccagttttcctgccttctgtgacaggatgaatgaggtgggtatggacagtggaggcagctggaatggcaagtgcagaaaataggaacagttctatacagtgctctcatttactaataacataatgccttctaaataatttttttgggaaactacattatcacaaaattatacaaatttttttacaagtatttacatactgtatctgaaaacagactttaaagtcacaagattataaatgtacatatgtattctcacattctgaaaaataacattctcagaatccacagaaaatatacttagttactactgaagataatttttgaaatgtaaaannnnnnnnnnnnnnnnnnnnnnnnnnnnnnnnnnnnnnnnnnnnnnnnnnnnnnncagataggtaaactgcaagatagataggatgaaacttttggcctactgtattacttacagagtttttttgtgtgtggtttttaaaactgttaggcaagaagtgtcaaatgctttagagttaaataacagatcactgatttcaaagacttggtgtatagtgttaaaaattaaagcttaaaagtggttagaaaagtggattaatgcaaaaggggtaataagactgcacattctcagaccaaattaactgct

SEQ ID NO: 184678 - DNA, 1306 bp, Homo Sapiens
ttggcgcgggaggatggagcaagtggagatcctgaggaaattcatccagagggtccaggccatgaagagtcctgaccacaatggggaggacaacttcgcccgggacttcatgcggttaagaagattgtctaccaaatatagaacagaaaagatatatcccacagccactggagaaaaagaagaaaatgttaaaaagaacagatacaaggacatactgccatttgatcacagccgagttaaattgacattaaagactccttcacaagattcagactatatcaatgcaaattttataaagggcgtctatgggccaaaagcatatgtagcaactcaaggacctttagcaaatacagtaatagatttttggaggatgatatgggagtataatgttgtgatcattgtaatggcctgccgagaatttgagatgggaaggaaaaaatgtgagcgctattggcctttgtatggagaagaccccataacgtttgcaccatttaaaatttcttgtgaggatgaacaagcaagaacagactacttcatcaggacactcttacttgaatttcaaaatgaatctcgtaggctgtatcagtttcattatgtgaactggccagaccatgatgttccttcatcatttgattctattctggacatgataagcttaatgaggaaatatcaagaacatgaagatgttcctatttgtattcattgcagtgcaggctgtggaagaacaggtgccatttgtgccatagattatacgtggaatttactaaaagctgggaaaataccagaggaatttaatgtatttaatttaatacaagaaatgagaacacaaaggcattctgcagtacaaacaaaggagcaatatgaacttgttcatagagctattgcccaactgtttgaaaaacagctacaactatatgaaattcatggagctcagaaaattgctgatggagtgaatgaaattaacactgaaaacatgatcagctccatagagcctgaaaaacaagattctcctcctccaaaaccaccaaggacccgcagttgccttgttgaaggggatgctaaagaagaaatactgcagccaccggaacctcatccagtgccacccatcttgacaccttctcccccttcagcttttccaacagtcactactgtgtggcaggacaatgatagataccatccaaagccagtgttgcatatggtttcatcagaacaacattcagcagacctcaacagaaactatagtaaatcaacagaacttctagggaaaaatgaatcaacaattgaacagatagataaaaaattggaa

SEQ ID NO: 184679 - DNA, 1519 bp, Homo Sapiens
aactttgtacaaaaaagttggcatagttcaaaaatatcaaatggaaaatttcagaagtaaacactttgtaagttttaaatgctgcaccattctgagaagcatggggaagtatgtcctgcttgcaagataaatcatcccatggtccagtgtgtacacactgtagactctaccagcccattagtcacatagtagatactgcagttaccagatggactgtcatggtgtcccagtggttatgttcacatgacccttattttacttataatggcccaaacctcaacagtagtgaggtagtgactagtgatagattgttataattgttctaatgtattattagttattgttgttaatctcttgttgtgcctgatttataaattaaactttatcataggtatgtacatataggaaaaatcatagtgtatatgtatatgtattctgtgtaacagatgttgccatgaacacactgtaagttgtattttgtttattactaagtagaattttgtcaaacttcttaaatgattttttgtttctgaatattaacatgtctatccacatttattttatagttgttttatcacaaaaatcaattgtttttcaaactttatatccttagtgcaggctgtggaagaacaggtgccatttgtgccatagattatacgtggaatttactaaaagctgggaaaataccagaggaatttaatgtatttaatttaatacaagaaatgagaacacaaaggcattctgcagtacaaacaaaggagcaatatgaacttgttcatagagctattgcccaactgtttgaaaaacagctacaactatatgaaattcatggagctcagaaaattgctgatggagtgaatgaaattaacactgaaaacatgatcagctccatagagcctgaaaaacaagattctcctcctccaaaaccaccaaggacccgcagttgccttgttgaaggggatgctaaagaagaaatactgcagccaccggaacctcatccagtgccacccatcttgacaccttctcccccttcagcttttccaacagtcactactgtgtggcaggacaatgatagataccatccaaagccagtgttgcatatggtttcatcagaacaacattcagcagacctcaacagaaactatagtaaatcaacagaacttccagggaaaaatgaatcaacaattgaacagatagataaaaaattggaacgaaatttaagttttgagattaagaaggtccctctccaagagggaccaaaaagttttgatgggaacacacttttgaataggggacatgcaattaaaattaaatctgcttcaccttgtatagctgataaaatctctaagccacaggaattaagttcagatctaaatgtcggtgatacttcccagaattcttgtgtggactgcagtgtaacacaatcaaacaaagtttcagttactccaccagaagaatcccagaattcagacacaccttcaaagccagaccgcttgcctcttgatgaaaaggacatgta

SEQ ID NO: 184680 - DNA, 2250 bp, Homo Sapiens
taaaagccaactttgtacaaaaaagttggagatgttcctatcttgtattcattgcagtgcaggctgtggaagaacaggtgccatttgtgccatagattatacgtggaatttactaaaagctgggaaaataccagaggaatttaatgtatttaatttaatacaagaaatgagaacacaaaggcattctgcagtacaaacaaaggagcaatatgaacttgttcatagagctattgcccaactgtttgaaaaacagctacaactatatgaaattcatggagctcagaaaattgctgatggagtgaatgaaattaacactgaaaacatgatcagctccatagagcctgaaaaacaagattctcctcctccaaaaccaccaaggacccgcagttgccttgttgaaggggatgctaaagaagaaatactgcagccaccggaacctcatccagtgccacccatcttgacaccttctcccccttcagcttttccaacagtcactactgtgtggcaggacaatgatagataccatccaaagccagtgttgcatatggtttcatcagaacaacattcagcagacctcaacagaaactatagtaaatcaacagaacttccagggaaaaatgaatcaacaattgaacagatagataaaaaattggaacgaaatttaagttttgagattaagaaggtccctctccaagagggaccaaaaagttttgatgggaacacacttttgaataggggacatgcaattaaaattaaatctgcttcaccttgtatagctgataaaatctctaagccacaggaattaagttcagatctaaatgtcggtgatacttcccagaattcttgtgtggactgcagtgtaacacaatcaaacaaagtttcagttactccaccagaagaatcccagaattcagacacacctccaaggccagaccgcttgcctcttgatgagaaaggacatgtaacgtggtcatttcatggacctgaaaatgccatacccatacctgatttatctgaaggcaattcctcagatatcaactatcaaactaggaaaactgtgagtttaacaccaagtcctacaacacaagttgaaacacctgatcttgtggatcatgataacacttcaccactcttcagaacacccctcagttttactaatccacttcactctgatgactcagactcagatgaaagaaactctgatggtgctgtgacccagaataaaactaatatttcaacagcaagtgccacagtttctgctgccactagtactgaaagcatttctactaggaaagtattgccaatgtccattgctagacataatatagcaggaacaacacattcaggtgctgaaaaagatgttgatgttagtgaagattcacctcctcccctacctgaaagaactcctgaatcgtttgtgttagcaagtgaacataatacacctgtaagatcggaatggagtgaacttcaaagtcaggaacgatctgaacaaaaaaagtctgaaggcttgataacctctgaaaatgagaaatgtgatcatccagcgggaggtattcactatgaaatgtgcatagaatgtccacctactttcagtgacaagagagaacaaatatcagaaaatccaacagaagccacagatattggttttggtaatcgatgtggaaaacccaaaggaccaagagatccaccttcagaatggacatgattcagggagctagaagacactttaagttatactggaaaattcaggtgccactgaaagccagatttatagtattccatctttaatatgtgggactaacagcagtgtagattgttaccttaatattttttgctgggaccatctacctgccttatactacacttaggaaaaagtattacatatggtttattttgaaacttcaagtattattgccttaatgtctcttaaccctgttacacgctgcttgtagacatgttaatatagtaatacctttatgatatattgagtttaaggactactctttttctgttttatcatgtatgcattattttgtatatgtacagggcaagtaggtatataatttgataaagttgcaattgaaatattattaacagaagatgtaagaaatttctgcatggtctaaatctttgtgtactttatttgtaaattatttagccctggagttttagaaaatagtttctgatttttaaacttgctggaattcatgcagcccagctttgcaggttatccaagatcaaagattgtat

SEQ ID NO: 184681 - DNA, 1468 bp, Homo Sapiens
ttggggagaacctctgctccccgcccgtcttctcttctgcgtttcccgggctagggggcgtggggagtggttttaggcggcgaagccgctcggcagcaccttccttctttgccaggcagacgcccgttgtagccgttggggaaccgttgagaatccgccatggagccagagagggaagggaccgagagacaccccaggaaggtcagggaaagcaggcaggccccaaataagctggtcggggcagctgaggcgatgaaagccggttgggatctcgaggagagtcagcccgaggccaagaaagcccgcttatctaccattttatttactgacaactgtgaagtaacccatgaccagctgtgtgaattgctgaagtatgcagttctgggcaaatccaatgttccaaaacccagggaatgagtcagctacacttttacaggttctatttggagtttggatgtcttcgaaaagcattcagacataaattccgcttgcctccaccatcatctgattttctagctgatgttgttgggctacaaactgaacaaagagctggagatctgcccaagacaatggaagggcctttaccttctaatgcaaaagccgccatcaaccttcaggatgatcccatcattcaaaagtatggctctaagaaagtgggcttgaccagatgccttctgacaaaggaggaaatgagaacgtttcactttccattacaagtgcctcacatccaaggggagagagctaacacgcatctcactggttgctgaaggaggctgctgtgttatggatgaactggtcaaacctgaaaacaagattctggactacctcaccagcttttcgggaatcacgaagaagattcttaacccagtgacgaccaaactcaaagatgtacagaggcagttaaaagcactgcttcctcctgatgctgtgttagtgggccactccttagatttggatctcagagcactgaaaatgatacatccatatgttattgatacatcgttgctttatgtcagagagcagggcagaagatttaagctcaagttcttagccaaagttattttggggaaggatatacagtgtccagacagacttggtcatgatgccacagaagatgctagaacaatccttgaattggctcggtatttccttaagcatggcccaaaaaagattgcagaactaaatctagaagcactagctaatcaccaagaaatacaagcagcaggccaagagcctaaaaacacagcagaagtacttcagcacccaaacacaagtgttttagaatgcttggattcagtgggtcagaagcttctttttttgacccgggagacagatgctggtgaacttccatcttccagaaattgtcaaactattaagtgtctttcaaataaagaggttcttgagcaagccagagtggaaatccccctgtttcccttcagcattgttcagttctcttttaagccttttc

SEQ ID NO: 184682 - DNA, 2676 bp, Homo Sapiens
  misc_feature (183)..(279): n is a, c, g, or t
  misc_feature (1484)..(1551): n is a, c, g, or t
ttggttctcttgggcctggcaggcatggagagctctggttctcttgaaggggacaggctacagcctgccccccttcctgtttccccaaatgactgctctgccatggggagagtagggggctcgcctgggctcggaagagtgtctggtgagatggctttgacaggctggggagagaactccctnnnnnnnnnnnnnnnnnnnnnnnnnnnnnnnnnnnnnnnnnnnnnnnnnnnnnnnnnnnnnnnnnnnnnnnnnnnnnnnnnnnnnnnnnnnnnnnnnagtccaggtcgtgctgagcaggctggtgttgctcttggttccgtgccagctcccaaggtagccgcttcccccacaccgggattcccagaggttctgtcgcagttgcaaatgaaggcacaagggcctgatacacagccctccctcccactcctgctccccatccaggcaggtctctgaccttctccccaaagtctggcctaccttttatcacccccggaccttcagggtcagacttggacagggctgctgggcaaagagccttccctcaggctttgccccctgccggggactgggagccactgtgagtgtggagacctttgggtcctgtgccctccacccagtctcggcttcccaccaaagccttgtcaggggctgggtttgccatcccatggtgggcagcgtgaggagaagaaagagccatcgagtgcttgctgcccagacacgcctgtgtgcgcccgcgcatgcctccccagagaccacctgcctcctgacacttcctccgggaagcggccctgtgtggctttgctttggtcgttcccccatccctgcccaccttaccacttcttttactccccccaccgcccccgctctctctctgtctctgtttttttattttccagaaaatcagttcgaggaaagggaaaggggcaaaaacgaaagcgcaagaaatcccggtataagtcctggagcgttccctgtgggccttgctcagagcggagaaagcatttgtttgtacaagatccgcagacgtgtaaatgttcctgcaaaaacacagactcgcgttgcaaggcgaggcagcttgagttaaacgaacgtacttgcagatgtgacaagccgaggcggtgagccgggcaggaggaaagagcctccctcagggtttcgggaaccagatctctcaccaggaaagactgatacagaacgatcgatacagaaaccacgctgccgccaccacaccatcaccatcgacagaacagtccttaatccagaaacctgaaatgaaggaagaggagactctgcgcagagcactttgggtccggagggcgagactccggcggaagcattcccgggcgggtgacccagcatggtccctcttggaattggattcgccattttatttttcttgctgctaaatcaccgagcccggaagattagagagttttatttctgggattcctgtagacacacccacccacatacatacattnnnnnnnnnnnnnnnnnnnnnnnnnnnnnnnnnnnnnnnnnnnnnnnnnnnnnnnnnnnnnnnnnnnntctttttttaaattaacagtgctaatgttattggtgtcttcactggatgtatttgactgctgtggacttgagttgggaggggaatgttcccactcagatcctgacagggaagaggaggagatgagagactctggcatgatcttttttttgtcccacttggtggggccagggtcctctcccctgcccaggaatgtgcaaggccagggcatgggggcaaatatgacccagttttgggaacaccgacaaacccagccctggcgctgagcctctctaccccaggtcagacggacagaaagacagatcacaggtacagggatgaggacaccggctctgaccaggagtttggggagcttcaggacattgctgtgctttggggattccctccacatgctgcacgcgcatctcgcccccaggggcactgcctggaagattcaggagcctgggcggccttcgcttactctcacctgcttctgagttgcccaggaggccactggcagatgtcccggcgaagagaagagacacattgttggaagaagcagcccatgacagctccccttcctgggactcgccctcatcctcttcctgctccccttcctggggtgcagcctaaaaggacctatgtcctcacaccattgaaaccactagttctgtccccccaggagacctggttgtgtgtgtgtgagtggttgaccttcctccatcccctggtccttcccttcccttcccgaggcacagagagacagggcaggatccacgtgcccattgtggaggcagagaaaagagaaagtgttttatatacggtacttatttaatatccctttttaattagaaattaaaacagttaatttaattaaagagtagggttttttttcagtattcttggttaatatttaatttcaactatttatgagatgtatcttttgctctctcttgctctcttatttgtaccggtttttgtatataaaattcatgtttccaatctctctctccctgatcggtgacagtcactagcttatcttgaacagatatttaattttgctaacactcagctctgccctccccgatcccctggctccccagcacacattcctttgaaataaggtttcaatatacatctacatacta

SEQ ID NO: 184683 - DNA, 1301 bp, Homo Sapiens
  misc_feature (1047)..(1114): n is a, c, g, or t
gccaactttgtacaaaaaagttggctaggagtcagggtgaagcctagagaggatgaaagaaggggaggggatggggagtggtaagaacctaggatttgaattcccagcctggccaacccttgcagccatgtcttggcctcaagtggaacaagggctccttgaggccagcagggttgggggagttggggtgggcctgagcctctttcctgctagagctcttggtcctccctgcctccaccacccatccctgctctgcagaacccctgggtgctgagtggcaggagccccagggttgtcccatctgggtatggctggctgggtcactaacctctgtgatctgcttccttcctttccagattatgcggatcaaacctcaccaaggccagcacataggagagatgagcttcctacagcacaacaaatgtgaatgcagaccaaagaaagatagagcaagacaagaaaaaaaatcagttcgaggaaagggaaaggggcaaaaacgaaagcgcaagaaatcccggtataagtcctggagcgttccctgtgggccttgctcagagcggagaaagcatttgtttgtacaagatccgcagacgtgtaaatgttcctgcaaaaacacagactcgcgttgcaaggcgaggcagcttgagttaaacgaacgtacttgcagatgtgacaagccgaggcggtgagccgggcaggaggaaggagcctccctcagggtttcgggaaccagatctctcaccaggaaagactgatacagaacgatcgatacagaaaccacgctgccgccaccacaccatcaccatcgacagaacagtccttaatccagaacctgaaatgaaggaagaggagactctgcgcagagcactttgggtccggagggcgagactccggcggaagcattcccgggcgggtgacccagcacggtccctcttggaattggattcgccattttatttttcttgctgctaaatcaccgagcccggaagattagagagttttatttctgggattcctgtagacacacccacccacatacatacattnnnnnnnnnnnnnnnnnnnnnnnnnnnnnnnnnnnnnnnnnnnnnnnnnnnnnnnnnnnnnnnnnnnntctttttttaaattaacagtgctaatgttattggtgtcttcactggatgtatttgactgctgtggacttgagttgggagggggaatgttcctactcagatcctgacagggaagaggaggagatgagagactctggcatgatcttttttttgtcccacttggtggggccagggtcctctcctctgccc

SEQ ID NO: 184684 - DNA, 1062 bp, Homo Sapiens
  misc_feature (845)..(912): n is a, c, g, or t
ctttgtacaaaaaagttggatctactaggagtcagggtgaagcctagagaggatgaaagaaggggaggggatggggagtggtaagaacctaggatttgaattcccagcctggccaacccttgcagccatgtcttggcctcaagtggaacaagggctccttgaggccagcagggttgggggagttggggtgggcctgagcctctttcctgctagagctcttggtcctccctgcctccaccacccatccctgctctgcagaacccctgggtgctgagtggcaggagccccagggttgtcccatctgggtatggctggctgggtcactaacctctgtgatctgcttccttcctttccagattatgcggatcaaacctcaccaaggccagcacataggagagatgagcttcctacagcacaacaaatgtgaatgcagaccaaagaaagatagagcaagacaagaaaaatgtgacaagccgaggcggtgagccgggcaggaggaaggagcctccctcagggtttcgggaaccagatctctcaccaggaaagactgatacagaacgatcgatacagaaaccacgctgccgccaccacaccatcaccatcgacagaacagtccttaatccagaaacctgaaatgaaggaagaggagactctgcgcagagcactttgggtccggagggcgagactccggcggaagcattcccgggcgggtgacccagcacggtccctcttggaattggattcgccattttatttttcttgctgctaaatcaccgagcccggaagattagagagttttatttctgggattcctgtagacacacccacccacatacatacatttnnnnnnnnnnnnnnnnnnnnnnnnnnnnnnnnnnnnnnnnnnnnnnnnnnnnnnnnnnnnnnnnnnnnatcctttttttaaattaacagtgctaatgttattggtgtcttcactgggatgtatttgactgctgtgggacttgaatttgggaagggaatgttcccactcagatcctgacagggaagaaggaagaaaatgaaaagactcctggcatgatc

SEQ ID NO: 184685 - DNA, 1620 bp, Homo Sapiens
  misc_feature (1367)..(1435): n is a, c, g, or t
taacactttgggaacaggtggtcccaggtcgtttcctggctagatttgccttgtctggctcctgcccctgagttgcacaggggaggtatggtggggtcttgccttctgtggagaagatgcttcattcccagcccaggttcccagcaagccccaaccatctccttctccctgatggttgcccatgggctcaggaggggacagatggatgcctgtgtcaggagcccctctctccctctcttggagagagtcctgagtgcccccccttcttgggggctttgtttgggaagctggatgagcctggtccatggagagtttaaaaagtcttttggtgttacctggtaatggggcacatctcagcccagatagggtgggagggagctgtgaaacacagggagggggttgctttcgggtatctactaggagtcagggtgaagcctagagaggatgaaagaaggggaggggatggggagtggtaagaacctaggatttgaattcccagcctggccaacccttgcagccatgtcttggcctcaagtggaacaagggctccttgaggccagcagggttgggggagttggggtgggcctgagcctctttcctgctagagctcttggtcctccctgcctccaccacccatccctgctctgcagaacccctgggtgctgagtggcaggagccccagggttgtcccatctgggtatggctggctgggtcactaacctctgtgatctgcttccttcctttccagattatgcggatcaaacctcaccaaggccagcacataggagagatgagcttcctacagcacaacaaatgtgaatgcagaccaaagaaagatagagcaagacaagaaaatccctgtgggccttgctcagagcggagaaagcatttgtttgtacaagatccgcagacgtgtaaatgttcctgcaaaaacacagactcgcgttgcaaggcgaggcagcttgagttaaacgaacgtacttgcagatgtgacaagccgaggcggtgagccgggcaggaggaaggagcctccctcagggtttcgggaaccagatctctcaccaggaaagactgatacagaacgatcgatacagaaaccacgctgccgccaccacaccatcaccatcgacagaacagtccttaatccagaaacctgaaatgaaggaagaggagactctgcgcagagcactttgggtccggagggcgagactccggcggaagcattcccgggcgggtgacccagcacggtccctcttggaattggattcgccattttatttttcttgctgctaaatcaccgagcccggaagattagagagttttatttctgggattcctgtagacacacccacccacatacatacatnnnnnnnnnnnnnnnnnnnnnnnnnnnnnnnnnnnnnnnnnnnnnnnnnnnnnnnnnnnnnnnnnnnnntctttttttaaattaacagtgctaatgttattggtgtcttcactggatgtatttgactgctgtggacttgagttgggaggggaatgttcccactcagatcctgacaggcaagaggaggagatgagagactctggcatgatctttttttgtcccacttggtggggccagggtcctctcccctgccc

SEQ ID NO: 184686 - DNA, 1212 bp, Homo Sapiens
ttggctataagaagatgaacatgacaattttctagaacctggtagcgtgtgtgtgtgtggcggggggtgctgagggaggggagtgagtcacaggagcctgtcccccaacaggtgtgactgctctgacaacctgtggcatgctgcagggtcaggctcctgataggaggatttcatgactatgtcattgtctccactcatttttgacccagtttggaatgtatctgcaattgtgtggctcaacactttaggaaacaatagattattttatattattatttctgatggtgacaagtttgtcttgaggtcacattttctccttgaaaagtgacatcctgtcacttctgctctcacactactgccatacatttgtgttttttgttgttattgtttgggtagagcagttacaagaaaccctaaaacccttggatataaaagaaatctgtttattgatttttaaatctttcctttccaaaagctggatacacatggagctgtttgggaattttccttgctgctaccgcgctgccaccaaatggaattgaccagcggctgttacactgttctttgccactgtgcctatgctcagaatatgctcactgctaagctacaaactcggacagggtcagaaacagaggtgtcccatcccattgcagcctccaccacctgtaaccccttcctggcattggccactgaagggtacaaaggcaaaaggaccacagcaccacttaggtgtagcatggattttaaactgcagtcagtatcagatcctgtttgataaataagctgactgttctctcttgagaacctgtggcctcaaccagccaccaagctgatgtggcccaagtccatctcttggtcttctcctttgaagcacagcctatttctgagccaagggttggggaagcctgtctagatgtgggactcattgccccaaaccagggagaggaagagctcccacagggagagcccaggctctctttgcagcctttcccagtttggtgtttaagcagtgccatgttccttgtttgacaacaagacagtctgtaaagtattgctcttaaaaacaattaaaaagaaccctttcatattggcaccattgccttagtcctctgtgggttggtcttcagccagcattctggtggggagtgactggcattaacaagactgggaaatcgggggtcaaagtaaaatatctttgttttgctttcattc

SEQ ID NO: 184687 - DNA, 1712 bp, Homo Sapiens
ttggaactgtcagaacagctctggtccagatgctgacccttcttctctcctgcaggattgtaggttacttagaattgatgaattgcaggttgtcaaaactggtggaacaccgaaggttcccgactgtttccaaaggactcctaaaaagctttgtatacctgaaaaaacagaaatattagcagtgaatgtagattccaaaggtgttcatgctgttctgaagactggaaattgggtacgatactgtatctttgatcttgctacaggaaaagcagaacaggaaaataattttcctacaagcagcattgctttccttggtcagaatgagaggaatgtagccattttcactgctggacaggaatctcccattattcttcgagatggaaatggtaccatctacccaatggccaaagattgcatgggaggaataagggatcccgattggctggatcttccacctattagtagtcttggaatgggtgtgcattctttaataaatcttcctgccaattcaacaatcaaaaagaaagctgctgttatcatcatggctgtagagaaacaaaccttaatgcaacacattctgcgctgtgactatgaggcctgtcgacaatatctaatgaatcttgagcaagcggttgttttagagcagaatctacagatgctgcagacattcatcagccacagatgtgatggaaatcgaaatattttgcatgcttgtgtatcagtttgctttccaaccagcaataaagaaactaaagaagaagaggaagcggagcgttctgaaagaaatacatttgcagaaaggctttctgctgttgaggccattgcaaatgcaatatcagttgtttcaagtaatggcccaggtaatcgggctggatcatcaagtagccgaagtttgagattacgggaaatgatgagacgttcgttgagagcagctggtttgggtagacatgaagctggagcttcatccagtgaccaccaggatccagtttcaccccccatagctccccctagttgggttcctgaccctcctgcgatggatcctgatggtgacattgattttatcctggcccccgctgtgggatctcttaccacagcagcaaccggtactggtcaaggaccaagcacctccactattccaggtccttccacagagccatctgtagtagaatccaaggatcgaaaggcgaatgctcattttatattgaaattgttatgtgacagtgtggttctccagccctatctacgagaacttctttctgccaaggatgcaagagggatgaccccatttatgtcagctgtaagtggccgagcttatcctgctgcaattaccatcttagaaactgctcagaaaattgcaaaagctgaaatatcctcaagtgaaaaagaggaagatgtattcatgggaatggtttgcccatcaggtaccaaccctgatgactctcctttatatgttttatgttgtaatgacacttgcagttttacatggactggagcagagcacattaaccaggatatttttgagtgtcgaacttgtggcttgctggagtcactgtgttgttgtacggaatgtgcaagggtttgtcataaaggtcatgattgcaaactcaaacggacatcaccaacagcctactgtgattgttgggagaaatgtaaatgtaaaactcttattgctggacagaaatctgctcgtcttgatctactttatcgcctgc

SEQ ID NO: 184688 - DNA, 1761 bp, Homo Sapiens
  misc_feature (229)..(237): n is a, c, g, or t
ttgggccctgaagaaaggcatagtgacaagatgagagagatgcattgtttggagatgtgtttagccagtgcccttcttccccacgagcccccccaaggctcagagcggtactggcttttaaagggaaaggccttcatttcttcgtttatccccccagcagcgctggagagcgaggtggcttcaataagcctggtggtaagtttttgagtattaccatagatagtgtttnnnnnnnnntgcagtcagtttttagaaaactataatttttttattagtttcataagtggtttaaaaatgatctatacaaaagagactaatgggtactgccggcattgtcttaggggttaataaggttaacctatggttacaaaacaaagggtaacttgaagtattgagtaactgcttctgtaatatgggggagaataaatttttaaatttggtttatttagaggaaaaattttgacttaaatttaacactgatttggcacataagcattgagagtgtatttggttaatggtttagaagcaaaccagcaaaggaaaaaagcaaaccctagcaaacctttcacaaatgttaaagagacactgctccattttagcagtgcgggtcattttgagtttaatgaatccccatcaaatggtggtatagtagatagctatgtgtgtttgtaaggtttgtagcttgcaagacgtgcactaataatattttatatgatctttcctggttggcaggacccatggatgaaggaccagatcttgatctaggcccacctgtagatccagatgaagactctgacaacagtgcaatttatgtacaaggattaaatgacagtgtgactctagatgatctggcagacttctttaagcagtgtggggttgttaagatgaacaagagaactgggcaacccatgatccacatctacctggacaaggaaacaggaaagcccaaaggcgatgccacagtgtcctatgaagacccacccactgccaaggctgccgtggaatggtttgatgggaaagattttcaagggagcaaacttaaagtctcccttgctcggaagaagcctccaatgaacagtatgcggggtggtctgccaccccgtgagggcagaggcatgccaccaccactccgtggaggtccaggaggcccaggaggtcctgggggacccatgggtcgcatgggaggccgtggaggagatagaggaggcttccctccaagaggaccccggggttcccgagggaacccctctggaggaggaaacgtccagcaccgagctggagactggcagtgtcccaatccgggttgtggaaaccagaacttcgcctggagaacagagtgcaaccagtgtaaggccccaaagcctgaaggcttcctcccgccaccctttccgcccccgggtggtgatcgtggcagaggtggccctggtggcatgcggggaggaagaggtggcctcatggatcgtggtggtcccggtggaatgttcagaggtggccgtggtggagacagaggtggcttccgtggtggccggggcatggaccgaggtggctttggtggaggaagacgaggtggccctggggggccccctggacctttgatggaacagatgggaggaagatgaggaggacgtggagggatctgcaaaaatggataaaggcgagcaccgtcatggagcgcaagatcggccctacctagatgcagagaccccgcgagctgcattgactacccaattttattttttaaaccagaaacgttttacattt

SEQ ID NO: 184689 - DNA, 1794 bp, Homo Sapiens
  misc_feature (1590)..(1647): n is a, c, g, or t
ttgggctccggccgccgcgccgcctggctttcgtattcgttgttctcggcgggctgtggggcctccgcgccgcggccgttagtcatgtcggattctggaagttacggtcagtctgggggtgagcagcaaagttattctacctatggaaatccaggcagccaaggctatggacaagcatcacaaagctattctggctatgggcaaacgactgattcctcttatggacagaactacagcggttactccagttatggacaaagtcagtcaggttattcacagtcctatggtggttatgagaatcaaaagcagagctcatatagccagcaaccatataataaccagggacagcagcaaaacatggaatcatcaggaagccaaggtggaagagcaccttcctatgaccagccagactatggtcaacaagattcatatgaccagcagtcaggctatgatcaacatcaaggctcatatgatgagcagtcaaattatgatcagcagcatgattcctatagtcaaaaccagcagtcctatcattcacaaagggaaaactacagccaccacacacaagatgaccgtcgtgatgtgagtaggtatggagaagataatagaggatatggcgggtcacagggaggaggtagagggcgtgggggatatgacaaggatggaagaggtcctatgacaggatcaagtggtggtgaccgcggtggcttcaaaaattttggtggtcacagggattatggacccagaacagatgctgattcagaatctgataattcagataacaacacaatctttgtgcaaggacttggggagggtgtgtctacagatcaagttggggagttctttaaacaaataggaattatcaagacaaataagaagaccggaaaaccaatgataaatctttatacagacaaggacacaggaaagccaaagggggaggcaacagtgtcatttgatgaccctccttcagctaaggcagccattgactggtttgatggaaaagaattccatggcaacatcattaaagtgtcctttgccactagaagacctgaattcatgagaggaggtggaagtggaggtgggcggcgaggccgtggaggatatagaggtcgtggaggctttcaagggagaggtggagaccccaaaagtggggattgggtttgccctaatccgtcatgcggaaatatgaactttgctcgaaggaattcctgcaatcagtgcaatgagcctagaccagaggactctcgtccctcaggaggagatttccgggggagaggctacggtggagagaggggctacagaggtcgtgggggcagaggtggagaccgaggcggctatggtggagacagaagtgggggtggctatggtggggacagaagcagcggtggtggctacagcggagatagaagtgggggcggctatggtggagacagaagtgggggtggctatggtggggacagaggcggcggctatggtggggacagaggaggcggctatggaggagaccgaggaggtggctatggaggagatcgaggtggctatggaggagaccgaggtggaggctatggtggagaccgaggaggctatggnnnnnnnnnnnnnnnnnnnnnnnnnnnnnnnnnnnnnnnnnnnnnnnnnnnnnnnnnnctatggaggagacagaaaccgggggggctatggaggagaccgtggtggtggcagtggctacgtggagaccgaagtgggaggctatgaagaaacaggagtggtggcggctatggaggagaccgaggtggggggctacggaggaaaccg

SEQ ID NO: 184690 - DNA, 1570 bp, Homo Sapiens
ttggtgttcttctgtttgaaaaatgagttggaatgcactaagagaaagtgaggccctttctagaatctttttcctcttcattgtgaatagtcacccatactcagaatcattgccaactaatatggacctaagcagcacacggatttaagtaaaatgcatttttgagacttgattttacttcagaatattttaacatattgtcactaaatataagacaacttttttgttattgttttttccctcacttagaagtgacagatttggtagaaagaaaacattgtcattagaagtaaaatgaaaattttttgtagatcaccaagaaaacgaaggtctaggtcacggtctggctctagaaagcgtaaacacagaaagcgatcacgctcccgctcaagagaaagaaagaggaaatcatcacggtcgtattcaagtgaaaggagagccagagaaagggagaaagaacgacagaaaaagggattacctccaattagatctaaaacactaagtgtatgtagtactactctctgggttgggcaagtggacaagaaggcaacacagcaagacttaaccaacctgtttgaagagtttggacagattgaatccattaatatgattcctccccggggctgtgcttatgtctgcatggttcatcgacaagatgcatttcgagctcttcagaaactcagttctggatcatataaaattgggtccaaggtcattaagatcgcttgggctttaaacaaaggtgtaaaaacagaatacaaacaattctgggatgtggatcttggagttacatatataccatgggaaaaagttaaagtggatgacttggaaggttttgcagaaggaggcatgattgatcaggagactgtaaatactgagtgggaaactgtgaaaagctcagaacctgttaaagagacggtccagacaactcagagcccaactccagttgaaaaggagacagtggtcacaacccaggcagaggttttccctcctcctgttgctatgttgcagattccagtggcgccagccgtgcctacagttagtttagtcccaccagcatttcctgtgtcgatgccggttcctcctcctggattcagtccaatccctccacctccttttttaagagcaagttttaacccttcacaaccaccacctggtttcatgccgcctccagttcccccacctgttgtgccaccccctacgattccaccagtagtaccaacatctttagtgcagccgtcattatccatgacaccggaaactgtgaaagatgttggatttggtagccttgttataccaggcggttctgttgccagcaatcttgctacttccgctctgccagctggaaatgtttttaatgctccaactaaacaggcagagcctgaagaaaaagtacctcatcttatagaccaccagatttcttctggtgaaaacaccagatcagtgattccaaatgatatttcaagtaatgctgcaattttaggaggacagccgccaaatgtgacaagcaattctggaattcttggagtcaaaagaccaaatgtatcaagtaattctgaaattcttgggg

SEQ ID NO: 184691 - DNA, 974 bp, Homo Sapiens
ctttcctttttattagtccacaacacatcagtacaacagaggtcaaacccagttcagtggaggtcgttttaactacactgctaaaagaataaaccgaaaaatgatattttatagcccaaatcaaattaaataaatcaaagagaaggaggcaggaaagcccttttaaataccttggcaaccacagttccatgcaccaaaaggaaaactcacataaaaatttccagttaaaagaaaatatggcagtcccaggaaaattaggttatgcatttaacagtttccactgtactactcaattgaccactcgcacaccatgatcacttatccatgttaacatttgtgaatttgagatccgtgtgattaaaaattctttgtgttgctggggctggtaaatgcaggcgtattctattcaattaccttcagtttcctttccaccaacactccaaatgagacctaacctatcagcggctctctcctaactaaatcagaactgccagtcctggcagataccagcagctggtcagatggattcagggccaccaacagtttgtacattcacctttctgctataggaggcagacaatttactagtcttctttcttggataaagctgatcatctgatttgtcaacgctttgctcagaaatataaaattcaatatagttcccctccccccaaaagaatattatttatacaacaccttaatctgtcaaaatattaacaaacagaatcatgttaacattaagcatagtggtttggaaaattaattctaaaaacagaccataactatacaaggagaaaaacagaccaaaaatactaaatgttaagattccccaaattttgaggcaaaaacggaatcattctggtttacaaagtaaattaggcacagtacaaacctatcacaaagtgttggcttatactcactatttcaatttaatgtcttgaacaaaatttaacaactaggttttaaaaacccaa

SEQ ID NO: 184692 - DNA, 1680 bp, Homo Sapiens
ttggcagacaatgacttcatgattctcactctggttgtgccaggatttagacctccgcagtcggtgatggcagacacagagaataaagaggtggccagaatcacatttgtctttgagaccctctgttctgtgaactgtgagctctacttcatggtgggtgtgaattctaggaccaacactcctgtggagacgtggaaaggttccaaaggcaaacagtcctatacctacatcattgaggagaacactaccacgagcttcacctgggccttccagaggaccacttttcatgaggcaagcaggaagtacaccaatgacgttgccaagatctactccatcaatgtcaccaatgttatgaatggcgtggcctcctactgccgtccctgtgccctagaagcctctgatgtgggctcctcctgcacctcttgtcctgctggttactatattgaccgagattcaggaacctgccactcctgcccccctaacacaattctgaaagcccaccagccttatggtgtccaggcctgtgtgccctgtggtccagggaccaagaacaacaagatccactctctgtgctacaatgattgcaccttctcacgcaacactccaaccaggactttcaactacaacttctccgctttggcaaacaccgtcactcttgctggagggccaagcttcacttccaaagggttgaaatacttccatcactttaccctcagtctctgtggaaaccagggtaggaaaatgtctgtgtgcaccgacaatgtcactgacctccggattcctgagggtgagtcagggttctccaaatctatcacagcctacgtctgccaggcagtcatcatccccccagaggtgacaggctacaaggccggggtttcctcacagcctgtcagccttgctgatcgacttattggggtgacaacagatatgactctggatggaatcacctccccagctgaacttttccacctggagtccttgggaataccggacgtgatcttcttttataggtccaatgatgtgacccagtcctgcagttctgggagatcaaccaccatccgcgtcaggtgcagtccacagaaaactgtccctggaagtttgctgctgccaggaacgtgctcagatgggacctgtgatggctgcaacttccacttcctgtgggagagcgcggctgcttgcccgctctgctcagtggctgactaccatgctatcgtcagcagctgtgtggctgggatccagaagactacttacgtgtggcgagaacccaagctatgctctggtggcatttctctgcctgagcagagagtcaccatctgcaaaaccatagatttctggctgaaagtgggcatctctgcaggcacctgtactgccatcctgctcaccgtcttgacctgctacttttggaaaaagaatcaaaaactagagtacaagtactccaagctggtgatgaatgctactctcaaggactgtgacctgccagcagctgacagctgcgccatcatggaaggcgaggatgtagaggacgacctcatctttaccagcaagaagtcactctttgggaagatcaaatcatttacctcccaagaggactcctgatgggatttgactcagtgccgctgaagacatcctcaggaggcccagacatgggacctgtgagaggcactgcctgcctcacctgcc

SEQ ID NO: 184693 - DNA, 2421 bp, Homo Sapiens
ttgggccttctgccagcagaagcagcagccgcagcacctgagccgctactgccgctcactcaggacaacgctatggctgagcctgggcacagccaccatctctccgccagagtcaggggaagaactgagaggcgcataccccggctgtggcggctgctgctctgggctgggaccgccttccaggtgacccagggaacgggaccggagcttcatgcctgcaaagagtctgagtaccactatgagtacacggcgtgtgacagcacgggttccaggtggagggtcgccgtgccgcataccccgggcctgtgcaccagcctgcctgaccccgtcaagggcaccgagtgctccttctcctgcaacgccggggagtttctggatatgaaggaccagtcatgtaagccatgcgctgagggccgctactccctcggcacaggcattcggtttgatgagtgggatgagctgccccatggctttgccagcctctcagccaacatggagctggatgacagtgctgctgagtccaccgggaactgtacttcgtccaagtgggttccccggggcgactacatcgcctccaacacggacgaatgcacagccacactgatgtacgccgtcaacctgaagcaatctggcaccgttaacttcgaatactactatccagactccagcatcatctttgagtttttcgttcagaatgaccagtgccagcccaatgcagatgactccaggtggatgaagaccacagagaaaggatgggaattccacagtgtggagctaaatcgaggcaataatgtcctctattggagaaccacagccttctcagtatggaccaaagtacccaagcctgtgctggtgagaaacattgccataacaggggtggcctacacttcagaatgcttcccctgcaaacctggcacgtatgcagacaagcagggctcctctttctgcaaactttgcccagccaactcttattcaaataaaggagaaacttcttgccaccagtgtgaccctgacaaatactcagagaaaggatcttcttcctgtaacgtgcgcccagcttgcacagacaaagattatttctacacacacacggcctgcgatgccaacggagagacacaactcatgtacaaatgggccaagccgaaaatctgtagcgaggaccttgagggggcagtgaagctgcctgcctctggtgtgaagacccactgcccaccctgcaacccaggcttcttcaaaaccaacaacagcacctgccagccctgcccatatggttcctactccaatggctcagactgtacccgctgccctgcagggactgaacctgctgtgggatttgaatacaaatggtggaacacgctgcccacaaacatggaaacgaccgttctcagtgggatcaacttcgagtacaagggcatgacaggctgggaggtggctggtgatcacatttacacagctgctggagcctcagacaatgacttcatgattctcactctggttgtgccaggatttagacctccgcagtcggtgatggcagacacagagaataaagaggtggccagaatcacatttgtctttgagaccctctgttctgtgaactgtgagctctacttcatggtgggtgtgaattctaggaccaacactcctgtggagacgtggaaaggttccaaaggcaaacagtcctatacctacatcattgaggagaacactaccacgagcttcacctgggccttccagaggaccacttttcatgaggcaagcaggaagtacaccaatgacgttgccaagatctactccatcaatgtcaccaatgttatgaatggtgtggcctcctactgccgtccctgtgccctagaagcctctgatgtgggctcctcctgcacctcttgtcctgctggttactatattgaccgagattcaggaacctgccactcctgccccactaacacaattctgaaagcccaccagccttatggtgtccaggcctgtgtgccctgtggtccagggaccaagaacaacaagatccactctctgtgctacaacgattgcaccttctcacgcaacactccgaccaggactttcaactacaacttctccgctttggcaaacactgtcactcttgctggagggccaagcttcacttccaaagggctgaaatacttccatcactttaccctcagtctctgtggaaaccagggtaggaaaatgtctgtgtgcaccgacaatgtcactgacctccggatcctgagggtgagtcaggttctccaaatctatcacagcctacgtctgccagcagtcatcatccccccagaggtgacagctacaagccggggtttcctcacagcctgtcagccttgctgatcgacttattggggtgacacagatatgactctggatggaatcacctccccagctgaactttcc

SEQ ID NO: 184694 - DNA, 1128 bp, Homo Sapiens
  misc_feature (30)..(49): n is a, c, g, or t
ctttgtacaaaaaagttgggtgcatttgtnnnnnnnnnnnnnnnnnnnnaccttcaggtcttagtggttcacaagagcccagcagccaggctggctttttcattgtagggcgtggttgtcccagctgggtagatttcaggccgccccccccaactccctgcccacagtgttgcagattgcctggctggcagcaagtccagaccacccaaatttggttggattcttcatttctccactgtagttggggtccattgattgtgcaggggaacgtgcaggaggtttttctaggcaccgtgttcagtgctgcttcactctaccagagattatggccaaattgcacggaatttggtttcttgccctctgaagcctgagggcccccccttgcctggctggttgacagacccggggtggtcactgctgagacttcagagatcgcagctgctgtgagaatacggtgaaggtactttgttctggaagatgttgtcatacacttttccccagttattttcaaacttgacatgagcctatgttgactcactgggtgggggtcccttcttacgcagcacacgtggcaagtgcctgaatcggggctggaggcacttcagagcctctgaggggccaccacttctggcccaaaattgcagggttgtagatgaggctgcctgtggagaactggtgtgaggaggaagctgtttccaacaaagagcactttcatctgttgagatggctgtggtgagcaactgaacgagcctacgtgtgtacctgaattttccccgtaactcatttcttccatatgaagaaacaccaaactatgtacagagaactttttacaaaaggcagaccttttttaagctgtgtaacccacatagcctaaccacctggcagaatgactacgaataggggtcattgtgctggtaaaagcctctattacgactgtaagtaagttggatgttggcaaaattaaattgttacagtatttagagctgctgtagctgttccttcacaacataaaataggataaatgactagttacgtctttcaggtgggtggcaagcagaacatgcgtaatattctctacctggtctgtagctgtaactggtgatgtaccggacaaagccaaaattaaaa

SEQ ID NO: 184695 - DNA, 2065 bp, Homo Sapiens
  misc_feature (1822)..(1884): n is a, c, g, or t
tttgtacaaaaaagttggcccagtggataccgatggtaggacaccaggaggactacccggttcacaggcgtcatcacccagggcagagactccagcatccatgacgattttgtgaccaccttcttcgtgggcttcagcaatgacagccagacatgggtgatgtacaccaacggctatgaggaaatgacctttcatgggaacgtggacaaggacacacccgtgctgagtgagctcccagagccggtggtggctcgtttcatccgcatctacccactcacctggaatggcagcctgtgcatgcgcctggaggtgctggggtgctctgtggcccctgtctacagctactacgcacagaatgaggtggtggccaccgatgacctggatttccggcaccacagctacaaggacatgcgccagctcatgaaggtggtgaacgaggagtgccccaccatcacccgcacttacagcctgggcaagagctcacgaggcctcaagatctatgccatggagatctcagacaaccctggggagcatgaactgggggagcccgagttccgctacactgctgggatccatggcaacgaggtgctgggccgagagctgttgctgctgctcatgcagtacctgtgccgagagtaccgcgatgggaacccacgtgtgcgcagcctggtgcaggacacacgcatccacctggtgccctcactgaaccctgatggctacgaggtggcagcgcagatgggctcagagtttgggaactgggcgctgggactgtggactgaggagggctttgacatctttgaagatttcccggatctcaactctgtgctctggggagctgaggagaggaaatgggtcccctaccgggtccccaacaataacttgcccatccctgaacgctacctttcgccagatgccacggtatccacggaggtccgggccatcattgcctggatggagaagaaccccttcgtgctgggagcaaatctgaacggcggcgagcggctagtatcctacccctacgatatggcccgcacgcctacccaggagcagctgctggccgcagccatggcagcagcccggggggaggatgaggacgaggtctccgaggcccaggagactccagaccacgccatcttccggtggcttgccatctccttcgcctccgcacacctcaccttgaccgagccctaccgcggaggctgccaagcccaggactacaccggcggcatgggcatcgtcaacggggccaagtggaacccccggaccgggactatcaatgacttcagttacctgcataccaactgcctggagctctccttctacctgggctgtgacaagttccctcatgagagtgagctgccccgcgagtgggagaacaacaaggaggcgctgctcaccttcatggagcaggtgcaccgcggcattaagggggtggtgacggacgagcaaggcatccccattgccaacgccaccatctctgtgagtggcattaatcacggcgtgaagacagccagtggtggtgattactggcgaatcttgaacccgggtgagtaccgcgtgacagcccacgcggagggctacaccccgagcgccaagacctgcaatgttgactatgacatcggggccactcagtgcaacttcatcctggctcgctccaactggaagcgcttccgggagatcatggccatgaacgggaaccggcctatcccacacatagacccatcgcgccctatgaccccccaacatcgacgcctgcatcagcgacgcctacaacaccgcctgcggcttcgggcacagatgcggctgcggcgcctcaacgccnnnnnnnnnnnnnnnnnnnnnnnnnnnnnnnnnnnnnnnnnnnnnnnnnnnnnnnnnnnnnnnagcactaccatatagccctggggcctcataccgccaaccaccgctggctgggaggagtcggagactgagacctacacagaggtggtgacagaatttgggaccgaggtggagcccgagtttgggaccaaggtggaacccgatttgaaacccagttggagcttgagtttgaaacctacctgga

SEQ ID NO: 184696 - DNA, 1043 bp, Homo Sapiens
  misc_feature (252)..(294): n is a, c, g, or t
  misc_feature (743)..(803): n is a, c, g, or t
ttggcggctatccgcgcgggagtgcgccacgcggggccggagcgcctattagccgccaggacctcggagcgccccgaccacccctgagcccctctggcttcggagccccccagcaccccttcccgggtcccctcgcccaccctaatccactctccctccctttcccggattccctcgctcaccccatcctctctcccgccccttcctggattccctcacccgtctcgatcccctctccgccctttcccagannnnnnnnnnnnnnnnnnnnnnnnnnnnnnnnnnnnnnnnnnngcgcgtgccgcggccatggcggccgtgcgcggggcgcccctgctcagctgcctcctggcgttgctggccctgtgccctggagggcgcccgcagacggtgctgaccgacgacgagatcgaggagttcctcgagggcttcctgtcagagctagaacctgagccccgggaggacgacgtggaggccccgccgcctcccgagcccaccccgcgggtccgaaaagcccaggcggggggcaagccagggaagcggccagggacggccgcagaagtgcctccggaaaagaccaaagacaaagggaagaaaggcaagaaagacaaaggccccaaggtgcccaaggagtccttggaggggtcccccaggccgcccaagaaggggaaggagaagccacccaaggccaccaagaagcccaaggagaagccacctaaggccaccaagaagcccaaggagannnnnnnnnnnnnnnnnnnnnnnnnnnnnnnnnnnnnnnnnnnnnnnnnnnnnnnnnnnnngtcagggaagaggccccccattctggctccctcagaaaccctggagtggccactgcccccaccccccagccctggccccgaggagctaccccaggagggaggggcgcccctctcaaataactggcagaatccaggagaggagacccatgtggaggcacgggagcaccagcctgagccggacgaggagaccgagcaacccacactggactacaatgaccagatcgagaggggaggactatg

SEQ ID NO: 184697 - DNA, 2268 bp, Homo Sapiens
  misc_feature (94)..(149): n is a, c, g, or t
ttggctctccctccctttcccggattccctcgctcaccccatcctctctcccgccccttcctggattccctcacccgtctcgatcccctctccnnnnnnnnnnnnnnnnnnnnnnnnnnnnnnnnnnnnnnnnnnnnnnnnnnnnnnnngcgcgtgccgcggccatggcggccgtgcgcggggcgcccctgctcagctgcctcctggcgttgctggccctgtgccctggagggcgcccgcagacggtgctgaccgacgacgagatcgaggagttcctcgagggcttcctgtcagagctagaacctgagccccgggaggacgacgtggaggccccgccgcctcccgagcccaccccgcgggtccgaaaagcccaggcggggggcaagccagggaagcggccagggacggccgcagaagtgcctccggaaaagaccaaagacaaagggaagaaaggcaagaaagacaaaggccccaaggtgcccaaggagtccttggaggggtcccccaggccgcccaagaaggggaaggagaagccacccaaggccaccaagaagcccaaggagaagccacctaaggccaccaagaagcccaaggagaagccacccaaggccaccaagaagcccaaagagaagccacccaaggccaccaagaagcccccgtcagggaagaggccccccattctggctccctcagaaaccctggagtggccactgcccccaccccccagccctggccccgaggagctaccccaggagggaggggcgcccctctcaaataactggcagatccaggagaggagacccatgtggaggcacgggagcaccagcctgagccggaggaggagaccgagcaacccacactggactacaatgaccagatcgagagggaggactatgaggactttgagtacattcggcgccagaagcaacccaggccacccccaagcagaaggaggaggcccgagcgggtctggccagagacccctgaggagaaggccccggccccagccccggaggagaggattgagcctcctgtgaagcctctgctgcccccgctgccccctgactatggtgatggttacgtgatccccaactacgatgacatggactattactttgggcctcctccgccccagaagcccgatgctgagcgccagacggacgaagagaaggaggagctgaagaaacccaaaaaggaggacagcagccccaaggaggagaccgacaagtgggcagtggagaagggcaaggaccacaaagagccccgaaagggcgaggagttggaggaggagtggacgcctacggagaaagtcaagtgtccccccattgggatggagtcacaccgtattgaggacaaccagatccgagcctcctccatgctgcgccacggcctgggggcacagcgcggccggctcaacatgcagaccggtgccactgaggacgactactatgatggtgcgtggtgtgccgaggacgatgccaggacccagtggatagaggtggacaccaggaggactacccggttcacaggcgtcatcacccagggcagagactccagcatccatgacgattttgtgaccaccttcttcgtgggcttcagcaatgacagccagacatgggtgatgtacaccaacggctatgaggaaatgacctttcatgggaacgtggacaaggacacacccgtgctgagtgagctcccagagccggtggtggctcgtttcatccgcatctacccactcacctggaatggcagcctgtgcatgcgcctggaggtgctggggtgctctgtggcccctgtctacagctactacgcacagaatgaggtggtggccaccgatgacctggatttccggcaccacagctacaaggacatgcgccagctcatgaaggtggtgaacgaggagtgccccaccatcacccgcacttacagcctgggcaagagctcacgaggcctcaagatctatgccatggagatctcagacaaccctggggagcatgaactgggggagcccgagttccgctacactgctgggatccatggcaacgaggtgctgggccgagagctgttgctgctgctcatgcagtacctgtgccgagagtaccgcgatgggaacccacgtgtgcgcagcctggtgcaggacacacgcatccacctggtgccctcactgaaccctgatggctacgagtggcagcgcagatgggctcagagtttgggaactgggcgctgggactgtggactgaggagggctttgacatctttgagatttcc

SEQ ID NO: 184698 - DNA, 1008 bp, Homo Sapiens
  misc_feature (219)..(274): n is a, c, g, or t
  misc_feature (722)..(783): n is a, c, g, or t
ttggcgccacgcggggccggagcgcctattagccgccaggacctcggagcgccccgaccacccctgagcccctctggcttcggagccccccagcaccccttcccgggtcccctcgcccaccctaatccactctccctccctttcccggattccctcgctcaccccatcctctctcccgccccttcctggattccctcacccgtctcgatcccctctccnnnnnnnnnnnnnnnnnnnnnnnnnnnnnnnnnnnnnnnnnnnnnnnnnnnnnnnngcgcgtgccgcggccatggcggccgtgcgcggggagcccctgctcagctgcctcctggcgttgctggccctgtgccctggagggcgcccgcagacggtgctgaccgacgacgagatcgaggagttcctcgagggcttcctgtcagagctagaacctgagccccgggaggacgacgtggaggccccgccgcctcccgagcccaccccgcgggtccgaaaagcccaggcggggggcaagccagggaagcggccagggacggccgcagaagtgcctccggaaaagaccaaagacaaagggaagaaaggcaagaaagacaaaggccccaaggtgcccaaggagtccttggaggggtcccccaggccgcccaagaaggggaaggagaagccacccaaggccaccaagaagcccaaggagaagccacctaaggccaccaagaagcccaaggagnnnnnnnnnnnnnnnnnnnnnnnnnnnnnnnnnnnnnnnnnnnnnnnnnnnnnnnnnnnnnngtcagggaagaggccccccattctggctccctcagaaaccctggagtggccactgcccccaccccccagccctggccccgaggagctaccccaggagggaggggcgcccctctcaaataactggcagaatccaggagaggagacccatgtggaggcacgggagcaccagcctgagccggaggaggagaccgagcaacccacactggactacaatgaccagatcga

SEQ ID NO: 184699 - DNA, 2183 bp, Homo Sapiens
ttggcaggaggaagctgctgagccatgggcgcctacgcgcgggcttcgggggtctgcgctcgcggctgcctggactcagcaggcccctggaccatgtcccgcgccctgcggccaccgctcccgcctctctgctttttccttttgttgctggcggctgccggtgctcgggccgggggatacgagacatgccccacagtgcagccgaacatgctgaacgtgcacctgctgcctcacacacatgatgacgtgggctggctcaaaaccgtggaccagtacttttatggaatcaagaatgacatccagcacgccggtgtgcagtacatcctggactcggtcatctctgccttgctggcagatcccacccgtcgcttcatttacgtggagattgccttcttctcccgttggtggcaccagcagacaaatgccacacaggaagtcgtgcgagaccttgtgcgccaggggcgcctggagttcgccaatggtggctgggtgatgaacgatgaggcagccacccactacggtgccatcgtggaccagatgacacttgggctgcgctttctggaggacacatttggcaatgatgggcgaccccgtgtggcctggcacattgaccccttcggccactctcgggagcaggcctcgctgtttgcgcagatgggcttcgacggcttcttctttgggcgccttgattatcaagataagtgggtacggatgcagaagctggagatggagcaatgtggcgggccagcaccagcctgaagcccccgaccgcggacctcttcactggtgtgcttcccaatggttacaacccgccaaggaatctgtgctgggatgtgctgtgtgtcgatcagccgctggtggaggaccctcgcagccccgagtacaacgccaaggagctggtcgattacttcctaaatgtggccactgcccagggccggtattaccgcaccaaccacactgtgatgaccatgggctcggacttccaatatgagaatgccaacatgtggttcaagaaccttgacaagctcatccggctggtaaatgcgcagcaggcaaaaggaagcagtgtccatgttctctactccacccccgcttgttacctctgggagctgaacaaggccaacctcacctggtcagtgaaacatgacgacttcttcccttacgcggatggcccccaccagttctggaccggttacttttccagtcggccggccctcaaacgctacgagcgcctcagctacaacttcctgcaggtgtgcaaccagctggaggcgctggtgggcctggcggccaacgtgggaccctatggctccggagacagtgcacccctcaatgaggcgatggctgtgctccagcatcacgacgccgtcagcggcacctcccgccagcacgtggccaacgactacgcgcgccagcttgcggcaggctgggggccttgcgaggttcttctgagcaacgcgctggcgcggctcagaggcttcaaagatcacttcaccttttgccaacagctaaacatcagcatctgcccgctcagccagacggcggcgcgcttccaggtcatcgtttataatcccctggggcggaaggtgaattggatggtacggctgccggtcagcgaaggcgttttcgttgtgaaggaccccaatggcaggacagtgcccagcgatgtggtaatatttcccagctcagacagccaggcgcaccctccggagctgctgttctcagcctcactgcccgccctgggcttcagcacctattcagtagcccaggtgcctcgctggaagccccaggcccgcgcaccacagcccatccccagaagatcctggtcccctgctttaaccatcgaaaatgagcacatccgggcaacgtttgatcctgacacagggctgttgatggagattatgaacatgaatcagcaactcctgctgcctgttcgccagaccttcttctggtacaacgccagtataggtgacaacgaaagtgaccaggcctcaggtgcctacatcttcagacccaccaacagaaaccgctgcctgtgagccgctgggctcagatccacctggtgaagacacccttggtgcaggaggtgcaccagaacttctcagcttggtgttcccaggtggttcgcctgtacccaggacagcggcacctggagctagagtggtcggtggggccgatacctg

SEQ ID NO: 184700 - DNA, 1605 bp, Homo Sapiens
ttgggctgatccggtgggctctagaaggctgaagtggagatgtagaaaaagccatggtgaagtaacacagaaggatgatatgatgatgcctatagatttgggggaaaagacaatatatttagtttcattctttgaaggtttacaacgcattattttattcactgaagatccaagggtatttaaagtaacatatgaaagtgagaaagcagagttagcagagcaagaaattgcagtggcattacaagatgttggaatttctcttgtcaacaattacacgaagcaagaagtagcctatataggcattacaagttctgatgtggtttgggaaacaaagcccaagaagaaggcaagatggaagccaatgagtgtaaagcacactgagaagttagagagagaatttaaggaatatactgaatcttctccttcagaagataaggttattcagttggacactaatgttccggttcgcctaacccctactggtcataacatgaaaattctgcagccgcatgtaatagctctacgaagaaattatcttccagcattaaaagtggaatataacacatctgcacatcaatcatcatttagaattcagatttacagaatacagatccaaaatcagatacatggtgctgtatttccctttgtgttttatcctgttaaacctccaaagtcggtcaccatggattcagcaccaaagccctttacagatgtcagtattgtcatgagatctgcatgacattcccagatatcacgtattaagtatttcaaagtattgattcaagaaatggatctcaggttagatcttgggtttatctatgctttaacagaccttatgacagaagctgaggtgactgaaaatacagaggttgagctttttcataaagatatagaagctttcaaagaagaatataaaacagcctcattagtagatcaatcacaagtcagcctctatgaatattttcatatatctcctatcaagttacatttaagtgtttcactgagttccggcagagaagaagctaaagattcaaaacaaaatggaggactgattccagttcattctttaaatcttttgctgaagagtattggtgccacactgacagatgtacaagatgtagtttttaagcttgcattttttgaactcaactatcagttccatacaacatccgatctacagtctgaagtcataagacactattcaaaacaggccattaagcagatgtatgtactcattcttggacttgatgttttgggaaatccatttggcttaattagagaattttctgaaggtgttgggaaaggtttagtaggagcggtagcaaggccaactggaggcatcatagacatggctagcagtacatttcagggaataaaaagagctacagagacctctgaagtggagagtctgcgacctcctcggttcttcaatgaagatggagttatcagaccgtacaggttgaggggatgggactggaaatcaaatgttacaggtcatggaaaatggaagatttgcaaaatacaaatattttacccatgtcatgatccataagacagatatgctaatgataaccagacgtggtgtattgtttgtaacaaaggaaa

SEQ ID NO: 184701 - DNA, 1655 bp, Homo Sapiens
tacaaaaaagttggcttccgagagcgcctgccgcccctgcgccgccgagccagctgccagaatgccgaactggggaggaggcaagaaatgtggggtgtgtcagaagacggtttactttgccgaagaggttcagtgcgaaggcaacagcttccataaatcctgcttcctgtgcatggtctgcaagaagaatctggacagtaccactgtggccgtgcatggtgaggagatttactgcaagtcctgctacggcaagaagtatgggcccaaaggctatggctacgggcagggcgcaggcaccctcagcactgacaagggggagtcgctgggtatcaagcacgaggaagcccctggccacaggcccaccaccaaccccaatgcatccaaatttgcccagaagattggtggctccgagcgctgcccccgatgcagccaggcagtctatgctgcggagaaggtgattggtgctgggaagtcctggcataaggcctgctttcgatgtgccaagtgtggcaaaggccttgagtcaaccaccctggcagacaaggatggcgagatttactgcaaaggatgttatgctaaaaacttcgggcccaagggctttggttttgggcaaggagctggggccttggtccactctgagtgaggccaccatcacccaccacaccctgcccactcctgcgcttttcatcgccattccattcccagcagctttggagacctccaggattatttctctgtcagccctgccacatatcactaatgacttgaacttgggcatctggctccctttggtttgggggtctgcctgaggtcccaccccactaaagggctccccaggcctgggatctgacaccatcaccagtaggagacctcagtgttttgggtctaggtgagagcaggcccctctccccacacctcgccccacagagctctgttcttagcctcctgtgctgcgtgtccatcatcagctgaccaagacacctgaggacacatcttggcacccagaggagcagcagcaacaggctggagggagagggaagcaagaccaagatgaggaggggggaaggctgggttttttggatctcagagattctcctctgtgggaaagaggttgagcttcctggtgtccctcagagtaagcctgaggagtcccagcttagggagtcactattggaggcagagaggcatgcaggcggggtcctaggagcccctgcttctccaggcctcttgcctttgagtctttgtggaatggatagcctcccactaggactgggaggagaataacccaggtcttaaggaccccaaagtcaggatgttgtttgatcttctcaaacatctagttccctgcttgatgggaggatcctaatgaaatacctgaaacatatattggcatttatcaatggctcaaatcttcatttatctctggccttaaccctggctcctgaggctgcggccagcagagcccaggccagggctctgttcttgccacacctgcttgatcctcagatgtggagggaggtaggcactgcctcagtcttcatccaaacacctttccctttgccctgagacctcagaatcttccctttaacccaagaccctgcctcttccactccacccttctccagggacccttagatcacatcactccacccctg

SEQ ID NO: 184702 - DNA, 1668 bp, Homo Sapiens
ttggcctcctgggaatccagtataccctcagaccttgcatcttcctctctgtatcttcccatggcccagtctgtggctgttgggcctttaggttccacaatccccatggcttattatccagtcggtcccatctatccacctggctccacagtgctggtggaaggagggtatgatgcaggtgccagatttggagctggggctactgctggcaacattcctcctccacctcctggatgccctcccaatgctgctcagcttgcagtcatgcagggagccaacgtcctcgtaactcagcggaaggggaacttcttcatgggtggttcagatggtggctacaccatctggtgaggaaccaaggccacctttgtgccgggaaagacatcacataccttcagcacttctcacaatgtaactgctttagtcatattaacctgaagttgcagtttagacacatgttgttggggtgtctttctggtgcccaaactttcaggcacttttcaaatttaataaggaaccatgtaatggtagcagtacctccctaaagcattttgaggtaggggaggtatccattcataaaatgaatgtgggtgaagccgccctaaggattttcctttaatttctctggagtaatactgtaccatactggtctttgcttttagtaataaaacatcaaattaggtttggagggaactttgatcttcctaagaattaaagttgccaaattattctgattggtctttaatctcctttaagtctttgatatatattacttgttataaatggaacgcattagttgtctgccttttcctttccatcccttgccccacccatcccatctccaaccctagtcttccatttcctcccgccagtctccattgaatcaatggtgcaggacagaaagccagtcagactaatttccttctttcctcgcacttctccccactcgtcatcttttaactagtgtttcacaaggatcctctgaaaccctctctgtgccccaagtacagatcccattacttctgctttcgtatctcctcaggcaaaagtggagggtgccttatgggccctcctcataggttgtctctgcatacacgaacctaacccaaatttgctttggtgccagaaaaactgagctatgtttgaacaaagatgtcgtgcaaactgtactgtgaacaacagttggtttaaaatatgaggggcaaggaggaggatgcatttcaaaagcttgattgatgtgttcagagctaaattaagaggagttttcagatcaaaaactggttaccattttttgtcagagtgtctgatgcggccactcattcggctccccagaattcctagactgggttaatagggtcatattgtgaatgtctcactacaaaatgacttgagtccagtgaaatctcattagggtttaagaatatttcagggatccttaatgttttgatttttgttttctgaaattggatttattttattttatcttataatttcagttcatctaaattgtgtgttctgtacatgtgatgtttgactgtaccattgactgttatggaagttcagcgttgtatgtctctctctacactgtggtgcacttaacttgtggaatttttatactaaaaatgtagaataaagactattttgaagatttgaataaagtgatgaagttgc

SEQ ID NO: 184703 - DNA, 902 bp, Homo Sapiens
gaaggtagtggttcaggaccagccggagccggccttcgttcaaggtctcccatgaccagggctcggaccgcgcggtagttggcgtagatgtggagggcagtgaggaagaagaaacatccaaggctgaagccagggcaacctgacaccagagggagcatcaggaggctgaccaagagccccgccaggttcaccagcgtctcctggctgctgtccttggctgacacgtcagccatgttgttcctccgagcctggtgcacggtcagggcagcccgagtggccccaccagcaacactcacgatgcacttggctaggttgctggtggagacggtcatggtgaaacagattgggtatacaggagccataatctcaaggaacatggctacgtcattgaggatgtccgcaaaaagcctccactgcttggcattgcagtccagtttgctccctttccaccaggcaaagacgatgcggcccagcatgccagttgaatctttcacgagccaggtggccgtggcagctgaaacagtggcttttgcgttccccacccctatgcccagcaagactgcctgggtggctagggagccggagaggctggaagcaaacgcctgcacggaatcccacagctggtagggcaagtagtccgggctgacgctatcagggaagccctgaggcaggaacacggcctggagcccggagaggggcggtgagggggccccggaagcccccacttcgcccgcatctcgtccttcaggtttgaccgtgaaggccctggagagcccccaccagcgccagcccccgacctcccactgcaggctcccgtccgcggcggcgcggcagccccgtgcctccccggagccgaactgctcggaacacagcggggtctccaaacccgcgtcgtcagccaa

SEQ ID NO: 184704 - DNA, 2314 bp, Homo Sapiens
  misc_feature (1179)..(1219): n is a, c, g, or t
  misc_feature (1493)..(1550): n is a, c, g, or t
  misc_feature (2080)..(2088): n is a, c, g, or t
ctttgtacaaaaaagttggccagttatctccacatgtatgacattgtcaaagtctgcaaaaagaagctgaaagagaaagccaccacggaggcagacagcaccaaaaaggaagaagatgcttcaagttgttcggacaaagtcgagagtctctccgatggcagcagccacatagcaggcgatttgcccagtgatgaagatgaaggagaagatgaaaaattgaacatcctgcccagcaaaagggacttggcggccgagcctgggaacatgtggatgcgattgccctcagactcagcaggcatcccccaggctggcggagaggcagagccacacgccacagcagctggaaaaacagtagccagcccctgcagctcaacagagtctttgtcccagaggacgtgctgagaagcaacctggtgcaggtgaaggtggagaaagaggcttcctgtgatgagagtgatgttggcactaatgactatgacatggaacatagcactgtgaaagaaagtgtgagcactaataacagggtacagtatgagccggcccatctggctcccctgagggaggactcggtcttgagggagctggaccgggaggacaaagccagtgatgatgagatgatgaccccagagagcgagcgtgtccaggtggagggaggcatggagagcagtctgctcccctacgtctccaacatcctgagccccgcgggccagatcttcatgtgccccctgtgcaacaaggtcttccccagcccccacatcctgcagatccacctgagcacgcacttccgcgagcaggacggcatccgcagcaagcccgccgccgatgtcaacgtgcccacgtgctcgctgtgtgggaagactttctcttgcatgtacaccctcaagcgccacgagaggactcactcgggggagaagccctacacatgcacccagtgcggcaagagcttccagtactcgcacaacctgagccgccatgccgtggtgcacacccgcgagaagccgcacgcctgcaagtggtgcgagcgcaggttcacgcagtccggggacctgtacagacacattcgcaagttccactgtgagttggtgaactccttgtcggtcaaaagcgaagcactgagcttgcctactgtcagagactggaccttagaagatagctctcaagaactttggaaataatttnnnnnnnnnnnnnnnnnnnnnnnnnnnnnnnnnnnnnnnnnaatagatctctatatagttgtggtacggtctaaaagcagtcttgtttcctggaaataaaaagttgggatattaacttgtttttgcactttagaatagcatgagaatctcactaatttagcattctgataaaagaaactttagagcaagtcagaatagagaggtgtttttccttttgaggggataggggaagtaagccaataagaaccttttaaacaaatcgtcctgtcacaaaatgctttcatatggcttaattttgtcaacactgcattgtcnnnnnnnnnnnnnnnnnnnnnnnnnnnnnnnnnnnnnnnnnnnnnnnnnnnnnnnnnnaagtagaaattccctccagttttattagcctctttatatgtctcaaattgcatgaattttttctggctgttggaaacctgaatgcttttagacccaaatggaaaatttctgaaatgctggattatctatttttaaacaagcagttgacttaaaactttctgtggcaacttctggttttctgacagttcccagtgagagaaatgctgaaagtacactgggatcactgggacactgtcttatgaaggtttgcttgggatgaaaaaggatattgcagcttcagcagtgttgaactgtgtgtttaaaaatgtgaattactgttattgtatactgtaattgattacatgggctgggggggtgtcaaagaacttgacaggttgtgttgatgctcttagttgagtcttgaaaagtaaatattaacgctacagaaatgcatgagtttcaatatattttttgtctttgtttgcattgtataactttaacgagtgagtttaaaattatttaatttccttagaaaaatagcaccatttggnnnnnnnnnctggtgttatgaagaacgtaaatgcactgtttttatttttattttatataatttaaattgactttcccactgtctttaagttgaaactgttaagctgaataaaaacttaagctgcaaattgataacttcgctacataacaaggaaaatataaaatgtttacaaacagcttaaagatttgcatgtgcagtgtgcatttataacaaacttctaatttgcacaaaaccc

SEQ ID NO: 184705 - DNA, 1468 bp, Homo Sapiens
  misc_feature (265)..(273): n is a, c, g, or t
  misc_feature (586)..(679): n is a, c, g, or t
  misc_feature (914)..(931): n is a, c, g, or t
ttggtgcagcttcagcagtgttgaactgtgtgtttaaaaatgtgaattactgttattgtatactgtaattgattacatgggctgggggggtgtcaaagaacttgacaggttgtgttgatgctcttagttgagtcttgaaaagtaaatattaacgctacagaaatgcatgagtttcaatatattttttgtctttgtttgcattgtataactttaacgagtgagtttaaaattatttaatttccttagaaaaatagcaccatttggnnnnnnnnnctggtgttatgaagaacgtaaatgcactgtttttatttttattttatataatttaaattgactttcccactgtctttaagttgaaactgttaagctgaataaaaacttaagctgcaaattgataacttcgctacataacaaggaaaatataaatgtttacaaacagcttaaagatttgcatgtgcagtgtgcatttataacaaacttctaattgcacaaaacccatgccagctcagagtttaggtgtacacatttacccagttgagcgttcttagaataactactgcacaagttgacaataggtcgttctctnnnnnnnnnnnnnnnnnnnnnnnnnnnnnnnnnnnnnnnnnnnnnnnnnnnnnnnnnnnnnnnnnnnnnnnnnnnnnnnnnnnnnnnnnnnnnnactcatgaaaagattctatggactgaaaaagccccaggctgaaaggactggactgccttgattgacatggggaagggggttagtagactatgtggattgcggcagcagaggctgcagcctaacgtgtggttttaatgaccagcacgcaaggcaaaagcattttgcacagtgtttgttttcctgtcttgcacttacaaataaggtctatgggagtagcatggaaaacgtttgctgnnnnnnnnnnnnnnnnnnaattgcttttgtttaaaatttgatcgccttaactactgtaaacatagcctatttttgtgcttaagatactgaatggaaaactccattgtgtgttgctggactgttttggaaatatttggttaaatgtgtgttaatttggctgtaatggcatttaaagcaaacaaacaaacaaaaaaagctgtgaaaatggccttggagcattatctttagttacttgaagagtttctagtttttttaaaatacagtttatgttaaaataatttttattaatttagagaagacaatcaatgtctgtgagaaaacggactttcttttggattttctttttgtggtcattgtgagtgattgctttttccttttcttagtttcacattcttcctttgttctaaaacttagactgacatctagctttgacaatcatagtatgttttattttcctgaaggggaataacttataatgctgtttagttttgtactattgggtgtgttgggtgaaattttaaactgtgtgctaactgcagaaattatatgaactga

SEQ ID NO: 184706 - DNA, 748 bp, Homo Sapiens
  misc_feature (234)..(251): n is a, c, g, or t
ttggtgaaaagattctatggactgaaaaagccccaggctgaaaggactggactgccttgattgacatggggaagggggttagtagactatgtggattgcggcagcagaggctgcagcctaacgtgtggttttaatgaccagcacgcaaggcaaaagcattttgcacagtgtttgttttcctgtcttgcacttacaaataaggtctatgggagtagcatggaaaacgtttgctgnnnnnnnnnnnnnnnnnnaattgcttttgtttaaaatttgatcgccttaactactgtaaacatagcctatttttgtgcttaagatactgaatggaaaactccattgtgtgttgctggactgttttggaaatatttggttaaatgtgtgttaatttggctgtaatggcatttaaagcaaacaaacaaacaaaaaaagctgtgaaaatggccttggagcattatctttagttacttgaagagtttctagtttttttaaaatacagtttatgttaaaataatttttattaatttagagaagacaatcaatgtctgtgagaaaacggactttcttttggattttctttttgtggtcattgtgagtgattgctttttccttttcttagtttcacattcttcctttgttctaaaacttagactgacatctaactttgacaatcataagtatgttttattttcctgatggggaataacttataatgctgtttacttttgtactattggggtgttggtgaatt

SEQ ID NO: 184707 - DNA, 1191 bp, Homo Sapiens
tctcctctctccttttctagcctgttctttacatggggctcccttcttgttgaacaatagggcagaatcaggagtcaccttagcaggaccacatctttggagcctcgggataaaatgacagtgaggttgaaaagtgaaaaccctagaacttgaataggtgcctgttcttgtagggagaaatgagaaatcgcatttggatccaggccccaggtgggcaccatcagcagtcttgcttccatgcacctcagtaagaagtggatctgcctttgggacctgctcagtgaggaaatctcttccaatttctgcttctgaatgattcaatgttgggagcaatagaaataacattccctttgccttctctgagtgtttagggaaatagcttctttaaaacctcaaaaccatgaccatcctgtcaaagacctaagtctgtaagctggtgccatgtccatacaccatgtcactttactcttcatttgtcaccatcttttcccatgcacgcatactctgaacatccttgtgtgggcccatcctctgcatccagagcatgctctgcagtgggcctgttttgtggaagaaaggaggctgtctctgccttctctgatgggactggagttgagggaaggagctgtattgtggcacttctgaattccccgttttgttccatattggtatagagagcagaagagtagctaggcagatgcagagatggagacatgagactcagtgcagtgggcagggaagacataacagatggaagcaaaggaatcctgcctgccttcagcagagaattcaccgaatcctagaactgtggctccctccaggcagagcctaagatgctggtgaagaatagctgtgtgattgaataggctcaaaggagagttcagaattcccatttacatattactagtttggtttgtaagttttagttccttgtattattgagattcagagcttcatattatgttggtcattaggtgaatattactcattttctctcaagagaagctcataagtgtgtgtgggtgtgagagcacgatggtgcctgtgttctgtgaatgtgtccatatgtgtctgtaagagagacagagaccaagaacttgcccaattttagaaatacactaatgtgcagttgttgccttttgtctgtattgaaggcccattgaatgactaatccaggctggaagcattccc

SEQ ID NO: 184708 - DNA, 4511 bp, Homo Sapiens
ttggcgcaaagtgactgaagagaacaaagagttggccaatgagctgaggcggcctcccctatgctatcacaacggagttcagtacagaaataacgaggaatggactgttgatagctgcactgagtgtcactgtcagaactcagttaccatctgcaaaaaggtgtcctgccccatcatgccctgctccaatgccacagttcctgatggagaatgctgtcctcgctgttggcccagcgactctgcggacgatggctggtctccatggtccgagtggacctcctgttctacgagctgtggcaatggaattcagcagcgcggccgctcctgcgatagcctcaacaaccgatgtgagggctcctcggtccagacacggacctgccacattcaggagtgtgacaagagatttaaacaggatggtggctggagccactggtccccatggtcatcttgttctgtgacatgtggtgatggtgtgatcacaaggatccggctctgcaactctcccagcccccagatgaacgggaaaccctgtgaaggcgaagcgcgggagaccaaagcctgcaagaaagacgcctgccccatcaatggaggctggggtccttggtcaccatgggacatctgttctgtcacctgtggaggaggggtacagaaacgtagtcgtctctgcaacaaccccacaccccagtttggaggcaaggactgcgttggtgatgtaacagaaaaccagatctgcaacaagcaggactgtccaattgatggatgcctgtccaatccctgctttgccggcgtgaagtgtactagctaccctgatggcagctggaaatgtggtgcttgtccccctggttacagtggaaatggtccagtgcacagatgttgatgagtgcaaagaagtgcctgatgcctgcttcaaccacaatggagagcaccggtgtgagaacacggaccccggctacaactgcctgccctgccccccacgcttcaccggctcacagcccttcggccagggtgtcgaacatgccacggccaacaaacaggtgtgcaagccccgtaacccctgcacggatgggacccacgactgcaacaagaacgccaagtgcaactacctgggccactatagcgaccccatgtaccgctgcgagtgcaagcctggctacgctggcaatggcatcatctgcggggaggacacagacctggatggctggcccaatgagaacctggtgtgcgtggccaatgcgacttaccactgcaaaaaggataattgccccaaccttcccaactcagggcaggaagactatgacaaggatggaattggtgatgcctgtgatgatgacgatgacaatgataaaattccagatgacagggacaactgtccattccattacaacccagctcagtatgactatgacagagatgatgtgggagaccgctgtgacaactgtccctacaaccacaacccagatcaggcagacacagacaacaatggggaaggagacgcctgtgctgcagacattgatggagacggtatcctcaatgaacgggacaactgccagtacgtctacaatgtggaccagagagacactgatatggatggggttggagatcagtgtgacaattgccccttggaacacaatccggatcagctggactctgactcagaccgcattggagatacctgtgacaacaatcaggatattgatgaagatggccaccagaacaatctggacaactgtccctatgtgcccaatgccaaccaggctgaccatgacaaagatggcaagggagatgcctgtgaccacgatgatgacaacgatggcattcctgatgacaaggacaactgcagactcgtgcccaatcccgaccagaaggactctgacggcgatggtcgaggtgatgcctgcaaagatgattttgaccatgacagtgtgccagacatcgatgacatctgtcctgagaatgttgacatcagtgagaccgatttccgccgattccagatgattcctctggaccccaaagggacatcccaaaatgaccctaactgggttgtacgccatcagggtaaagaactcgtccagactgtcaactgtgatcctggactcgctgtaggttatgatgagtttaatgctgtggacttcagtggcaccttcttcatcaacaccgaaagggacgatgactatgctggatttgtctttggctaccagtccagcagccgcttttatgttgtgatgtggaagcaagtcacccagtcctactgggacaccaaccccacgagggctcagggatactcgggcctttctgtgaaagttgtaaactccaccacagggcctggcgagcacctgcggaacgccctgtggcacacaggaaacacccctggccaggtgcgcaccctgtggcatgaccctcgtcacataggctggaaagatttcaccgcctacagatggcgtctcagccacaggccaaagacgggtttcattagagtggtgatgtatgaagggaagaaaatcatggctgactcaggacccatctatgataaaacctatgctggtggtagactagggttgtttgtcttctctcaagaaatggtgttcttctctgacctgaaatacgaatgtagagatccctaatcatcaaattgttgattgaaagactgatcataaaccaatgctggtattgcaccttctggaactatgggcttgagaaaatccccaggatcacttctccttggcttccttcttttctgtgcttgcatcagtgtggactcctagaacgtgcgacctgcctcaagaaaatgcagttttcaaaaacagactcagcattcagcctccaatgaataagacatcttccaagcatataaacaattgctttggtttccttttgaaaaagcatctacttgcttcagttgggaaggtgcccattccactctgcctttgtcacagagcagggtgctattgtgaggccatctctgagcagtggactcaaaagcattttcaggcatgtcagagaagggaggactcactagaattagcaaacaaaaccaccctgacatcctccttcaggaacacggggagcagaggccaaagcactaaggggagggcgcatacccgagacgattgtatgaagaaaatatggaggaactgttacatgttcggtactaagtcattttcaggggattgaaagactattgctggatttcatgatgctgactggcgttagctgattaacccatgtaaataggcacttaaatagaagcaggaaagggagacaaagactggcttctggacttcctccctgatccccacccttactcatcacctgcagtggccagaattagggaatcagaatcaaaccagtgtaaggcagtgctggctgccattgcctggtcacattgaaattggtggcttcattctagatgtagcttgtgcagatgtagcaggaaaataggaaaacctaccatctcagtgagcaccagctgcctcccaaaggaggggcagccgtgcttatatttttatggttacaatggcacaaaattattatcaacctaactaaaacattccttttctcttttttcctgaattatcatggagttttctaattctctcttttggaatgtagattttttttaaatgctttacgatgtaaaatatttattttttacttattctggaagatctggctgaaggattattcatggaacaggaagaagcgtaaagactatccatgtcatctttgttgagagtcttcgtgactgtaagattgtaaatacagattatttattaactctgttctgcctggaaatttaggcttcatacggaaagtgtttgagagcaagtagttgacatttatcagcaaatctcttgcaagaacagcacaaggaaaatcagtctaataagctgctctgccccttgtgctcagagtggatgttatgggattctttttttctctgttttatcttttcaagtggaattagttggttatccatttgcaaatgttttaaattgcaaagaaagccatgaggtcttcaatactgttttaccccatcccttgtgcatatttccagggagaaggaaagcatatacacttttttctttcatttttccaaaagagaaaaaaatgacaaaaggtgaaacttacatacaaatattacctcatttgttgtgtgactgagtaaagaatttttggatcaagcggaaagagtttaagtgtctaacaaacttaaagctactgtagtacctaaaaagtcagtgttgtacatagcataaaaactctgcagagaagtattcccaataaggaaatagcattgaaatgttaaatacaatttctgaaagttatgttttttttctatcatctggtataccattgctttatttttataaattattttctcattgccattggaatagatatctcagattgtgtagatatgctatttaaataatttatcaggaaatactgcctgtagagttagtatttctatttttatataatgtttgcacactgaattgaagaattgttgg

SEQ ID NO: 184709 - DNA, 2182 bp, Homo Sapiens
  misc_feature (327)..(432): n is a, c, g, or t
  misc_feature (1171)..(1249): n is a, c, g, or t
ttggagttgatattgagccacatggaaaagctgaaaacctgttccagagccaatgaacttgatccagacagtctgaggtggaccccaattttaatttctaatgctgcagtgtctgaagaagagcgagaagctgagaaagaggctgagcggctaatggaacaagctagctgctgggagaaggaggaacaagaaatcctgtcaactagagctaacagtaggcaatcacctgcaaaagtacaatcgaaaaataaatatttgcattccccggagagccggccagtcacaggggagcgagggcagctgctggagctgtctaaagagagcagnnnnnnnnnnnnnnnnnnnnnnnnnnnnnnnnnnnnnnnnnnnnnnnnnnnnnnnnnnnnnnnnnnnnnnnnnnnnnnnnnnnnnnnnnnnnnnnnnnnnnnnnnnaatattcaaagctctcccccaagattgacgaaaccacagtcagttgccataaagagaaagaggccttttgtactaaagaagaaaaggggtcgtaaacgcaggaggatcaacagcagtgtaacaacagagaccatttcagagacgacagaagtactgaatgagccctttgacaactcagatgaagagaggccaatgccacagctggagcctacctgtgagattgaagtggaggaagatggcaggaagccagtcctgagaaaagcattccagcatcagcctgggaagaaaagacaaacagaggaagaggaaggaaaagacaatcattgcttcaagaatgctgacccttgtagaaacaatatgaatgatgattcaagtaacttgaaagaaggcagtaaagacaatcccgaacctctaaagtgcaaacaagtgtggccaaaaggaacaaagcgcggtctatctaagtggaggcaaaacaaagagaggaagaccggatttaaactgaatttgtacaccccgccagaaacacccatggagcctgacgagcaggtaacagtggaagaacagaaggagacttcagaaggaaaaaccagccccagtcccatcaggattgaggaggaggtcaaggaaactggggaagccctgttgcctcaagaggaaaacagaagggaagaaacatgtgcccctgtaagtccaaacacatcaccaggtgaaaaaccagaagatgatctcatcaaacctnnnnnnnnnnnnnnnnnnnnnnnnnnnnnnnnnnnnnnnnnnnnnnnnnnnnnnnnnnnnnnnnnnnnnnnnnnnnnnnatgtagaaaaagatccagatgggctaaaagccaagaaaaagaggaaccagaaatctccacggaaaaagaagactctgcacgtttggatgatcacgaagaggaggaggaagaggatgaagagccatcccacaacgaggaccatgatgccgatgacgaggatgacagccacatggagtctgccgaagtggagaaggaagagctgcccagagaaagcttcaaagaagtactggaaaaccaggagacttttttagaccttaatgtgcagcctggtcactcgaacccagaggtcttaatggactgtggcgtcgacctgacagcttcttgtaacagtgagcccaagggagcttgctggggaccctgaagctgtacccgaatctgacgaggagccacccccaggagaacaggcacagaagcaggaccaaaagaacagcaaggaagtcgatacagagttcaaagagggaaacccagcaaccatggaaatcgactctgagactgtccaggccgttcagtctttgacccaggagagcagcgaacaggacgacacctttcaggattgtgccgagactcaagaggcctgtagaagcctacagaactacacccgtgcagaccaaagtccacagattgccaccacgctcgacgattgccaacagtcggaccacagtagcccagtttcatccgtccactcccatcctggccagtccgtacgttctgtcaacagcccaagtgtctctgctctggaaaacagctacgcccaaatcagcccagatcaaagtgccatctcagtgccatctctgcagaacatggaaaccagtcccatgatggatgtcccatcagtttcagatcattcacagcaagtcgtagacagtggatttagtgacctgggcagtatcgagagcacaactgagaactacgaaaacccaggcagctacgatt

SEQ ID NO: 184710 - DNA, 2047 bp, Homo Sapiens
tgtacaaaaaagttggctgctgcatcccgggtgtctggaggctgtggccgttttgttttcttggctaaaatcgggggagtgaggcgggccggcgcggcgcgacaccgggctccggaaccactgcacgacggggctggactgacctgaaaaaaatgtctggatttctagagggcttgagatgctcagaatgcattgactggggggaaaagcgcaatactattgcttccattgctgctggtgtactattttttacaggctggtggattatcatagatgcagctgttatttatcccaccatgaaagatttcaaccactcataccatgcctgtggtgttatagcaaccatagccttcctaatgattaatgcagtatcgaatggacaagtccgaggtgatagttacagtgaaggttgtctgggtcaaacaggtgctcgcatttggcttttcgttggtttcatgttggcctttggatctctgattgcatctatgtggattctttttggaggttatgttgctaaagaaaaagacatagtataccctggaattgctgtatttttccagaatgccttcatcttttttggagggctggtttttaagtttggccgcactgaagacttatggcagtgaacacatctgatttcccacagcacaacagccctgcatgggtttgtttgtttttttactgctcactcccaaccttttgtaatgccattttctaaacttatttctgagtgtagtctcagcttaaagttgtgtaatactaaaatcacgagaacacctaaacaacaaccaaaaatctattgtggtatgcacttgattaacttataaaatgttagaggaaactttcacatgaataatttttgtcaaattttatcatggtataatttgtaaaaataaaaagaaattacaaaagaaattatggatttgtcaatgtaagtatttgtcatatctgaggtccaaaaccacaatgaaagtgctctgaagatttaatgtgtttattcaaatgtggtctcttctgtgtcaaatgttaaatgaaatataaacattttttagtttttaaaatattccgtggtcaaaattcttcctcactataattggtatttacttttaccaaaaattctgtgaacatgtaatgtaactggcttttgagggtctcccaaggggtgagtggacgtgttggaagagagaagcaccatggtccagccaccaggctccctgtgtcccttccatgggaaggtcttccgctgtgcctctcattccaagggcaggaagatgtgactcagccatgacacgtggttctggtgggatgcacagtcactccacatccaccattgaaggaaaggaaaaaagggcagagacttgacactccagtcttagacaggggacaatttctttgtagttgttctgataataaactgggttccatgttgcatttcatctgtgtactgaaccactagcctaatagaccagcacggtcaactagaatgacaaacattagctactgggaactcttgttgtctcttcctcttcagaactcttgtccccccaggctccccacctctgcaagatgggatacactcttcaggaccacagtttgaaatgtctttcataaaatgtgctacaattagccttcggaatatttgctgggtgatttaaatgtgtgggtctcatttccatgctagccatggtcatctgacagtctctacactgtgaatattgcctggtgatcaagactctcctcaaagaaatgacttgctgtcatcccacatgaactcctgatgttttttctacaaaagtccataaaatgtgaaaactggagaagatcttagaggttgaagcccaccttctcttttcacataggagggaacagaccatggaaatttaaacgacttcctcacggtcacagaactagttttttaatcctcaggcagtgcatccccccaccctacaactgagcacaccctctttccccacagtgcaattcagaatatgctcaggaatgccacccaccttgtaaaactgctgggagaaaagcatgattcccacaa

SEQ ID NO: 184711 - DNA, 2456 bp, Homo Sapiens
ttggagagtggtaactttacagggacaaatcatagaacagtcaggtacaatgactggtggtggaagcaaagtaatgaaaggaagaatgggttcctcacttgttattgaaatctctgaagaagaggtaaacaaaatggaatcacagttgcaaaacgactctaaaaaagcaatgcaaatccaagaacagaaagtacaacttgaagaaagagtagttaagttacggcatagtgaacgagaaatgaggaacacactagaaaaatttactgcaagcatccagcgtttaatagagcaagaagaatatttgaatgtccaagttaaggaacttgaagctaatgtacttgctacagcccctgacaaaaaaaagcagaaattgctagaagaaaacgttagtgctttcaaaacagaatatgatgctgtggctgagaaagctggtaaagtagaagctgaggttaaacgcttacacaataccatcgtagaaatcaataatcataaactcaaggcccaacaagacaaacttgataaaataaataagcaattagatgaatgtgcttctgctattactaaagcccaagtagcaatcaagactgctgacagaaaccttcaaaaggcacaagactctgtcttgcgtacagagaaagaaataaaagatactgagaaagaggtggatgacctaacagcagagctgaaaagtcttgaggacaaagcagcagaggtcgtaaagaatacaaatgctgcagaggaatccttaccagagatccagaaagaacatcgcaatctgcttcaagaattaaaagttattcaagaaaatgaacatgctcttcaaaaagatgcacttagtattaagttgaaacttgaacaaatagatggtcacattgctgaacataattctaaaataaaatattggcacaaagagatttcaaaaatatcactgcatcctatagaagataatcctattgaagagatttcggttctaagcccagaggatcttgaagcgatcaagaatccagattctataacaaatcaaattgcacttttggaagcccggtgtcatgaaatgaaaccaaacctcggtgccatcgcagagtataaaaagaaggaagaattgtatttgcaacgggtagcagaattggacaaaattacttatgaaagagacagttttagacaggcatatgaagatcttcggaaacaaaggcttaatgaatttatggcaggtttttatataataacaaataaattaaaggaaaattaccaaatgcttactttgggaggggacgccgaactcgagcttgtagacagcttggatcctttctctgaaggaatcatgttcagtgttcgaccacctaagaaaagttggaaaaagatcttcaacctttcgggaggagagaaaacacttagttcattggctttagtatttgctcttcaccactacaagcccactcccctttacttcatggatgagattgatgcagcccttgattttaaaaatgtgtccattgttgcattttatatatatgaacaaacaaaaaatgcacagttcataataatttctcttcgaaataatatgtttgagatttcggatagacttattggaatttacaagacatacaacataacaaaaagtgttgctgtaaatccaaaagaaattgcatctaagggactttgttgaactttatgctgaagattcttcaagttgattcagtgtattactgatttttttctatttgtaaaggattatgagttgtataaaatacatactccctaaactagatcatgaaactggtttctgttttatgcagttgtcatttgtaaagtctaataaaatattctctataattgcttctagattacaaaaatatgacaatcttgtaagtagcagactatggagaaaaatgagttacctggagggtcaggtaacttgccaaactaaaaagtatgttagttgaggcaaagtcctaagcaaggttgtgctatcaaggctcagcataccttcgtgggcctttgatttaccaacactggaaatgcctgccaactaatcttggatagattctttaaggcattccacttagcttgccagttgagacaatcaccacagttattacccaaatactatgaacatatttttgtaaaccagtcattctgaattatagtgatgagaatttaaatatatgcttttctagaatttgatgtttgaccatttatgacttaattaccagagagccagtaaattaggacagtgtttcaacaagcctagctatctcgtaagttgaaaaatatcccactatagttgcttcatgagtatgaagtaagatggcctctgatttacactggttcaatttacaaattttcaactttatgataggtttatcccgggtactaaatgcatttcaacttgatagtttcaacttatgataggtttaccagatgtagtcccactgttgagagcatctatttagggg

SEQ ID NO: 184712 - DNA, 2026 bp, Homo Sapiens
  misc_feature (540)..(563): n is a, c, g, or t
  misc_feature (1743)..(1743): n is a, c, g, or t
ttggagttgaaatattaaatgaacacagaggagagaagttaaacagggtaaagatggtggaaaaggaaaaggatgccttagaaggagagaaaaacatagctatcgaatttcttaccttggaaaatgaaatatttagaaaaaagaatcatgtttgtcaatattatatttatgagttgcagaaacgaattgctgaaatggaaactcaaaaggaaaaaattcatgaagataccaaagaaattaatgagaagagcaatatactatcaaatgaaatgaaagctaagaataaagatgtaaaagatacagaaaagaaactgaataaaattacaaaatttattgaggagaataaagaaaaatttacacagctagatttggaagatgttcaagttagagaaaagttaaaacatgccacgagtaaagccaaaaaactggagaaacaacttcaaaaagataaagaaaaggttgaagaatttaaaagtatacctgccaagagtaacaatatcattaatgaaacaacaaccagaaacaatgccctcgagaagnnnnnnnnnnnnnnnnnnnnnnnnttaaaggaagttatggatagccttaaacaggaaacacaagggcttcagaaagaaaaagaaagtcgagagaaagaacttatgggtttcagcaaatcggtaaatgaagcacgttcaaagatggatgtagcccagtcagaacttgatatctatctcagtcgtcataatactgcagtgtctcaattaactaaggctaaggaagctctaattgcagcttctgagactctcaaagaaaggaaagctgcaatcagagatatagaaggaaaactccctcaaactgaacaagaattaaaggagaaagaaaaagaacttcaaaaacttacacaagaagaaacaaactttaaaagtttggttcatgatctctttcaaaaagttgaagaagcaaagagctcattagcaatgaatcgaagtagggggaaagtccttgatgcaataattcaagaaaaaaaatctggcaggattccaggaatatatggaagattgggggacttaggagccattgatgaaaaatacgacgtggctatatcatcctgttgtcatgcactggactacattgttgttgattctattgatatagcccaagaatgtgtaaacttccttaaaagacaaaatattggagttgcaacctttataggtttagataagatggctgtatgggcgaaaaagatgaccgaaattcaaactcctgaaaatactcctcgtttatttgatttagtaaaagtaaaagatgagaaaattcgccaagctttttattttgctttacgagataccttagtagctgacaacttggatcaagccacaagagtagcatatcaaaaagatagaagatggagagtggtaactttacagggacaaatcatagaacagtcaggtacaatgactggtggtggaagcaaagtaatgaaaggaagaatgggttcctcacttgttattgaaatctctgaagaagaggtaaacaaaatggaatcacagttgcaaaacgactctaaaaaagcaatgcaaatccaagaacagaaagtacaacttgaagaaagagtagttaagttacggcatagtgaacgagaaatgaggaacacactagaaaaatttactgcaagcatccagcgtttaatagagcaagaagaatatttgaatgtccaagttaaggaacttgaagctaatgtacttgctacagcccctgacnagagcagagcagaaattgctagaagaaaacgttagtgctttcaaaacagaatatgatgctgtggctgaaaaagctggtaaagtagaagctgaggttaaacgcttacacaataccatcgtagaaatcaataatcataaactcaggcccaacaagacaaacttgataaaataaataagcaattagatgaatgtgcttctgctattactaaagcccaagtagcaatcaagactgctgacagaaaccttcaagggcacaagactctgtcttgcgtacagagaaagaa

SEQ ID NO: 184713 - DNA, 2829 bp, Homo Sapiens
ttggcacttgtgtaaaactgtccctgcagattgagcaggaagtaaaaacaaatggaaatgcttcggatagtggcaggggtgggggttgctaaggaaagggtgggatgggagtgggtaaagagtttgggaaggttatctaactgaatcactactgagttgaatcatggctatcattagccacaggtactgctgattataaggccagtaaaattttagtacctggaggtttgactctaatttttgcactgatggtgccaaagggccctgagtcaaaaggatagccaagggtggagtggaaaaagatatggtgaaggcagaactgctcacaccagctccagaagcacgtcctctgacttcactgccgcagctctttccacacggggccgtgattgaccctaaaaattgcagaccagcacatacactggacactgcaggcaaggtgttggtaactgcctgctctaggatgaatagtagcgttagcagcaccctacagagggtaagtttcagaattgtaatttgagaactccttcaattatattgactttctttggttttccttgtgcattaggtatatattttttgaagtatttttgccaactaaaatgaagtctgtaaattctgttaataaacaaggagttcatccgttgctcacatctttcattggtgccctctgaactctgtgggttgctaggatgtaattttaatgcttccctgcagtccaaagatgattttttcaccacaaatggtaagggatgcccacctacttttataaacaccactgcaacttaacaagtttatttatctatgtccagatttctgtttctgtcctaaattgatctgtgtttttaggtggatcaacttggatctttagacctcatctataaattgaaattatatttttagtcataagccaagtacaatctaactcagaatgggattaaaaattttagaagcagaagctaatatataaatgaagtttgggatttggaactttctgtatctcttaggaggaacaagtaaaaaccaaatggttacattgtgctgctagaaataatgtcattctcaattaaaagggttacacctgtagccacttgacactaacaccatcgagggcaattaatcaggagaaaagtaaatataaaaactttgctcttaacgtcacacactacagggtaattatgtaattctctagcactcaattaagaagcttgtaggttagcaaaatttcagtttctctagttcagccagtgtcttgtccttagtaattatttgctttccctgcagttcaatttctccttggaactctaacaggactaactggaaaaatactttgaccatagctctagtacttccaaataaattcatatctagattttcaaacaaagccccaagatgaagtctaattctgaaaatatctcacaatttttgaatgttctttttatcttaccgacctaacttctcttttccctcccaacttggcctcccacacgttccatttcattttggccattatagtcacatccgtttgactttggttgtgacatcttcctttcaggatgatggaattagatgcagtctgtctttgagtgagactggtcaccatcagaggagttttttctaagtgacgtgactagaagttgaaatctacttccctgctaaagggcacaggggtggtgtacaaagaaagctaccttcccagagcaagcaggctgcattttagctatggaagtgacctgctgtgacactgtgctctcttctgtgggcttaatggttcctttgctatgaagtggcaaattacatgtagagtgtctccttccttttcagagaacagttaatcaaggcaaatcagcaagcccccaaagtgctgtaatttaacatcatgattaccaccttcgaagctatatattttgcatactttaaaatcacctaacttggactgcttgaattacattggcttttagaaccgaaattgtaactatgtattgtatttcatgggaggtatattttatgagctttttggctttcttttttcccacagcaactgccaatgaaggatgaatcccctttttaaaaagttgttgttgttgttgtttatttgattttgagttaggagggataatagagaagtccatttaaaaattatttttagaagctaaagaaagtaattatgcttcctgtgaattgtcttttactggcatctttgttttcctctttgatgttagtaaatttggtgtaatacgtggggcttccatatttcaaagtggaagctttcttctctgaagtcgatatatggttttgaattactagagctttggtcagtatttccttccctatatgtcacagagggcaccactgagaactgcgtgcataggacctcaaaatacaaaattagcagggcctcacagtcagcttcctcatggctagtttttcccccttatattacaatttttgttttataagtcatttttttcctgatatttccaccacttttcagagtcatctacaaaatttttctttcctcaagaaaagagttccttttgccttattccttatgccttccccactggtattgagggttttgataataaattggtaggaaaaaaaagtacctccctagaaggaagccttctcaccatttccaggtgccaactgctaagcagatatattccaaaaatggtaactgtcatgtgcacactgttggttatttttaataagcctcttcctactagaacattttattttccgtgttcaccatacaatcatgtactctttaacagaaattgcttttaaaaaatatctggaactatctttaaaaaaacttattaataa

SEQ ID NO: 184714 - DNA, 887 bp, Homo Sapiens
ccaactttgtacaaaaaagttggcactgacgagttctaccccaacttcgcagagggcatcgctctttcagacccggttgcaaaggagagctgcatgctcaacctgctgctgtccctgccggaggccaacctgctcaccttccttttccttctggaccacctgaaaagggtggcagagaaggaggcagtcaataagatgtccctgcacaacctcgccacggtctttggccccacgctgctccggccctccgagaaggagagcaagctccctgccaaccccagccagcctatcaccatgactgacagctggtccttggaggtcatgtcccaggtccaggtgctgctgtacttcctgcagctggaggccatccctgccccggacagcaagagacagagcatcctgttctccaccgaagtctaaaggtcccagtccatctcctggaggcggacagatggcctggaaacctctggctaatcgggccatccgtagagcgggaaccttcctgaggtgtccttgggccacccccaagtgttgggccatctgccaagagacagcgacccaaagccgaaggacaggtggcctggaaagatcccgcccaggtctgggagccccaggctggcctcagactgtggttttttatgtggccacctgagggcgccccaagccagttcatctcagaggccaggcctgaccctgggagacagggtgaagggagtggtttttatgaacttaacttagagtctaaaagatttctactggatcacttgtcaagatgcgccctctctggggagaaggaacgtgactggattccctcactgttgtatcttgaataaacgctgctgcttcatcctgtgggggccgtggccctgtccctgtgtgggtggggc

SEQ ID NO: 184715 - DNA, 2093 bp, Homo Sapiens
  misc_feature (367)..(439): n is a, c, g, or t
  misc_feature (1699)..(1709): n is a, c, g, or t
ctttgtacaaaaaagttggggcaaaaatggcataataatagatgctgttctgaagagactggagcagaagggtgcagaggcagatcaaatcattgaatatcttaagcagcaagtttctctacttaaggagaaagcaattttgcaggcaactttgagggaagagaagaaacttcgagttgaaaatgctaaactgaagaaagaaattgaagaactgaaacaagagctaattcaggcagaaattcaaaatggagtgaagcaaataccatttccatctggtactccactgcacgctaattctatggtttctgaaaatgtgatacagtctacagcagttactaccgtatcttctggtaccaaagaacagatnnnnnnnnnnnnnnnnnnnnnnnnnnnnnnnnnnnnnnnnnnnnnnnnnnnnnnnnnnnnnnnnnnnnnnnnncagcaatcaatagctggaagtgccgactctaagccaatagatgtttcccgtctggatcttcgaattggttgcatcataactgctagaaaacaccctgatgcagattctttgtatgtggaagaagtagatgtcggagaaatagccccaaggacagttgtcagtggcctggtgaatcatgttcctcttgaacagatgcaaaatcggatggtgattttactttgtaacctgaaacctgcaaagatgaggggagtattatctcaagcaatggtcatgtgtgctagttcaccagagaaaattgaaatcttggctcctccaaatgggtctgttcctggagacagaattacttttgatgctttcccaggagagcctgacaaggagctgaatcctaagaagaagatttgggagcagatccagcctgatcttcacactaatgatgagtgtgtggctacatacaaaggagttccctttgaggtgaaagggaagggagtatgtagggctcaaaccatgagcaacagtggaatcaaataaaatgcttccactaccaaaagacattagagaaaaccttaaaagtaataaagagaaatatatttgtcacttatacctaaaatatgagtggctcatttttgcattactctcttctagacttgactagtcatttacttggtatatattgttttcattgattggggaaacactagatttttacctcggtttttgatcatttataatggagagaggaagttgcctatgttttgtaataatttattttttagcaggaatattgattagcagcttttttttctttatacacatagataactaactagattaatgtttagtttcttatttgtaggcacaggatgcatgaaatttcaagctctgggattttttgtatattgtgtatctgtatcaaaaatatcctctccttttcaaaaatgacaggttggaaaatgtttgtcagacttattaactggtcatattataataatactgataatgaccaactgctcattctgaaagccaaacataaaagctaggagaagtggcatctgaacatttttgctttgctgccagagtaaccctgactaataatacaataacagcaattttttttaaaaaactgagatttcctactggcttgaagtttttctatttagcaaaataattagtaataagttttgactaggtctaaagaatgaacacattgtaaacagttgccacagtagtttctaataaattgatcataaaagcagctatccnnnnnnnnnnnaattctagcttctttttaaagattatttgggtacctaataaaggataatttatatcttattacagactgatattttgctttttcatgtgtcatcatactgtcagtatattaaaagaaattacagcctaaaacttaacatataccatacatatatattaaggtgtcaaatagctattctcactcatcttacaaatattgtaagagcaataaaaattaattgaggaattataagcctacaggtcatcagccttgaggtgattactgatgatttgggcttacacacatgtcagcaagatagggagtgtggcataggggaagggctggtagctaacaaggggcctcacagagaaatattagtgactttaaccaggtttagaatctggg

SEQ ID NO: 184716 - DNA, 947 bp, Homo Sapiens
  misc_feature (416)..(469): n is a, c, g, or t
ttgggtctcggaacccgtggtcctccgcttcatgattttctgccgtctcttggcaaaaatggcaaataatgatgctgttctgaagagactggagcagaagggtgcagaggcagatcaaatcattgaatatcttaagcagcaagtttctctacttaaggagaaagcaattttgcaggcaactttgagggaagagaagaaacttcgagttgaaaatgctaaactgaagaaagaaattgaagaactgaaacaagagctaattcaggcagaaattcaaaatggagtgaagcaaataccatttccatctggtactccactgcacgctaattctatggtttctgaaaatgtgatacagtctacagcagtaacaaccgtatcttctggtaccaaagaacagataaaaggaggaacaggagacnnnnnnnnnnnnnnnnnnnnnnnnnnnnnnnnnnnnnnnnnnnnnnnnnnnnnncagcaatcaatagctggaagtgccgactctaagccaatagatgtttcccgtctggatcttcgaattggttgcatcataactgctagaaaacaccctgatgcagattctttgtatgtggaagaagtagatgtcggagaaatagccccaaggacagttgtcagtggcctggtgaatcatgttcctcttgaacagatgcaaaatcggatggtgattttactttgtaacctgaaacctgcaaagatgaggggagtattatctcaagcaatggtcatgtgtgctagttcaccagagaaaattgaaatcttggctcctccaaaatgggtctgttcctggagacagaattacttttgatgctttctcaggagagcctgacaaggagctgaatcctaagaagaagatttgggagcagatccagcctgatcttcacactaatgatgagtgtgtggctacatacaaaggagttccctttgaggtgaaa

SEQ ID NO: 184717 - DNA, 2026 bp, Homo Sapiens
  misc_feature (177)..(187): n is a, c, g, or t
  misc_feature (340)..(356): n is a, c, g, or t
  misc_feature (362)..(370): n is a, c, g, or t
  misc_feature (657)..(749): n is a, c, g, or t
  misc_feature (1452)..(1478): n is a, c, g, or t
  misc_feature (1760)..(1768): n is a, c, g, or t
tgtacaaaaaagttgggtttctgagtgcatgaagttgtgaaggtcctacatgtaatgcatatgtgatgcatcatcttatcatatattccttcctatacattgtttacacttcaactacggggatgttccacacaaacttaaattactgttggcaaaacaatagggggagattagacnnnnnnnnnnntccacaatattccaagtacaactcttcatcaagtttctctgttaatgccaagatttaacagacttaagaactattgttctctgaatgacagttgtaagagaaatgtaaattttttagaactctttgctgttaatctgttttggtttgtttggnnnnnnnnnnnnnnnnnaaggtnnnnnnnnntacaccttcagtttcctggtgtgatcctggttaaaatggatgatttttcattgaaagttttgctgattaacaattaaagtgggatgatatgtgggcaaaatcacttatgaaagtagaagcaagaatcagttggtttgctaccacataaagccatgctgtttttggtcaaactgtgtaaactggaaaaattcacatcatttctgagtttaatcactttaggatatattcacattgttttggtgaatttgctgaattgaattgtttttctttctcaaatctgtgatctnnnnnnnnnnnnnnnnnnnnnnnnnnnnnnnnnnnnnnnnnnnnnnnnnnnnnnnnnnnnnnnnnnnnnnnnnnnnnnnnnnnnnnnnnnnnnggggaggctggctagtagtgtgtgagaaaagaatagaagtgaaatttgcataatgaatgtaaaagggaaataaaagtcttttgaaggtagctatactagcacttttgatcatcttcagggcccacaaaaatgttgtcaagattttaaaggtttataattctgcttaagctctagtttggacttaggtatcctaactatgttggaggtatttgcattgtttaaagttaggataaaagcaagttcctcctgtgactgcaacgtcttactgattgggacagttgccaggaggataccaacttgatagcagagggggttttatgcaaacgcactcacctccgccttggggaatgaaagggtcacttctgcatcatcactagctagttttctagtgttagagaggcttacaaatgtttgccattctcataagtgttttgaacttgatctttgtgacttgtgcttttttagcttctctcttgaatcagagtatcattgtcttcctccaaggagttagaatttcccagtttaaaacaaaaagggaaatgtcctaggttttctttgtgcttctcatttttcctttgttgattcaattcctgtgatttttgttctcttccctgaagtgctttacagtgcatggaatctccatcattgttattttaacgatagtaattcacagtcctcagaagcctatttttaaagcagaagnnnnnnnnnnnnnnnnnnnnnnnnnnncaacccttcctcttttctctcatctcacctctctgtgttgattactaatcatcttagatattattgctagtggatgtatggtagatgggttgaagcttttctgataattattacacaatttaaaacaacatatatatttaaaataaatatatacagtaaatatattgagccatgttaacctgccaatgagatctgtgaaaaaataatggcctcatttttctctttttaatttcttttacccttttgtgaagcagctatacgtggcatacatgtatttaaagnnnnnnnnntagatgtagagtgttttttttacacttttaacttagcatgtggtgttgaagtattactgtagatcaagtttgtcttccgcactaagatgtgaggaaattgtgatttgttctctccaccacaaatgaattacacatttattatcttctatcattttgaaacactgcagtttaccatgggacactgtatatatttcttgccataatggtaaaggactgattgatatatttaagagttaataaatttgtgatttctgctga

SEQ ID NO: 184718 - DNA, 1327 bp, Homo Sapiens
  misc_feature (850)..(861): n is a, c, g, or t
  misc_feature (1014)..(1030): n is a, c, g, or t
  misc_feature (1037)..(1045): n is a, c, g, or t
ttggcttaatgtgtttgtccatttgcatgtcagcatatgcacatagcctgctgaagaattttgcatgatatgtatgtcactagccaatttttaaggaggaaatcaagctattcattgcgtgcaacctaaaaatgtgttttcttctcatcaggagtcaactgagagttcaaatacaacaattgaggatgaagatgtgaaagcacgaaagcaagagattatcaaagtcactgaacaactgatcgaagctatcaacaatggggactttgaagcctacacaaaaatctgtgacccaggccttactgcttttgaacctgaagctttgggtaatttagtggaagggatggattttcaccgattctactttgaaaatgctttgtccaaaagcaataaaccaatccacactattattctaaaccctcatgtacatctggtaggggatgatgccgcctgcatagcatatattaggctcacacagtacatggatggcagtggaatgccaaagacaatgcagtcagaagagactcgtgtgtggcaccgccgggatggaaagtggcagaatgttcattttcatcgctcggggtcaccaacagtacccatcaactaaatttcaacagtgccacttctgcattctctgttctcaaggcacctggatggtgaccctgggccgtcctctcctcctcttcatgcatgtttctgagtgcatgaagttgtgaaggtcctacatgtaatgcatatgtgatgcatcatcttatcatatattccttcctatacattgtttacacttcaactacggggatgttccacacaaacttaaattactgttggcaaaacaatagggggagattagacnnnnnnnnnnnntccacaatattccaagtacaactcttcatcaagtttctctgttaatgccaagatttaacagacttaagaactattgttctctgaatgacagttgtaagagaaatgtaaattttttagaactctttgctgttaatctgttttggtttgtttggnnnnnnnnnnnnnnnnnaaggtannnnnnnnntacaccttcagtttcctggtgtgatcctggttaaaatggatgatttttcattgaaagttttgctgattaacaattaaagtgggatgatatgtgggcaaaatcacttatgaaagtaaaagcaagaatcagttggtttgctaccacataaagccatgctgtttttggtcaaactgtgtaaactggaaaaattcacatcatttctgagtttaatcactttaggatatattcacattgttttggtgaatttgctgaattgaattgtttttctttctcaaatctgtg

SEQ ID NO: 184719 - DNA, 2964 bp, Homo Sapiens
  misc_feature (180)..(218): n is a, c, g, or t
  misc_feature (1255)..(1293): n is a, c, g, or t
  misc_feature (1899)..(1924): n is a, c, g, or t
  misc_feature (2260)..(2279): n is a, c, g, or t
tagtatttgcataaccctgagcggtgggggaggagggttgtgctacagatgatagaggattttataccccaataatcaactcgtttttatattaatgtacttgtttctctgttgtaagaataggcattaacacaaaggaggcgtctcgggagaggattaggttccatcctttacgtgttnnnnnnnnnnnnnnnnnnnnnnnnnnnnnnnnnnnnnnnttcagcaaaccatttttaaagtagaagagggttttaggtagaaaaacatattcttgtgcttttcctgataaagcacagctgtagtggggttctaggcatctctgtactttgcttgctcatatgcatgtagtcactttataagtcattgtatgttattatattccgtaggtagatgtgtaacctcttcaccttattcatggctgaagtcacctcttggttacagtagcgtagcgtggccgtgtgcatgtcctttgcgcctgtgaccaccaccccaacaaaccatccagtgacaaaccatccagtggaggtttgtcgggcaccagccagcgtagcagggtcgggaaaggccacctgtcccactcctacgatacgctactataaagagaagacgaaatagtgacataatatattctattattatactcttcctatttttgtagtgacctgtttatgagatgctggttttctacccaacggccctgcagccagctcacgtccaggttcaacccacagctacttggtttgtgttcttcttcatattctaaaaccattccatttccaagcactttcagtccaataggtgtaggaaatagcgctgtttttgttgtgtgtgcagggagggcagttttctaatggaatggtttgggaatatccatgtacttgtttgcaagcaggactttgaggcaagtgtgggccactgtggtggcagtggaggtggggtgtttgggaggctgcgtgccagtcaagaagaaaaaggtttgcattctcacattgccaggatgataagttcctttccttttctttaaagaagttgaagtttaggaatcctttggtgccaactggtgtttgaaagtagggacctcagaggtttacctagagaacaggtggtttttaagggttatcttagatgtttcacaccggaaggtttttaaacactaaaatatataatttatagttaaggctaaaaagtatatttattgcagaggatgttcataaggccagtatgatttataaatgcaatctccccttgatttaannnnnnnnnnnnnnnnnnnnnnnnnnnnnnnnnnnnnnnaaccttctgcctttgatgttacagatttaatacagtttatttttaaagatagatccttttataggtgagaaaaaaacaatctggaagaaaaaaaccacacaaagacattgattcagcctgtttggcgtttcccagagtcatctgattggacaggcatgggtgcaaggaaaattagggtactcaacctaagttcggttccgatgaattcttatcccctgccccttcctttaaaaaacttagtgacaaaatagacaatttgcacatcttggctatgtaattcttgtaatttttatttaggaagtgttgaagggaggtggcaagagtgtggaggctgacgtgtgagggaggacaggcgggaggaggtgtgaggaggaggctcccgaggggaaggggcggtgcccacaccggggacaggccgcagctccattttcttattgcgctgctaccgttgacttccaggcacggtttggaaatattcacatcgcttctgtgtatctctttcacattgtttgctgctattggaggatcagttttttgttttacaatgtcatatactgccatgtactagttttagttttctcttagaacattgtattacagatgccnnnnnnnnnnnnnnnnnnnnnnnnnnatgtgatcaattttgacttaatgtgattactgctctattccaaaaaggttgctgtttcacaatacctcatgcttcacttagccatggtggacccagcgggcaggttctgcctgctttggcgggcagacacgcgggcgcgatcccacacaggctggcgggggccggccccgaggccgcgtgcgtgagaaccgcgccggtgtccccagagaccaggctgtgtccctcttctcttccctgcgcctgtgatgctgggcacttcatctgatcgggggcgtagcatcatagtagtttttacagctgtgttattctttgcgtgtagctatggaagttgcatannnnnnnnnnnnnnnnnnnnaacaagtgtgtcttacgtgccaccacggcgttgtacctgtaggactctcattcgggatgattggaatagcttctggaatttgttcaagttttgggtatgtttaatctgttatgtactagtgttctgtttgttattgttttgttaattacaccataatgctaatttaaagagactccaaatctcaatgaagccagctcacagtgctgtgtgccccggtcacctagcaagctgccgaaccaaaagaatttgcaccccgctgcgggcccacgtggttggggccctgccctggcagggtcatcctgtgctcggaggccatctcgggcacaggcccaccccgccccacccctccagaacacggctcacgcttacctcaaccatcctggctgcggcgtctgtctgaaccacgcgggggccttgagggacgctttgtctgtcgtgatggggcaagggcacaagtcctggatgttgtgtgtatcgagaggccaaaggctggtggcaagtgcacggggcacagcggagtctgtcctgtgacgcgcaagtctgagggtctgggcggcgggcggctgggtctgtgcatttctggttgcaccgcggcgcttcccagcaccaacatgtaaccggcatgtttccagcagaagacaaaaagacaaacatgaaagtctagaaataaaactggtaaaacccc

SEQ ID NO: 184720 - DNA, 1342 bp, Homo Sapiens
  misc_feature (117)..(145): n is a, c, g, or t
  misc_feature (1192)..(1228): n is a, c, g, or t
ttggcccaataatcaactcgtttttatattaatgtacttgtttctctgttgtaagaataggcattaacacaaaggaggcgtctcgggagaggattaggttccatcctttacgtgttnnnnnnnnnnnnnnnnnnnnnnnnnnnnncatagaaaaattcagcaaaccatttttaaagtagaagagggttttaggtagaaaaacatattcttgtgcttttcctgataaagcacagctgtagtggggttctaggcatctctgtactttgcttgctcatatgcatgtagtcactttataagtcattgtatgttattatattccgtaggtagatgtgtaacctcttcaccttattcatggctgaagtcacctcttggttacagtagcgtagcgtggccgtgtgcatgtcctttgcgcctgtgaccaccaccccaacaaaccatccagtgacaaaccatccagtggaggtttgtcgggcaccagccagcgtagcagggtcgggaaaggccacctgtcccactcctacgatacgctactataaagagaagacgaaatagtgacataatatattctatttttatactcttcctatttttgtagtgacctgtttatgagatgctggttttctacccaacggccctgcagccagctcacgtccaggttcaacccacagctacttggtttgtgttcttcttcatattctaaaaccattccatttccaagcactttcagtccaataggtgtaggaaatagcgctgtttttgttgtgtgtgcagggagggcagttttctaatggaatggtttgggaatatccatgtacttgtttgcaagcaggactttgaggcaagtgtgggccactgtggtggcagtggaggtggggtgtttgggaggctgcgtgccagtcaagaagaaaaaggtttgcattctcacattgccaggatgataagttcctttccttttctttaaagaagttgaagtttaggaatcctttggtgccaactggtgtttgaaagtagggacctcagaggtttacctagagaacaggtggtttttaagggttatcttagatgtttcacaccggaaggtttttaaacactaaaatatataatttatagttaaggctaaaaagtatatttattgcagaggatgttcataaggccagtatgatttataaatgcaatctccccttgatttaannnnnnnnnnnnnnnnnnnnnnnnnnnnnnnnnnnnnaaccttctgcctttgatgttacagatttaatacagtttatttttaaagatagatcctttttataggtgagaaaaaaacaatctggaagaaaaaaccacacaaagacattgattc

SEQ ID NO: 184721 - DNA, 1240 bp, Homo Sapiens
  misc_feature (62)..(100): n is a, c, g, or t
  misc_feature (1139)..(1177): n is a, c, g, or t
ttggggcattaacacaaaggaggcgtctcgggagaggattaggttccatcctttacgtgttnnnnnnnnnnnnnnnnnnnnnnnnnnnnnnnnnnnnnnnttcagcaaaccatttttaaagtagaagagggttttaggtagaaaaacatattcttgtgcttttcctgataaagcacagctgtagtggggttctaggcatctctgtactttgcttgctcatatgcatgtagtcactttataagtcattgtatgttattatattccgtaggtagatgtgtaacctcttcaccttattcatggctgaagtcacctcttggttacagtagcgtagcgtgcccgtgtgcatgtcctttgcgcctgtgaccaccaccccaacaaaccatccagtgacaaaccatccagtggaggtttgtcgggcaccagccagcgtagcagggtcgggaaaggccacctgtcccactcctacgatacgctactataaagagaagacgaaatagtgacataatatattctatttttatactcttcctatttttgtagtgacctgtttatgagatgctggttttctacccaacggccctgcagccagctcacgtccaggttcaacccacagctacttggtttgtgttcttcttcatattctaaaaccattccatttccaagcactttcagtccaataggtgtaggaaatagcgctgtttttgttgtgtgtgcagggagggcagttttctaatggaatggtttgggaatatccatgtacttgtttgcaagcaggactttgaggcaagtgtgggccactgtggtggcagtggaggtggggtgtttgggaggctgcgtgccagtcaagaagaaaaaggtttgcattctcacattgccaggatgataagttcctttccttttctttaaagaagttgaagtttaggaatcctttggtgccaactggtgtttgaaagtagggacctcagaggtttacctagagaacaggtggtttttaagggttatcttagatgtttcacaccggaaggtttttaaacactaaaatatataatttatagttaaggctaaaaagtatatttattgcagaggatgttcataagggccagtatgatttataaatgcaatctcccccttgatttaannnnnnnnnnnnnnnnnnnnnnnnnnnnnnnnnnnnnnnaacccttctgcctttgatgttacagatttcatacagtttatttttaaagatagatccctttta

SEQ ID NO: 184722 - DNA, 1529 bp, Homo Sapiens
  misc_feature (183)..(221): n is a, c, g, or t
  misc_feature (1258)..(1294): n is a, c, g, or t
ttggatcaactcgtttttatattaatgtacttgttgattattggggtataaaaacgagttgattattggggtataaaatcaactcgtttttatattaatgtacttgtttctctgttgtaagaataggcattaacacaaaggaggcgtctcgggagaggattaggttccatcctttacgtgttnnnnnnnnnnnnnnnnnnnnnnnnnnnnnnnnnnnnnnnttcagcaaaccatttttaaagtagaagagggttttaggtagaaaaacatattcttgtgcttttcctgataaagcacagctgtagtggggttctaggcatctctgtactttgcttgctcatatgcatgtagtcactttataagtcattgtatgttattatattccgtaggtagatgtgtaacctcttcaccttattcatggctgaagtcacctcttggttacagtagcgtagcgtggccgtgtgcatgtcctttgcgcctgtgaccaccaccccaacaaaccatccagtgacaaaccatccagtggaggtttgtcgggcaccagccagcgtagcagggtcgggaaaggccacctgtcccactcctacgatacgctactacaaagagaagacgaaatagtgacataatatattctatttttatactcttcctatttttgtagtgacctgtttatgagatgctggttttctacccaacggccctgcagccagctcacgtccaggttcaacccacagctacttggtttgtgttcttcttcatattctaaaaccattccatttccaagcactttcagtccaataggtgtaggaaatagcgctgtttttgttgtgtgtgcagggagggcagttttctaatggaatggtttgggaatatccatgtacttgtttgcaagcaggactttgaggcaagtgtgggccactgtggtggcagtggaggtggggtgtttgggaggctgcgtgccagtcaagaagaaaaaggtttgcattctcacattgccaggatgataagttcctttccttttctttaaagaagttgaagtttaggaatcctttggtgccaactggtgtttgaaagtagggacctcagaggtttacctagagaacaggtggtttttaagggttatcttagatgtttcacaccggaaggtttttaaacactaaaatatataatttatagttaaggctaaaaagtatatttattgcagaggatgttcataaggccagtatgatttataaatgcaatctccccttgatttaannnnnnnnnnnnnnnnnnnnnnnnnnnnnnnnnnnnnaaccttctgcctttgatgttacagatttaatacagtttatttttaaagatagatccttttataagtgagaaaaaacaatctggaagaaaaaaaccacacaaagacattgattcagcctgtttggcgtttccagagtcatctgattggacagggcatggtgcaaggaaaattagggtactcacctaagttcggttccgatgaattcctatcccctgccccttcctttaaaaaactt

SEQ ID NO: 184723 - DNA, 2059 bp, Homo Sapiens
  misc_feature (140)..(163): n is a, c, g, or t
  misc_feature (769)..(805): n is a, c, g, or t
  misc_feature (1842)..(1880): n is a, c, g, or t
gcgcccgcgtgtctgcccgccaaagcagggcagaacgtgcccgctgggtccaccatggctaagtgaagcatgaggtattgtgaaacagcaacctttttggaatagagcagtaatcacattaagtcaaaattgatcacatnnnnnnnnnnnnnnnnnnnnnnnnggcatctgtaatacaatgttctaagagaaaactaaaactagtacatggcagtatatgacattgtaaaacaaaaaactgatcctccaatagcagcaaacaatgtgaaagagatacacagaagcgatgtgaatatttccaaaccgtgcctggaagtcaacggtagcagcgcaataagaaaatggagctgcggcctgtccccggtgtgggcaccgccccttcccctcgggagcctcctcctcacacctcctcccgcctgtcctccctcacacgtcagcctccacactcttgccacctcccttcaacacttcctaaataaaaattacaagaattacatagccaagatgtgcaaattgtctattttgtcactaagttttttaaaggaaggggcaggggataagaattcatcggaaccgaacttaggttgagtaccctaattttccttgcacccatgcctgtccaatcagatgactctgggaaacgccaaacaggctgaatcaatgtctttgtgtggtttttttcttccagattgtttttttctcacctataaaaggatctatctttaaaaataaactgtattaaatctgtaacatcaaaggcagaaggttnnnnnnnnnnnnnnnnnnnnnnnnnnnnnnnnnnnnnttaaatcaaggggagattgcatttataaatcatactggccttatgaacatcctctgcaataaatatactttttagccttaactataaattatatattttagtgtttaaaaaccttccggtgtgaaacatctaagataacccttaaaaaccacctgttctctaggtaaacctctgaggtccctactttcaaacaccagttggcaccaaaggattcctaaacttcaacttctttaaagaaaaggaaaggaacttatcatcctggcaatgtgagaatgcaaacctttttcttcttgactggcacgcagcctcccaaacaccccacctccactgccaccacagtggcccacacttgcctcaaagtcctgcttgcaaacaagtacatggatattcccaaaccattccattagaaaactgccctccctgcacacacaacaaaaacagcgctatttcctacacctattggactgaaagtgcttggaaatggaatggttttagaatatgaagaagaacacaaaccaagtagctgtgggttgaacctggacgtgagctggctgcagggccgttgggtagaaaaccagcatctcataaacaggtcactacaaaaataggaagagtataaaaatagaatatattatgtcactatttcgtcttctctttatagtagcgtatcgtaggagtgggacaggtggcctttcccgaccctgctacgctggctggtgcccgacaaacctccactggatggtttgtcactggatggtttgttggggtggtggtcacaggcgcaaaggacatgcacacgggcacgctacgctactgtaaccaagaggtgacttcagccatgaataaggtgaagaggttacacatctacctacggaatataataacatacaatgacttataaagtgactacatgcatatgagcaagcaaagtacagagatgcctagaaccccactacagctgtgctttatcaggaaaagcacaagaatatgtttttctacctaaaaccctcttctactttaaaaatggtttgctgaannnnnnnnnnnnnnnnnnnnnnnnnnnnnnnnnnnnnnnaacacgtaaaggatggaacctaatcctctcccgagacgcctcctttgtgttaatgcctattcttacaacagagaaacaagtacattaatataaaaacgagttgattattggggtataaaatcctctatcatctgtagcacaaccctcctcccccaccgctcagggttatgcaaatacta

SEQ ID NO: 184724 - DNA, 2232 bp, Homo Sapiens
  misc_feature (381)..(408): n is a, c, g, or t
  misc_feature (679)..(688): n is a, c, g, or t
  misc_feature (868)..(906): n is a, c, g, or t
  misc_feature (1943)..(1981): n is a, c, g, or t
aaagttggctcaagtggaacctggccgcaatgaccccgcacgatttcattgaacacttcctctccaaaatgccagaggcggaggagaacaaacagatcatccgcaaacacgcgcagaccttcgttgccctctgtgccacagatgtgaagttcatttccaatccgccctccatggtggcagcggggagcgtggtggccgcagtgcaaggcctgaacctgaggagccccaacaacttcctgtcctactaccgcctcacacgcttcctctccagagtgatcaagtgtgacccagactgcctccgggcctgccaggagcagatcgaagccctgctggagtcaagcctgcgccaggcccagcagaacatggaccccaaggccgccnnnnnnnnnnnnnnnnnnnnnnnnnnnntggacctggcttgcacacccaccgacgtgcgggacgtggacatctgagggcgccaggcaggcgggcgccaccgccacccgcagcgagggcggagccggccccaggtgctcccctgacagtccctcctctccggagcattttgataccagaagggaaagcttcattctccttgttgttggttgttttttcctttgctctttcccccttccatctctgacttaagcaaaagaaaaagattacccaaaaactgtctttaaaagagagagagagnnnnnnnnnntagtatttgcataaccctgagcggtgggggaggagggttgtgctacagatgatagaggattttataccccaataatcaactcgtttttatattaatgtacttgtttctctgttgtaagaataggcattaacacaaaggaggcgtctcgggagaggattaggttccatcctttacgtgttnnnnnnnnnnnnnnnnnnnnnnnnnnnnnnnnnnnnnnnttcagcaaaccatttttaaagtagaagagggttttaggtagaaaaacatattcttgtgcttttcctgataaagcacagctgtagtggggttctaggcatctctgtactttgcttgctcatatgcatgtagtcactttataagtcattgtatgttattatattccgtaggtagatgtgtaacctcttcaccttattcatggctgaagtcacctcttggttacagtagcgtagcgtgcccgtgtgcatgtcctttgcgcctgtgaccaccaccccaacaaaccatccagtgacaaaccatccagtggaggtttgtcgggcaccagccagcgtagcagggtcgggaaaggccacctgtcccactcctacgatacgctactataaagagaagacgaaatagtgacataatatattctatttttatactcttcctatttttgtagtgacctgtttatgagatgctggttttctacccaacggccctgcagccagctcacgtccaggttcaacccacagctacttggtttgtgttcttcttcatattctaaaaccattccatttccaagcactttcagtccaataggtgtaggaaatagcgctgtttttgttgtgtgtgcagggagggcagttttctaatggaatggtttgggaatatccatgtacttgtttgcaagcaggactttgaggcaagtgtgggccactgtggtggcagtggaggtggggtgtttgggaggctgcgtgccagtcaagaagaaaaaggtttgcattctcacattgccaggatgataagttcctttccttttctttaaagaagttgaagtttaggaatcctttggtgccaactggtgtttgaaagtagggacctcagaggtttacctagagaacaggtggtttttaagggttatcttagatgtttcacaccggaaggtttttaaacactaaaatatataatttatagttaaggctaaaaagtatatttattgcagaggatgttcataaggccagtatgatttataaatgcaatctccccttgatttaannnnnnnnnnnnnnnnnnnnnnnnnnnnnnnnnnnnnnnaaccttctgcctttgatgttacagatttaatacagtttatttttaaagatagatccttttataggtgagaaaaaaacaatctggaagaaaaaaaccacacaaagacattgattcagccctgtttggcgtttcccagagtcatctgattgggacaggcatggggtgcaaggaaaattaagggtactcaacctaagttcggttccgatgaattcttatcccctgccccttcctttaaaaaacttagtgacaaa

SEQ ID NO: 184725 - DNA, 2158 bp, Homo Sapiens
  misc_feature (180)..(218): n is a, c, g, or t
  misc_feature (1255)..(1291): n is a, c, g, or t
  misc_feature (1897)..(1920): n is a, c, g, or t
tagtatttgcataaccctgagcggtgggggaggagggttgtgctacagatgatagaggattttataccccaataatcaactcgtttttatattaatgtacttgtttctctgttgtaagaataggcattaacacaaaggaggcgtctcgggagaggattaggttccatcctttacgtgttnnnnnnnnnnnnnnnnnnnnnnnnnnnnnnnnnnnnnnnttcagcaaaccatttttaaagtagaagagggttttaggtagaaaaacatattcttgtgcttttcctgataaagcacagctgtagtggggttctaggcatctctgtactttgcttgctcatatgcatgtagtcactttataagtcattgtatgttattatattccgtaggtagatgtgtaacctcttcaccttattcatggctgaagtcacctcttggttacagtagcgtagcgtgcccgtgtgcatgtcctttgcgcctgtgaccaccaccccaacaaaccatccagtgacaaaccatccagtggaggtttgtcgggcaccagccagcgtagcagggtcgggaaaggccacctgtcccactcctacgatacgctactataaagagaagacgaaatagtgacataatatattctatttttatactcttcctatttttgtagtgacctgtttatgagatgctggttttctacccaacggccctgcagccagctcacgtccaggttcaacccacagctacttggtttgtgttcttcttcatattctaaaaccattccatttccaagcactttcagtccaataggtgtaggaaatagcgctgtttttgttgtgtgtgcagggagggcagttttctaatggaatggtttgggaatatccatgtacttgtttgcaagcaggactttgaggcaagtgtgggccactgtggtggcagtggaggtggggtgtttgggaggctgcgtgccagtcaagaagaaaaaggtttgcattctcacattgccaggatgataagttcctttccttttctttaaagaagttgaagtttaggaatcctttggtgccaactggtgtttgaaagtagggacctcagaggtttacctagagaacaggtggtttttaagggttatcttagatgtttcacaccggaaggtttttaaacactaaaatatataatttatagttaaggctaaaaagtatatttattgcagaggatgttcataaggccagtatgatttataaatgcaatctccccttgatttaannnnnnnnnnnnnnnnnnnnnnnnnnnnnnnnnnnnnaaccttctgcctttgatgttacagatttaatacagtttatttttaaagatagatccttttataggtgagaaaaaaacaatctggaagaaaaaaaccacacaaagacattgattcagcctgtttggcgtttcccagagtcatctgattggacaggcatgggtgcaaggaaaattagggtactcaacctaagttcggttccgatgaattcttatcccctgccccttcctttaaaaaacttagtgacaaaatagacaatttgcacatcttggctatgtaattcttgtaatttttatttaggaagtgttgaagggaggtggcaagagtgtggaggctgacgtgtgagggaggacaggcgggaggaggtgtgaggaggaggctcccgaggggaaggggcggtgcccacaccggggacaggccgcagctccattttcttattgcgctgctaccgttgacttccaggcacggtttggaaatattcacatcgcttctgtgtatctctttcacattgtttgctgctattggaggatcagttttttgttttacaatgtcatatactgccatgtactagttttagttttctcttagaacattgtattacagatgccnnnnnnnnnnnnnnnnnnnnnnnnatgtgatcaattttgacttaatgtgattactgctctattccaaaaaggttgctgtttcacaatacctcatgcttcacttagccatggtggacccagcgggcaggttctgcctgctttggcgggcagacacgcgggcgcgatcccacacatgctggcgggggccggccccgaggccgcgtgcgtgagaaccgcgccggtgtccccagagaccaagctgtgtccctcttctcttccctgc

SEQ ID NO: 184726 - DNA, 1787 bp, Homo Sapiens
actttgtacaaaaaagttggcactttgttcctccaccaaaagacaaaaagaagaaggataaggatgatgatggtggtgaggatgatgatgcaaattgcaacttgatctgtggtgatgaatatggtccagaaacaaggttgagcatgtctcaattgaacgaaaaggaaactccttttgaactcatcgaggctctacttaagtacattgaaacccttaatgttcctggagctgtgttggtttttttgcctggctggaatctgatttatactatgcagaagcatttggaaatgaatccacattttggaagccatcggtatcagattctacccctgcattctcagattcctcgagaggaacagcgcaaagtgtttgatccagtaccagttggagtaaccaaggttattttgtccacaaatattgctgaaacaagcattaccataaacgatgttgtttatgtcattgactcctgcaagcagaaagtgaaactcttcactgctcacaacaatatgaccaactatgctaccgtatgggcatcaaaaacaaaccttgagcaacggaaagggcgagctggccgagtacggcctggattctgctttcacctgtgcagccgagctcgttttgagagacttgaaacccacatgacaccagagatgttccgaacaccattgcatgaaattgctcttagcataaaacttctgcgtctaggaggaattggccaatttctggccaaagcaattgaacctccccctttggatgctgtgattgaagcagaacacactcttagagagcttgatgcattagatgccaatgatgagttgactcctttgggacgaatcctggctaaactccccattgagcctcgttttggcaaaatgatgataatggggtgtattttctacgtgggagatgctatctgtaccattgctgctgctacctgctttccagagcctttcatcaatgaaggaaagcggctgggctatatccatcgaaattttgctggaaacagattttctgatcacgtagcccttttatcagtattccaagcctgggatgatgctagaatgggtggagaagaagcagagatacgtttttgtgagcacaaaagacttaatatggctacactaagaatgacctgggaagccaaagttcagctcaaagagattttgattaattctgggtttccagaagattgtttgttgacacaagtgtttactaacactggaccagataataatttggatgttgttatctccctcctggcctttggtgtgtaccccaatgtatgctatcataaggaaaagaggaagattctcaccactgaagggcgtaatgcacttatccacaaatcatctgttaattgtccttttagtagccaagacatgaagtacccatctcccttctttgtatttggtgaaaagattcgaactcgagccatctctgctaaaggcatgactttagtcacccccctgcagttgcttctctttgcctccaagaaagtccaatctgatgggcagattgtgcttgtagatgactggattaaactgcaaatatctcatgaagctgctgcctgtatcactggtctccgggcagccatggaggctttggttgttgaagtaaccaaacaacctgctatcatcagccagttggaccccgtaaatgaacgtatgctgaacatgatccgtcagatctctagaccctcagctgctggtatcaaccttatgattggcagtacacggtatggagatggtccacgtcctcccaagatggcccgatacgacaatggaagc

SEQ ID NO: 184727 - DNA, 2591 bp, Homo Sapiens
ttggcatgcgagttgctgtgcgtttctctgttgtctcggtagaaggccagagtcacacacggtcctaagagctgggcaccaggaagcgaaggctgatctgaagaagacacttgaatcatgggtgacgttaaaaattttctgtatgcctggtgtggcaaaaggaagatgaccccatcctatgaaattagagcagtggggaacaaaaacaggcagaaattcatgtgtgaggttcaggtggaaggttataattacactggcatgggaaattccaccaataaaaaagatgcacaaagcaatgctgccagagactttgttaactatttggttcgaataaatgaaataaagagtgaagaagttccagcttttggggtagcatctccgcccccacttactgatactcctgacactacagcaaatgctgaaggagatttaccaacaaccatgggaggacctcttcctccacatctggctctcaaagcagaaaataattctgaggtaggggcctctggctatggtgttcctgggcccacctgggaccgaggagccaacttgaaggattactactcaagaaaggaagaacaagaagtgcaagcgactctagaatcagaagaagtggatttaaatgctgggcttcatggaaactggaccttggaaaatgctaaagctcgtctaaaccaatattttcagaaagaaaagatccaaggagaatataagtacacccaagtgggtcctgatcacaacaggagctttattgcagaaatgaccatttatatcaagcagctgggcagaaggatttttgcacgagaacatggatcaaataagaaattggcagcacagtcctgtgccctgtcacttgtcagacaactgtaccatcttggagtggttgaagcttactccggacttacaaagaagaaggaaggagagacagtggagccttacaaagtaaacctctctcaagatttagagcatcagctgcaaaacatcattcaagagctaaatcttgagattttgcccccgcctgaagatccttctgtgccagttgcactcaacattggcaaattggctcagttcgaaccatctcagcgacaaaaccaagtgggtgtggttccttggtcacctccacaatccaactggaatccttggactagtagcaacattgatgaggggcctctggcttttgctactccagagcaaataagcatggacctcaagaatgaattgatgtaccagttggaacaggatcatgatttgcaagcaatcttgcaggagagagagttactgcctgtgaagaaatttgaaagtgagattctggaagcaatcagccaaaattcagttgtcattattagaggggctactggatgtgggaaaaccacacaggttccccagttcattctagatgactttatccagaatgaccgagcagcagagtgtaacatcgtagtaactcagcccagaagaatcagtgcggtttctgtggcagagcgagttgcatttgaaagaggagaagagcctggaaaaagctgtggctacagcgttcgatttgagtctatacttcctcgtcctcatgccagtataatgttttgtactgtaggtgtgctcctgagaaaattagaagcaggcattcgaggaatcagtcatgtaattgtagatgaaatacatgaaagagatattaatactgacttccttttggtagtactgcgtgatgttgttcaggcttatcctgaagttcgcattgttcttatgtctgctactattgataccagcatgttttgtgaatatttcttcaattgccccatcattgaagtttatgggaggacttacccagttcaagaatattttctggaagactgcattcagatgactcactttgttcctccaccaaaagacaaaaagaagaaggataaggatgatgatggtggtgaggatgatgatgcaaattgcaacttgatctgtggtgatgaatatggtccagaaacaaggttgagcatgtctcaattgaacgaaaaggaaactccttttgaactcatcgaggctctacttaagtacattgaaacccttaatgttcctggagctgtgttggtttttttgcctggttggaatctgatttatactatgcagaagcatttggaaatgaatccacattttggaagccatcggtatcagattctacccctgcattctcagattcctcgagaggaacagcgcaaagtgtttgatccagtaccagttggagtaaccaaggttattttgtccacaaatattgctgaaacaagcattaccataaacgatgttgtttatgtcattgactcctgcaagcagaaagtgaaactcttcactgctcacaacaatatgaccaactatgctaccgtatgggcatcaaaaacaaaccttgagcaacggaaagggcgagctggccgagtacggcctggattctgctttcacctgtgcagccgagctcgttttgagagacttgaaacccacatgacaccagagatgttccgaacaccattgcatgaaattgctcttagcataaaacttctgcgtctaggaggaattggccaatttctggccaaagcaattgaacctccccc

SEQ ID NO: 184728 - DNA, 914 bp, Homo Sapiens
ttggctctgttgtctcggtagaaggccagagtcacacacggtcctaagagctgggcaccaggaagcgaaggctgatctgaagaagacacttgaatcatgggtgacgttaaaaattttctgtatgcctggtgtggcaaaaggaagatgaccccatcctatgaaattagagcagtggggaacaaaaacaggcagaaattcatgtgtgaggttcaggtggaaggttataattacactggcatgggaaattccaccaataaaaaagatgcacaaagcaatgctgccagagactttgttaactatttggttcgaataaatgaaataaagagtgaagaagttccagcttttggggtagcatctccgcccccacttactgatactcctgacactacagcaaatgctgaaggagatttaccaacaaccatgggaggacctcttcctccacatctggctctcaaagcagaaaataattctgaggtaggggcctctggctatggtgttcctgggcccacctgggaccgaggagccaacttgaaggattactactcaagaaaggaagaacaagaagtgcaagcgactctagaatcagaagaagtggatttaaatgctgggcttcatggaaactggaccttggaaaatgctaaagctcgtctaaaccaatattttcagaaagaaaagatccaaggagaatataagtacacccaagtgggtcctgatcacaacaggtggaggagaatgagattgagtgctgactttaagcctggctgagaaacatactggcatcgatgtcattaatgaaagggtggatgttgttcccctgaaagccagtggcctttgacccctgaagccgctgtgcctgaaggagctttattgcagaaatgaccatttatatcaagcagctgggcagaagatttttg

SEQ ID NO: 184729 - DNA, 1879 bp, Homo Sapiens
tcgtgcagtagaacgcacacaccgggggagtcggtccgtctcattagaatgcaaagggccctggacccatgagtactcatacagatccttgttttcacttgggactttacttggatcctggcactgctctcgggtgaggttgaccactgtgccagtcaaatttgccaaggcatactgtacaacataagtggtgttggtggggctggagacagcgatgtaatgttgaagaggcccgtcacccaagtaggaccttaggtcctgcctgaggatagactggaaccatgagttgttggctttaatcaggaacccatagagcaggcgggtaaccgtttggggatcagcctgaactgtgtcgctgaagttggttcctcctgcaagctcatacagagcacgtcccagcaccgtggccacatctgccagggccttggcagtgtctgttacaaagttcaggtcctcttcagggctcagccattcgggatagctcacattaatgttctcagcagtgtcgtaaatactctggtaatatttgttatggaaggcaccagagtggtcagccagaacaacgccagagatgtttcgagctcgaagaaatcgctgcagggaagatggtgggagaggctgggactgatttggcctcctgaggatgacagcagggacaccagcaccactcttctccaatgtggccaggagatcctccacctggttccgtacagactcatttttctgagaaacaggatctgtgtgcatccaaagctctaatgaagttcttaaggccacctgtcccagctccacaaatgagtcaacattctctaactgcacgggaaacttgcccttctccatatcgtagaccatcctcgagctgccaatgtagtcaaaagtttccccttgaaagaagacaaacatgacattgcggggcagggtggtcacatcaggtgccttttgcaaagcttcagcagcagccagctgggtgacaaaggaagccactgcgctttcagcccctggggccacattccagaaaaaggaacgactatccagccgggtggcagcaaccacaaccctgtcgtcaggctttaatgtcccagttgtatttataggctttagcatgctccacacattgtaatcagacagggggtcacagacgatttctgggttgatgctgaaggtgctttggatggagctgcgccgcatgcaggtggcagtgctgatgacagcatgcatgtgtgaaaagagctgcatggcacatagtgggaaggttggtgctgagccattctgactcaggttgtgatcttgatagcactgcttgatgactttggtttcattttcatcttcaagaagaaagatggggaaactaaagtcttcataagccaaaccattgcccagcgaattccactgtatttctctgcagtgagcaaactctggcccataggaattggagtaaacaccaaacccatcatttgggcactgtacactaggagagaagcctgaggcaggactgggcttggtcaaggacactgcaagaccagcaattcggctggttctccctttcagcttctccattaaatccctggtaaaatgcttgctctccagcagaaccatgtaaggggggttggggccatcagtcaatacccactgtaggtcctcctctttctctactacgtggataacccctgtgtctccactaattgaagactggcagccaatctgatgagtggcgttgagcaggcgaacacagggagctgttttatttaaggggatatatatcttcctctccactgagtttcccctgcacaaacctgctagtaggacgcagaaagacagaaggcgaaggagaccccgacttcccgggtcagccccagccaacttttttgtacaaagttgg

SEQ ID NO: 184730 - DNA, 1621 bp, Homo Sapiens
  misc_feature (1373)..(1404): n is a, c, g, or t
gccaactttgtacaaaaaagttggaaaagcaccaagagccccccagtgctgagccacgaattcgtcctgcagaatcacgcggacatcgtctcctgtgtggcgatggcttcctgctggggctcatgtttgagataacggcaaaagcttctatcatttttgttactcttcagtacaatgtcaccctcccagcaacagaagaacaagctactgaatcagtgtccctttattactatggcatcaaagatttggctactgttttcttctacatgctagtggcgataattattcatgccgtaattcaagagtatatgttggataaaattaacaggcgaatgcacttctccaaaacaaaacacagcaagtttaatgaatctggtcagcttagtgcgttctacctttttgcctgtgtttggggcacattcattctcatctctgaaaactacatctcagacccaactatcttatggagggcttatccccataacctgatgacatttcaaatgaagtttttctacatatcacagctggcttactggcttcatgcttttcctgaactctacttccagaaaaccaaaaaagaagatattcctcgtcagcttgtctacattggtctttacctcttccacattgctggagcttaccttttgaacttgaatcatctaggacttgttcttctggtgctacattattttgttgaatttcttttccacatttcccgcctgttttattttagcaatgaaaagtatcagaaaggattttctctgtgggcagttctttttgttttgggaagacttctgactttaattctttcagtactgactgttggttttggccttgcaagagcagaaaatcagaagctggatttcagtactggaaacttcaatgtgttagctgttagaatcgctgttctggcatccatttgcgttactcaggcatttatgatgtggaagttcattaattttcagcttcgaaggtggagggaacattctgcttttcaggcaccagctgtgaagaagaaaccaacagtaactaaaggcagatcttctaaaaaaggaacagaaaatggtgtgaatggaacattaacttcaaatgtagcagactctccccggaataaaaaagagaaatcttcataatgaattataaactaattgattaatgtccccaaagaaatctgctttctactatatctttcagcattagagatttttctgttcttgaaaatacagtctgtgctctttgatttttgctattgtacggtttcatgcatttttttaaagggcatttgaggggaggattattgctatgaatgaaaaaaatattttagcttagactaagctacctgccttcaaaatagtttagggaccaccaccatnnnnnnnnnnnnnnnnnnnnnnnnnnnnnnnnctaatgatttggagagaaaactatttacaaaaattccacatatcagtgatacaatttcttgctgtcaccaattttttataatagcagagtggcctgttctaagaagccatattttttaagttatctttcagggtaacatggaaatactataaagttggatgtcaaactttaatatgttttcagtgttctctaattttttggaatttttgtagacttt

SEQ ID NO: 184731 - DNA, 1083 bp, Homo Sapiens
  misc_feature (742)..(773): n is a, c, g, or t
caacagtaacataaataaataaaaagaaggccataatacacgcctccacatagaaattatcctaaacaccaactttactatattgtaaacaaatatccccaaggacttcgctgtcaaatgtgaaaagtttctttatttctacagaaggtatttctcttgaatactatttttaaattcttgtgactttatagttttctgtgctgtcacttttttctgcttttaatagtagttttcttttaatttgctactttcagttcattgtgttaaaaatgttaccaggttttgtgattggttaaatactggtaagtaaatttcacctgagtgaattggattttacattttcttttctgaaggtatctttacatataaagattataacttgcatttatttataaaagagagtaacatggattcttttctttttgcagaaaatggtgtgaatggaacattaacttcaaatgtagcagactctccccggaataaaaaagagaaatcttcataatgaattataaactaattgattaatgtccccaaagaaatctgctttctactatatctttcagcattagagatttttctgttcttgaaaatacagtctgtgctctttgatttttgctattgtacggtttcatgcatttttttaaagggcatttgaggggaggattattgctatgaatgaaaaaaatattttagcttagactaagctacctgccttcaaaatagtttagggaccaccaccatnnnnnnnnnnnnnnnnnnnnnnnnnnnnnnnnctaatgatttggagagaaaactatttacaaaaattccacatatcagtgatacaatttcttgctgtcaccaattttttataatagcagagtggcctgttctaagaaggccatattttttaagttatctttcagggtaacatggaaatactataaagttggatgtcaaactttaatatgttttcagtgttctctaattttttggaatttttgtagactttacacctggaaaaaaagatttgtaaaatcaccggaacaattgtgtgctttatttatagtagtggttattagtattacatccccatttaaaaac

SEQ ID NO: 184732 - DNA, 1388 bp, Homo Sapiens
  misc_feature (869)..(900): n is a, c, g, or t
ttggcttgcaagagcagaaaatcagaagctggatttcagtactggaaacttcaatgtgttagctgttaggtacgatcaatttaacatttttttcactttatacagctagataatatatattatcagtttctctacattgaatcatctaaaaaaggatgaatatgaggttggggaaaatactcatttgattttatttcatacccgttgctattttacatgtctaaagtgaagtactaaagcatttaacttttaggataaattattaatgcaatgattattaatacaattttctcaactgagtgggaattattactaaatactatgaaagatgatagaatgtattcagtggcattgttttttatacactaactttttatgtcttaatatttcttagaatcgctgttctggcatccatttgcgttactcaggcatttatgatgtggaagttcattaattttcagcttcgaaggtggagggaacattctgcttttcaggcaccagctgtgaagaagaaaccaacagtaactaaaggcagatcttctaaaaaaggaacagaaaatggtgtgaatggaacattaacttcaaatgtagcagactctccccggaataaaaaagagaaatcttcataatgaattataaactaattgattaatgtccccaaagaaatctgctttctactatatctttcagcattagagatttttctgttcttgaaaatacagtctgtgctctttgatttttgctattgtacggtttcatgcatttttttaaagggcatttgaggggaggattattgctatgaatgaaaaaaatattttagcttagactaagctacctgccttcaaaatagtttagggaccaccaccatnnnnnnnnnnnnnnnnnnnnnnnnnnnnnnnnctaatgatttggagagaaaactatttacaaaaattccacatatcagtgatacaatttcttgctgtcaccaattttttataatagcagagtggcctgttctaagaaggccatattttttaagttatctttcagggtaacatggaaatactataaagttggatgtcaaactttaatatgttttcagtgttctctaattttttggaatttttgtagactttacacctggaaaaaaagatttgtaaaatcaccggaacaattgtgtgctttattttataggtagtggttattagtattacatccccattttaaaaacaaaaacataataatggttacaacacgtggagttttactaacatacatattaaatcaaagtatattcttaaaagtacttgtgaagtaaaatctttcttgtgcattttcaatacttgtaaactggaaatcagaaaatatttactatgaacaggaaaatctgacatatagcccttttt

SEQ ID NO: 184733 - DNA, 942 bp, Homo Sapiens
ttgggtgaggagcagccagcgggaggcggcggcgagtcggtgagcagctgggaagagcagaaccggggcggagcacctgcaggcgcgggcggcggccccaccatggcgattcgcaagaaaagcaccaagagccccccagtgctgagccacgaattcgtcctgcagaatcacgcggacatcgtctcctgtgtggcgatggtcttcctgctggggctcatgtttgagataacggcaaaagcttctatcatttttgttactcttcagtacaatgtcaccctcccagcaacagaagaacaagctactgaatcagtgtccctttattactatggcatcaaagatttggctactgttttcttctacatgctagtggcgataattattcatgccgtaattcaagagtatatgttggataaaattaacaggcgaatgcacttctccaaaacaaaacacagcaagtttaatgaatctggtcagcttagtgcgttctacctttttgcctgtgtttggggcacattcattctcatctctgaaaactacatctcagacccaactatcttatggagggcttatccccataacctgatgacatttcaaatgaagtttttctacatatcacagctggcttactggcttcatgcttttcctgaactctacttccagaaaaccaaaaaagaagatattcctcgtcagcttgtctacattggtctttacctcttccacattgctggagcttaccttttgaacttgaatcatctaggacttgttcttctggtgctacattattttgttgaatttcttttccacatttcccgcctgttttattttagcaatgaaaagtatcagaaaggattttctctgtgggcagttctttttgttttgggaagacttctgactttattctttcagtactgactgttggttttggccttgcaagagcagaaa

SEQ ID NO: 184734 - DNA, 1041 bp, Homo Sapiens
ttggacttaatggctcgagggctccaggactcaggcccctgggaaagggcccccactcagctccagttcctgcgagcccagtatgaaggcttgaagaggcagcagaggacccaggcccacctcctggtgcttccaaaaggaggaaacacacctgctcctgcagaatcgatggtcaatgctgtttggattaacaaggagagaagaagctcactgtccctggaagaggcagattctgaggtggaggggaggctggaggaggctgcccagggctgccttcaggcccccaagtctccatggcacacgcacctggagatgcattgtttggtccaaacctccccccaggacaccagtcatcaagtacatcataggggcaagcttgtgggatctgaccaaaggctccctcctgaaggagacacacacttgtttgaaaccaatcagatgactcagcaaggaaccggaatcccagaggctgcccagcttccatgccaggtgggcaatacccaaacaaaggcagtggaatctggcttaaaattcagcactcaatgtcctctttccataaagaacccacacaggtctggcaaaccagcttactatccatttccccagaggaaaacacccaggatctcccaagctgcccggaacctgggcttatatggctcagcgtgaagctttctattctgccagatgtcttgaccttgaggccacctatggccttatagaagaaccaaggaggcagagccacaacgaggtctctagctatgagcaagaactggactaacctaattataggaattgtgggagacgaacttcacaatggtaacatggttttacccttccaataagaagagacttcccaggccaaattgcccacagtttagatgaagaggactgtctggtcagtgcagccccattctgacattactatgaggtcctggatatccattccttggggaggaccagtaagacatctgctccatccctggaactggatattttggaacataaaacaagggacctagccaacagaatgccttagcaatg

SEQ ID NO: 184735 - DNA, 1634 bp, Homo Sapiens
  misc_feature (642)..(660): n is a, c, g, or t
  misc_feature (1561)..(1570): n is a, c, g, or t
ttggcttttgttataagctatttaaaaccagtaaggagacttgaaattcagaaaatcaacacatttttaaatgactaacttctaaaagccccaacacatgacgccatctgaagacccgcaacggagtgggggtggcggccgccccaccctccccacccggggaagccatcacagctcatctgcccgcggctgcgtgaggacagcaggggtttttcttcagagtctattttttcagcgacaaggacccaggtcttcctgctgctgccagggagagcagggacagtgccgcgtgcgagatgagctcgaacactgcccgccttactgccgcctaccccgcccgccacgccgccgtcgatgccagcgctgtccccacgggtaccaggaagtgcagagccgcacaggagctgccccggagctgaggggacggtcttcggctcctctgcaccccgtgattctgcccacgctcctccaccacgaggcactgacctgcgtcgggtggtgaccgtggctggcggtcacgccctcagcccctccgggcacacgtgccgcctgaccgggcgacccttttcagttcggcaaacgtcgctcccttcattttgggactgaggctgcagcattggaacaaaagagcattatttcaannnnnnnnnnnnnnnnnnngttcgttcatttaaacgtatatttagaactgcacttttgtccacaaccttcccttctctttctattccccagtgaactgaggtttttaccgatttatagagcagtcaaatccgaagtgctcgagtgcttagaaaccccctctggtgcttggttgaacaagggaatcacaagaaaacgaaaatgcaaaaactgaacttcgggggtcgttctgtgccttccagcatcttgtacagcaaatcctgactcgtgtctttttacccccaagatatctgtcttcagtagcgactgaatctgccactctcagaataagttccttgcatttattccaaataatctcgtttactctcacctgtttatgcaaattgtataaggtttcttatgcccaagcttgaaaaatgatttcccagtagacaagaggcggctacctatcctacagttacggtatttatttacataagaagatcttacaggagttctttgcttgaatccgttctaacacccgcggcagctgcacgcgctcacagaaggtggaggttacttgcccaggtacagacgacctcggggcagtgacgagcaaagaccagagactgctgagccctcgcatctgggtggcggaattgcctgcggggttttgcccttggtttactgaggggggtcttggttgctgctgaagccccccaccccttctaaagtgcaatgcaaaagggacatcatgtatatgcagcgtttgtttggaattttctttgcttttgttttctttgcggttgttctctgtgcatggattccacacctctgccgtaggtagatccgtcagcgggcattattaccgtgtcttgtaaagggtcggttttgttatgcaacacgcagaatgctgtttttagccttgttttaccagagttgnnnnnnnnnncagttatttcttcaagggaaactaaatgatttagttggagcaaagctttaagtgtgttggcgtg

SEQ ID NO: 184736 - DNA, 927 bp, Homo Sapiens
ttggtcccttctcttctgaattctccattctgggctcttgcctgtgaaatctttctttgctttccccatcttttcctcgcattttttcaccatctttccctcaatctccaggagccaatgcgagactttggctccgattaagcgacggcccgagactcggggtgcgcgaggaggatcgacagagtggtgatggagagcaccccttcaaggggactgaaccgagtacacctacaatgcaggaatctgcaggaattcttagggggcctgagccctggggtattggaccgattgtatgggcaccctgccacatgtctggctgtcttcagggagctcccatccttggctaagaactgggtgatgcggatgctctttctggagcagcctttgccacaggctgctgtagctctgtgggtaaagaaggaattcagcaaggctcaggaggaaagtacagggctgctgagcggcctccggatctggcacacacagctgctcccaggcgggctccagggcctcatcctcaaccccattttccgccagaacctccgcattgcccttctgggtggggggaaggcctggtctgatgacacaagtcagctgggaccagacaagcatgcccgggacgttccctcccttgacaagtacgccgaggagcgatgggaggtggtcttgcacttcatggtgggctcccccagtgcagctgtcagccaggacttggctcagctcctcagccaggctgggctcatgaagagtactgaacctggagagccgccctgcattacttccgctggcttccagttcctgttgctggacaccccggctcagctctggtactttatgttgcagtatttgcagacagcccagagccggggcatggacctggtagagattctctccttcctcttccagctcagcttctctactctgggc

SEQ ID NO: 184737 - DNA, 1334 bp, Homo Sapiens
  misc_feature (82)..(95): n is a, c, g, or t
  misc_feature (257)..(265): n is a, c, g, or t
  misc_feature (524)..(536): n is a, c, g, or t
  misc_feature (722)..(745): n is a, c, g, or t
  misc_feature (1016)..(1024): n is a, c, g, or t
ttggcaaaaacaccatctaccttacttgaggaattaggtaggtaaggaatgatcacattggagtttgggattaaaaacaccnnnnnnnnnnnnnntgcatttggttctctctacactggctaagaatattgctctacactgtaagttttaaacgttacgtttctgtatgaatgtagtgtgggtttgagtagcattgtgtgtgagtggccccacaggtacattcaccctctagtgcagcccctcagtttaatgaaggnnnnnnnnncaaacacaaagccttaagctctttgagtacttcctttaccaaatgagcatggttctaacacctggagctgggcctacattggaaacaagcccctcctgccctctgtccattcttagagcataccttcatccactccatgctcagcacgtctcatcccaagcgacaattagttggctagaaacacttttctgtaattttaaacttagactgttttgttacaaatttttgcaccattctgttaaagatgcagaattgggcnnnnnnnnnnnnnacagatgaaataagcccttacctttcctcttgtctctggggaatgtcagctgatggttcttatttaaggttttgcattttgttcactatccactactgttcgttagccagaaattctctagtgatctgaagcaatgtgactgaagaccagttttaagttatgtgttggcaagttgccttatatttnnnnnnnnnnnnnnnnnnnnnnnngcctgattgtgttatgccaaatgatagcaacatgaagtcctaatttattgttcccaattgttttcctgccgtctgtgaacactggtacctccctgtcctgatcccccaggagcacctgtagcttctgactcaatgccttctccgaaggtgttggccgccatctcacccagggccctcttccagttcctgcttttctgagtcagatttaaagagcaccactgtcttccccctaccccttgcttgatctccaaagcagatattcttgctgtannnnnnnnncctccccaatacctctccctgaaaggtgagctgctattttaggaaactggaccagacaccaacttgggggctttaagtcaaacaacctcaaacccatctcttcctgtgtaggggtgcaagcctctgaagctctcactcccacccttagtctgcatggaaaatgtactgtgatccccctgcccccaactgccctcgcctttggtgtgagatgttccttctttcggagttcagcctgagtccctctcccctctgccatccaacccccagccagcaataagggtccaagcccagggcctcctctccaaactcc

SEQ ID NO: 184738 - DNA, 2015 bp, Homo Sapiens
ttggcgctgcggcgggttcggtgggcccaatcccggggcggtgcggctgtttcgggcgcgggccccgcttttccgcaccctgctccggcctcgactacggcgagcctgagcgcggcggcggcccacgcgcagcgacagggagagatgagcagcaccagcagtaagagggctccgaccacggcaacccagaggctgaagcaggactaccttcgcattaagaaagacccggtgccttacatctgtgccgagcccctcccttcgaatattctcgagtggcactatgtcgtccgaggcccagagatgaccccttatgaaggtggctattatcatggaaaactaatttttcccagagaatttcctttcaaacctcccagtatctatatgatcactcccaacgggaggtttaagtgcaacaccaggctgtgtctttctatcacggatttccacccggacacgtggaacccggcctggtctgtctccaccatcctgactgggctcctgagcttcatggtggagaagggccccaccctgggcagtatagagacgtcggacttcacgaaaagacaactggcagtgcagagtttagcatttaatttgaaagataaagtcttttgtgaattatttcctgaagtcgtggaggagattaaacaaaaacagaaagcacaagacgaactcagtagcagaccccagactctccccttgccagacgtggttccagacggggagacgcacctcgtccagaacgggattcagctgctcaacgggcatgcgccgggggccgtcccaaacctcgcagggctccagcaggccaaccggcaccacggactcctgggtggcgccctggcgaacttgtttgtgatagttgggtttgcagcctttgcttacacggtcaagtacgtgctgaggagcatcgcgcaggagtgaggcccaggcgccgagacccaaggcgccactgagggcaccgcgcaccagagcgtgacctcggcaggctggacacactgcccagcacaggcagacccaccaggctcctaggtttagcttttaaaaacctgaaaggggaagcaaaaaccaaaatgtgtgactgggctttggaggagactggagcctcagccctgtcctggccacgggccgctggggctggtgtgggtgggccttgtgtgctggatttgtagcttatcttccgtgttgtctttggacctgttttaataaacccgtttttcattttattagatgtggtcacttagaaatgcaaacttgctgccgaccgcgggctgctcctgcgttcttggagctcctggcgcgtttctcggagctcccggctcctcagcgggtgggaacctcggggcccaggggtggagctggcgtccgcgggtgctggtctggcctggccgtgtggtgatgaggcttagcggggccagtgacggccgtggctcaggatccataagtcggggtttggtctcagcatttacaaatgtgtttacagtcagaatgaaacacattccttctagaaagtgcttgggggtttttgctgccctggaagccaggagcctgctcactccaaccacaagtcgcccttgactgcggcggccgcgagcggggcgggggctgccggtgccctccgcaggccgggcctcctgggcgcccctcggtgctgcaggctggggggccttgggtacctgcagagccttttctctgaattccttatgtccggtgggccagaagcccgtcctcctatgctggtggaaggcggaggaccggagtccctgcagaaggccccgtgcactcgggggcctccctcacatcccgtgccccctgcgctggccttcacagtaggtaatggctccggcccgggtgttcgctgtccacggaacatggcagaggggcaccccggcccggaaagacgccagagccagcaggggctgtttcgggccgcgtggctccccgggtctcggccgtctcccctcttctgcgtctgttccgtgactttcgcctggggtgggatgtaccgcaggtgc

SEQ ID NO: 184739 - DNA, 2799 bp, Homo Sapiens
  misc_feature (1892)..(1913): n is a, c, g, or t
  misc_feature (2488)..(2498): n is a, c, g, or t
ttggctcagattgagagtgactgcctggccctgctgcaagtccgagccatcctgcaacacttagggcttgagagcacctgtgacgacagcatcattgttaaggaggtgtgcactgtggtggcccggcgggcagcccagctctgtggcgcaggcatggccgctgtggtggacaggatacgagaaaaccgtgggctggacgctctcaaagtgacagtgggtgtggatgggaccctctacaagctacatcctcactttgccaaagtcatgcatgagacagtgaaggacctggctccgaaatgtgatgtgtctttcctgcagtcagaggatggcagcgggaagggggcggcgctcatcactgctgtggcctgccgcatccgtgaggctggacagcgatagaacccctgaaatcggaagggacttcctctttctctccttcttccctgttttaaattataagatgtcatccccttgtgtcagagacagaccccttggcttttgcttggcagagaggaccccactggtctgggttttgtctctgcatctcattgtagagcttggtggctgagcttggccctattaagataaatagagttccaaataaggatttgttcacatgcatcataaccattcccattggttctcctaaaacatgaaaattatctcccttagtaatcccccttgccaaattccatgtccctgtataattctacaggatggggacactaatgaagatacggttgcttcaccttggagcctgaacatgacatttctaagtggggtgcatcccccagcactgatgttgttactgattctcctgtcagagatctgggaggtctccactgaggatgtgagcctgattatcctataggcagacgtggggagggtggaggggtgacagtggaggaaaatccatggatatccacgcagcagcccctctttaacctcatctacaagcatttgccctgtggattccagcatttgccattcctggaatcaaggaatcctgagtctgggcaatgaaaccaaagccaggagttgacgcatcctgcagttgggccagctgttgcatctcagcggggcgcacatgttatccacaagcaatggacctttggggaagggggagtttttagtttgttttacaaatttttcctgcaaaagtggaatcactgtattttcattttaacttatatttgaaattttatttagttcttgaagtagatctgcttcttcatcttgacatgtaatggtcagttgtacgtaatgtatttatatgttaatttgttatgtatatagatgtgcaagtcttgtcagaattggcctcagtgtagttaaagggcagaaggggaagatactgactagtcatagaaatacctcattcgcctgtgggaagagaagggaagcctcttcagggtgagtgaatggcaaagcggttgcttctggctcctccttcccctgtggtcttggaagtgtgtggaaggcagggacagagatggaggccgagccaatagactgaagagaccacagcaattggctcctccatctagagattttcttggcagtattccatgggatgttaagcaaaggaaaccaaaggaatcgtttcaaatggactcatggcttagaaatctttattcttagggcagtcagtagtattctaaagctttctgacaagataaaggaagtcaccaaaatttctttttttaaattgtatctaatcctcaacaacaaaccaaaacagaacaattaaacagccaaataaaacctcagggacaacatttttggtgtatttgagccctcccagcaagtttcaccttgggtttgtattttaaatgttttacaagaattgtccatgtgcttccctaggctgagctggcattggtctgctgacctgnnnnnnnnnnnnnnnnnnnnnnatacacaacatttatttcaaactattgggagggatgagagtggcttaaaaacttccatccctacttttcaagagtgcagttgattctgaatctgaaagcccgcctctgtcctaaaatacaaacaagcacagacattaaacctggatactatatgataaagagggatgtaactattgaattggatacaaggatcagaatggaaagaaactcacgatgaaattgaacctggtttttgtatatttatcaaacttgtgctgagaatagtgtctgattatacgacttttaagcaaagttgggtgtaattaggtgaaaacagcccaggtcctcccgggagcacagaggggctaggggctggtccttctcgtttgctctagtcttgctttgctgtctggtgtagctcctctgctgctcccatctgcactaattgacccaaaacgtgggtatttcctgctacacaaaagccaaaaggtttcatgtagattttagttcactaaagggtgcccacaaaatagagattaattttaacttaaattttaagcttgaagattaggtactatctgtgaagttacacttcnnnnnnnnnnnaaaggtagagatgtgtgtgtgtgtaggtattaaagatgtgttgttggtttccaaaaaggaacactggaaaataaattttgaatgtttatgttctcagaatcaggttgacagtcccttgctgacatggctttgctttgtgtaaatacagtggatctcaatcttcggggtgtgatgaatagcgaatcatctcaaatccttgagcactcagtctagtgaagatgttgtcattatgtacaatacataactagtttaattaactatgtgatgttaactattattaataaattttaacattttccaa

SEQ ID NO: 184740 - DNA, 1745 bp, Homo Sapiens
tacaaaaaagttgggtatataaaggaagtacagggcctggggaagaggccctgtctaggtagctggcaccaggagccgtgggcaagggaagaggccacaccctgccctgctctgctgcagccagaatgggtgtgaaggcgtctcaaacaggctttgtggtcctggtgctgctccagtgctgctctgcatacaaactggtctgctactacaccagctggtcccagtaccgggaaggcgatgggagctgcttcccagatgcccttgaccgcttcctctgtacccacatcatctacagctttgccaatataagcaacgatcacatcgacacctgggagtggaatgatgtgacgctctacggcatgctcaacacactcaagaacaggaaccccaacctgaagactctcttgtctgtcggaggatggaactttgggtctcaaagattttccaagatagcctccaacacccagagtcgccggactttcatcaagtcagtaccgccatttctgcgcacccatggctttgatgggctggaccttgcctggctctaccctggacggagagacaaacagcattttaccaccctaatcaaggaaatgaaggccgaatttataaaggaagcccagccagggaaaaagcagctcctgctcagcgcagcactgtctgcggggaaggtcaccattgacagcagctatgacattgccaagatatcccaacacctggatttcattagcatcatgacctacgattttcatggagcctggcgtgggaccacaggccatcacagtcccctgttccgaggtcaggaggatgcaagtcctgacagattcagcaacactgactatgctgtggggtacatgttgaggctgggggctcctgccagtaagctggtgatgggcatccccaccttcgggaggagcttcactctggcttcttctgagactggtgttggagccccaatctcaggaccgggaattccaggccggttcaccaaggaggcagggacccttgcctactatgagatctgtgacttcctccgcggagccacagtccatagaatcctcggccagcaggtcccctatgccaccaagggcaaccagtgggtaggatacgacgaccaggaaagcgtcaaaagcaaggtgcagtacctgaaggacaggcagctggcgggcgccatggtatgggccctggacctggatgacttccagggctccttctgcggccaggatctgcgcttccctctcaccaatgccatcaaggatgcactcgctgcaacgtagccctctgttctgcacacagcacgggggccaaggatgccccgtccccctctggctccagctggccgggagcctgatcacctgccctgctgagtcccaggctgagcctcagtctccctcccttggggcctatgcagaggtccacaacacacagatttgagctcagccctggtgggcagagaggtagggatggggctgtggggatagtgaggcatcgcaatgtaagactcgggattagtacacacttgttgattaatggaaatgtttacagatccccaagcctggcaagggaatttcttcaactccctgccccccagccctccttatcaaaggacaccattttggcaagctctatcaccaaggagccaaacatcctacaagacacagtgaccatactaattataccccctgcaaagcccagcttgaaaccttcacttaggaacgtaatcgtgtcccctatcctacttcccc

SEQ ID NO: 184741 - DNA, 2068 bp, Homo Sapiens
  misc_feature (1436)..(1447): n is a, c, g, or t
tggctcgccgctccctctacagaaaacaagtgggccgcggccgggcgcccgctcttccttccgcttgcgctgtgagctgaggcggtgtatgtgccgcgcaataacatgtcaaccccgctgcccgccatcgtgcccgccgcccggaaggccaccgctgcggtgattttcctgcatggattgggagatactgggcacggatgggcagaagcctttgcaggtatcagaagttcacatatcaaatatatctgcccgcatgcgcctgttaggcctgttacattaaatatgaacgtggctatgccttcatggtttgatattattgggctttcaccagattcacaggaggatgaatctgggattaaacaggcagcagaaaatataaaagctttgattgatcaagaagtgaagaatggcattccttctaacagaattattttgggagggttttctcagggaggagctttatctttatatactgcccttaccacacagcagaaactggcaggtgtcactgcactcagttgctggcttccacttcgggcttcctttccacagggtcctatcggtggtgctaatagagatatttctattctccagtgccacggggattgtgaccctttggttcccctgatgtttggttctcttacggtggaaaaactaaaaacattggtgaatccagccaatgtgacctttaaaacctatgaaggtatgatgcacagttcgtgtcaacaggaaatgatggatgtcaagcaattcattgataaactcctacctccaattgattgacgtcactaagaggccttgtgtagaagtacaccagcatcattgtagtagagtgtaaaccttttcccatgcccagtcttcaaatttctaatgttttgcagtgttaaaatgttttgcaaatacatgccaataacacagatcaaataatatctcctcatgagaaatttatgatcttttaagtttctatacatgtattcttataagacgacccaggatctactatattagaatagatgaagcaggtagcttcttttttctcaaatgtaattcagcaaaataatacagtactgccaccagattttttattacatcatttgaaaattagcagtatgcttaatgaaaatttgttcaggtataaatgagcagttaagatataaacaatttatgcatgctgtgacttagtctatggatttattccaaaattgcttagtcaccatgcagtgtctgtatttttatatatgtgttcatatatacataatgattataatacataataagaatgaggtggtattacattattcctaataatagggataatgctgtttattgtcaagaaaaagtaaaatcgttctcttcaattaatggcccttttattttgggaccaggcttttattttccctgatattatttctatttaatactcttttctctcaagnnnnnnnnnnnngtttgttttttctttattgtccttcatagcaggccaagtattgcctctctgcaatagacagctactgtcaatacatgctgtaatttgacattctgggtcacagatataaggtatttaaaatctatttatgctttatagagaaaccagacattaaaacttcatgcactacttatttcgaattactgtaccttatccaaatttacacctagctattaggatcttcaacccaggtaacaggaataattctgtggtttcatttttctgtaaacaactgaaagaataattagatcatattctagtatgttctgaaatatctttaagactgatcttaaaaactaacttctaagatgatttcatcttctcatagtatagagtttactttgtacacgtttgaaaccaactactgtagaagatgaggaatctattgtaattttttgctttattttcatctgccagtggacttatttgaaattttcactttagtcaaattattttttgtattagtttttgatgcagacataaaatagcaatcattttaaatttgtcaaaaattcccagattactggtaaaatttattttgaaaaacaaacttatggggttataaaaggctagtcagaaacc

SEQ ID NO: 184742 - DNA, 903 bp, Homo Sapiens
tcagagggctgtcatggcaggccagtgcacatgccaccaacacatgctgcttcatcagtaatttctggaacatgacactgcacagcggtggcctctccagcgggacattactagtaatacactgatgatgtggagattccccagggggcatccgctgggcttctcccaactcccaagccacctcttcagaatcacagagtcatttaaaggggccccccacctccccggaggtgcggcctagtcatcatactggatctcggcccgcagctccttggtgacgtagttcaccagcatggccagcagctgctgctgcagggcctcgctgcccatgaccagcgcggtcagctgcacggcgtccgtccactccaggtgcctgatgatggctgcggcttcgttaaagagcctctgttgctcggcagggggcagctccattaggatctgaggaaccggcttaaactgtccacttgtcatccaggcacctaacagccccccgacagccccccctagaaaacatggaatcgttcaattagtgggtcttattcataagcgatggccttacttaagttcccactgagtgcacaccaccatcaccatgagcaggcacattcatgagcgggctgcagcgggctcagccggtgccacgcctgctccgccagccagtgtggagggcaaaggtttatgcagtcttctgtccatttggctcagataattgacacccaacatgcattccctgggctccacatttaaggatgcaaaatgaagcctgcctgccccatctcccacctcagtgctgggcccactttcttcttcatgagctgacggaggtttctgggcttactgtaaaaatccctctctaatcacaaaggagaaggctgagaaacaaatgcattttctttttcccaa

SEQ ID NO: 184743 - DNA, 1017 bp, Homo Sapiens
gttggctttaccgaggtggtctgaactgaccccacaatatctccgagatataccgtactttttactaaaaatatttcatttgagaagtaaacctcaagaactaccaggacttttcagatgggaagagcgaggccctggcagggcgagtctaggtgtgcagcttagtgggggcggggtcaagtccactcggtatttgtggcttcactcagcaggccgcccgtcccctccgtggggccattcgacagtccctgggtaggggacggttgcactaggaggtaaacatgattccagcatgggctgctccaaggccctgagaccccaggacctgcaggggggtgggatccagtcctgcagcaggtgctctgaagaggagtcatctcccaagatgagaaggccccggggggaggatgaagtgtggtcagaccgtcggctgagcgtgatcacttccccagacccatgcgggtgagaggactcagcagacgcctccgaagcctgcggcaggcaggcctttactcttcactggggggccagtcagagggctgtcatggcaggccagtgcacatgccaccaacacatgctgcttcatcagtaatttctggaacatgacactgcacagcggtggcctctccagcgggacattactagtaatacactgatgatgtggagattccccagggggcatccgctgggcttctcccaactcccaagccacctcttcagaatcacagagtcatttaaaggggccccccacctccccggaggtgcggcctagtcatcatactggatctcggcccgcagctccttggtgacgtagttcaccagcatggccagcagctgctgctgcagggcctcgctgcccatgaccagcgcagtcagctgcacggcgcccgtccactccaggtgcctgatgatggctgcggcttcgttaaagagcctctgttgctcggcagggggcagctccattaggatctgaggaaccggttttaaactgtccacttgccaacttttttgtacaaa

SEQ ID NO: 184744 - DNA, 886 bp, Homo Sapiens
ttgggatagggccgccatcgccgggcgacgacgaggaggaggcggccgccgcagccggggcccccgccgccgccggagcgacaggtgatttggcttctgcacagttaggaggagcaccaaaccgatgggaggttttgtcagccacacctacaactataaaagatgaagctggtaatctagtccagattccaagtgctgctacttcaagtgggcagtatgttcttccccttcagaatttgcagaatcaacaaatattttccgttgcaccaggatcagattcatcaaatggtacagtgtccagtgttcaatatcaagtgataccacagatccagtcagcagatggtcagcaggttcaaattggtttcacaggctcttcagataatgggggtataaatcaagaaagcagtcaaattcagatcattcctggctctaatcaaaccttacttgcctctggaacaccttctgctaacatccagaatctcataccacagactggtcaagtccaggttcagggagttgcaattggtggttcatcttttcctggtcaaacccaagtagttgctaatgtgcctcttggtctgccaggaaatattacgtttgtaccaatcaatagtgtcgatctagattctttgggactctcgggcagttctcagacaatgactgcaggcattaatgccgacggacatttgataaacacaggacaagctatggatagttcagacaattcagaaaggactggtgagcgggtttctcctgatattaatgaaactaatactgatacagatttatttgtgccaacatcctcttcatcacagttgcctgttacgatagatagtacaggtatattacaacaaaacacaaatagcttgactacatctagtggggc

SEQ ID NO: 184745 - DNA, 1398 bp, Homo Sapiens
tttgacgtagtactgctgcagggccgtgcagcgtgagcttggtctcgtcgtccacaaacacctccatgggctgtgtgagaagggaggtgggaggggcgggcagggatcacctctgggcatctcgcctgcccagaaccttccagtgggcgactcctttgtgcgacacttcccagaggacgtgctgcaccagacctcagtaaacatcgctcaaaagctggatgtaagctctggcccgactcaggtgtggaccaagcttgactcccagtttgacaagaccgaggggaggaaaggaggctccgccggctcccagcatcccagcatcctccgtgccatgtgggccgtgcgggtgtcctggggccccaggctccaggcccctggggaaggccaaagctgccactctcgccctactcacatcctgcatgaacttcctgcacacaggccggatgtccttgctcagggtggcgctgaacatcatgcactgcttctcgtgtggtgtcaggcggaagatctcctgcacatcccgccgcatgtctgtgccagggagccagtggcaccgtgacgagggcagagtgagccgcgggagtggccagtcctggtgcctgaggggctggggggtggccagcgagcgcaggcgcgggaggagctgcaatccacttacacgctggcgcggagcagccgtgcccgtgcgcctcgagccacgcttcagggaggggagcccagctgctccagcatcttgtcacactcgtccagcacaaagtgcttcacattctttaggctgaagctcctattccgcacgagcgccaggatgcggcccggggtccccaccacgacatggggacagttcttcttcaacacttcttcatccttcttgatggagagaccaccgaagaacacagacaccttgacgctgggcatgtacttggaaaagcgctcatattccttgctgatctggaaggccagctccctcgtgtggcacatgaccaggaccgtcacctgtccgttgacaggctcaatctgctgtagggtggccagcacgaagaccgctgtcttgcccatcccggacttggcctggcacaggacgtccatgcccaggatggcctggggaatgcactcatgctggacctcagaaggatgctcaaagccacagtccacgatggcccgcaggagctccggcttcagcagaaagtcccggaagccagagctgtggatggaaacgtaggatcccttgatgtctttcttagggggagctggtgtgctctcttgaggagcctggggctcttcctcttcatcgtaatccaaaagatcgttttccacatcctgttctgccatgatgctggctccccgttcttctccgcgcgctgctaagagacacttccaacttcggttttccgccgccaa

SEQ ID NO: 184746 - DNA, 2109 bp, Homo Sapiens
  misc_feature (1900)..(1912): n is a, c, g, or t
tgagccaccgcacctggccaatactcctttctaagctccgagcatgttggcacatttgatttggtttgctctttctttatctgtaggccatttgatattgggccatcattgaaagaggcctgtctttcttcttcttttctaaaaagcaatctaattgaatgacatgggctctttttttgagagatgatccgtagttccctaacatatttgtgtgtgaagtttaggacaattagctgaggtgtctgagcactagtacctacatttctgaataattttgataagatgaactcgcttaatgattttggagatagaaatgaaagaaaaaatagagctctataggagttagattaaaatatcagtattggatcatgaattattgtgatctccgtaaggattttaggctggttttaatggctatgtgcattttgtatgtatggaaaaaggaaatttctcattgaaactgacttgtcaaatatttctctcaaaaattgtttgcagcattagtgccagcagtagttcccaagggctgtctcagccatccacccagacgactcagtatctgagagcagacacgcccaacaatgcaactcctatcaccagctccttaggttatcctaccttgcggatagagaagaacgacttgagaagtgtcactcttttggaggccaaaggcaaggtgaaggatatagcaatatccagagagaggataactctaaaagatgtactccaagaaggtacttttgggcgtattttccatgggattttaatagatgaaaaagatccaaataaagaaaaacaagcatttgtcaaaacagttaaagatcaagcttctgaaattcaggtgacaatgatgctcactgaaagttgtaagctgcgaggtcttcatcacagaaatcttcttcctattactcatgtgtgtatagaagaaggagaaaagcccatggtgatattgccttacatgaattgggggaatcttaaattgtttttacgacagtgcaagttagtagaggccaataatccacaggcaatttctcagcaagacctggtacacatggctattcagattgcctgtggaatgagctacctggccagaagggaagtcatccacaaagacctggctgccaggaactgtgtcattgatgacacacttcaagttaagatcacagacaatgccctctccagagacttgttccccatggactatcactgtctgggggacaatgaaaacaggccagttcgttggatggctcttgaaagtctggttaataacgagttctctagcgctagtgatgtgtgggcctttggagtgacgctgtgggaactcatgactctgggccagactccctacgtggacattgaccccttcgagatggccgcatacctgaaagatggttaccgaatagcccagccaatcaactgtcctgatgaattatttgctgtgatggcctgttgctgggccttagatccagaggagaggcccaagtttcagcagctggtacagtgcctaacagagtttcatgcagccctgggggcctacgtctgactcctctccaatcccacaccatcaggaagaaggtgcctgtcggggctcacttgaagcctgtcagggatgctttgtatctaacacaacgccaacagaagcacatttgtcttccagaacaccgtgccttagaaatgctttagaatctgaactttttaagacagacttaataatgtggcatattttctagatatcacttttattaggttgaactgaaagggtttttgtaaattttttggccaaaattttttaaaacatacttactttggactaggggtacattcttacaaaataaataaacagtttttaaaattgtttagacacagatatttggaattagctatcttagtgccaactgcnnnnnnnnnnnnnacttcatcaaggtgatgtaagtgactcacctttaaagtttttttagtgttattttttatcactactctgggaaatggtttgtcttcaagatgcaatacttttcttagtaaaggaaaaacagcataaaaagatacctggtctgccttgtacaagaaaaggcaatattagaggaagaaaatttaaagaaaagctagagg

SEQ ID NO: 184747 - DNA, 1035 bp, Homo Sapiens
ttggcgccggctgatcggtcttggcagaactttattatgtgagaaatgaccttattagtcactacgctctatcctttagtctgttagtacccagtgagacaaatttcctgcacttcacctggcatgcgaagtccaaggttgaatataagctgggattccaagtggacaatgttttggcaatggatatgccccaggtcaacatttctgttcagggggaagttccacgcactttatcagtgtttcgggtagagctttcctgtactggcaaagtagattctgaagttatgatactaatgcagctcaacttgacagtaaattcttcaaaaaattttaccgtcttaaattttaaacgaaggaaaatgtgctacaaaaaacttgaagaagtaaaaacttcagccttggacaaaaacactagcagaactatttatgatcctgtacatgcagctccaaccacttctacgcgtgtgttttatattagtgtaggggtttgttgtgcagtaatatttctcgtagcaataatattagctgttttgcaccttcatagtatgaaaaggattgaactggatgacagcattagtgccagcagtagttcccaagggctgtctcagccatccacccagacgactcagtatctgagagcagacacgcccaacaatgcaactcctatcaccagcttttatcctaccttgcggatagagaagaacgacttgagaagtgtcactcttttggaggccaaaggcaaggtgaaggatatagcaatatccagagagaggataactctaaaagatgtactccaagaagtacttttgggcgtattttccatgggattttaatagatgaaaaagatccaaataaagaaaaacaagcatttgtcaaaacagttaaagatcaagcttctgaaattcaagtgacaatgatgctcactgaaagttgtaagctgcgaggtcttcatcacagaaatcttcttcctattactcatgtgtgtatagaagaggagaaaagcccatggtgatattgccttacatgaattggggg

SEQ ID NO: 184748 - DNA, 1442 bp, Homo Sapiens
ggggaaaaacccaagttgataggatcgaagagtcgagataaggattttgatagataagcagcctcatagggttgtagtgagtctttcaaagccttttctggatcataatctggcttttttggtatgaatatatcttgtgcatcatcttccatgtgttgtaggtcaacatagaggtctgtagttccacttgcattaaaattcccttggatatgctgactgtattgttgaagacgcttccataagtcattataaagacgtaataatttagggtattctccttcaaatgcctgcttcaaaaacatcgaagagtttgttgccatatgaaattgagaagaaagtgcctgagtaactgaattccaaaatgtgtagaaaatttccggttgtccatccttaactatttcttcaatgaaacaaacgtgagaaacaggatctctcttcttggccaatactttttgtagatgttgtacctgtccacaaacagcataaatatgatccataagtttctccatattggtccagaatgaggcacgcaaagctgcagtatttcctggggttggcatggtagatcgtccaggtccccctctcacagctgactgggaaggctgagtcaaaacttttatgtctaatgcactgttgatattttcttctaaagtagcacaatatccatccacaacactggtaatagtatccttcaaagttccaagattatagaaaacctgaagagctgttccgacttgagttggattctgagtctccaaaccctgctctagtaggcgcttagcttgattttccacttcaagtcgggctcttgcaataaaaagtagatcattttctatcacttctattccagaaagatctattccttgagaaagataatcaagttcattgagactctgagcagcttttgttatctctctacttcccccttgcagttgtccttggagtctcttactgagattcaagatacgaataatcctccgaagcaaatcacaggcaacctgaagtcttgctagttgtgcagtccgggcaactatcttattgtatggttcaacaatttttgcttttatcctatcaacagctccctgtaaagccccaattctcgtctgcatcatctgaagaacaccttccaacgactcaatcccagttgcttgtgccagtaaatcttcatgtcttgcaacaacctgtaagtgtagttctctgtccaactgactgattccttgggcaagttttgctagttgttcagcaattacagcttgatgaatagattgagaagtataagtctttacatcaaagtcttcgtttaaaaagtcactataacacccgtcctgcagaagttcccggactgtagctgcagccgctccagagcctcgagctccgaggccagctacagcgacgctgccgccgccaccttccatgttggcaggtgccgggttgatgtccaa

SEQ ID NO: 184749 - DNA, 2273 bp, Homo Sapiens
  misc_feature (346)..(414): n is a, c, g, or t
  misc_feature (1791)..(1827): n is a, c, g, or t
  misc_feature (1834)..(1892): n is a, c, g, or t
cagtccccaaggctgtaccactcagtacaaatgtttttgctactgggttatcatcaggaacatgatgtttaccaattcccaggaaatgaaataaaatcaacagaaacatcctgtgacaacagagcacattttcatagaaatgaaatgatgagcttattacagtttgaatcagttcagctattagatctacacataaaacatgaaacaatattaacaaattacatttgtattaagtttttatttaaaaatatttatcacacttttttgtgcaagagttccattgatttctttggttttaaacacgatagatctattttacctaaatatatatagttctatttgtacnnnnnnnnnnnnnnnnnnnnnnnnnnnnnnnnnnnnnnnnnnnnnnnnnnnnnnnnnnnnnnnnnnnnnggcctagcccatttgagaactactgccattattgctttcctatttgaaaaactatcctggaaatcaaggaatgtaccccatagctccctgcagaaagtataaattggttgcacattatcatcatattaatatgaccctaccttcaccaaagctatcctgatcttgtccttaaaaaatgaaacaaagcaaaatagcataaataaataagtttacctaaggggatacaataaatagcctagtatactagataggaataaagaatattgtaacataaagcccttcagtgctgtacaatgcaacaatagctttggattttcaaggtttagagaccttgaaaatccatttcataacagttttattactggtatgcagctgacagaacaagagaatacatttcttttgttctcctcatcttagagtgaatgcacagcagatacaactgtcaattctgccttttgggaatttacctgggcatgtaccattgtcactttttgacctctgcctaattgtagggcaaaatcttaggattaaaaatatccaaatattccttcaattcctagtggtttcttggtctccagaatagttaaaaacagagaggaaattagactcaaaagttttgctgccttcttttctttgcatccatcgcatccagaatgggctgtcttttcgcagtgtatctctgacgaagttcttctatctcccgttccatcatggggtccagtgcttttaaccgcatctgtagttcttctaaacttagatttttcaactagatacagaaagaaagataccaatacaatgaaattatccacattatccacaatcaatacaatgaaattagactttaatgtctaatgagttttaacataaatatttcagcaaattctttacatcatctttgaagtatagttcaacaattaaaacaggaatttcttccttgaagaactcagaggtcatatcttgcaagaacctccagtaatctgcaatgaagcaatccgatcctctgcctttaataaagggcaaatgagaaaaatacgctgatggaatttgtaaaaaggtacaaagacaaatccaccactgccaacaaacagattttcagaatatgttccaggtatattcactctaactttttacatctttgccagctactgagtgctacaataatcatgaacacttgcagagatcactcaagaatgtgacaagactgaataaaggttaaattaaccattctatcctccattttactaaatgcttaataaagaagatgactgtggtagggggcgggaagtaaggctgaataggcctggtggggccccaaaagcaggaagccatgatcaattctggagtaggacagttatgtaagagtaatccagatttggnnnnnnnnnnnnnnnnnnnnnnnnnnnnnnnnnnnnnacacaannnnnnnnnnnnnnnnnnnnnnnnnnnnnnnnnnnnnnnnnnnnnnnnnnnnnnnnnnngtgccactgcacccagctcaggcttggttttaaaatgataaaacttgcaacttactttttgttttaagaagataattgcctttggttattttatgagtcaagctaggaaaaatactcattacttatagtcatccaaagtagcatttctcagcagatccttttactcgccatccctggccctatcgtgacttctgcttccaaaaaccaaattcactcttagctgaaaaagactctgaggatactgaaaagaatgagtcatagactctctgaaggaaattcaaaaaaggagttccaaaaatattttgagaaatgacagtgttatggagaagagtatgcaggcttccatgatgatgactttgaaggtgaatgccactcacccaa

SEQ ID NO: 184750 - DNA, 2721 bp, Homo Sapiens
ttgggtttcataccttgcggaggagggagttggatgaggtggaagtctgaaatgagtggaaaagtcactttagctgtttagtgacatgaaagtattgacgtgtgtggatccctatatgtatattgcaagaggtgtgtagttacctgatacatagggtggccattataatttttaaagtagtaaagttttattaagcataatagggagagaagagaatgatgagatatttgaacaatgcttgaatgcttgattttaacacaacatatatgcccagtgaccacaggacagttggaatgatgtctgtaatttgaggtcctttttttcatcttagatatccctttgttgtttaatatttcaaataaatatagctatgacaaagatctgttgtaggtgctatagagagatggaaaccatcagggtgctgattagtcttaaggaatttgcagttgagtatctgttaggcaagtaaattaaacagcacagagtgtaagtaccatgaaagataccaaacgttgccgagccaccgcacccggcccactcctgacttttaaaaagagacaggaagcaaaaacaaaaccaagcacccaaggtaggtcagatgaagagccagggttagataacaagagcaacatcctttgagactaaaggtttggttgactcccttggagggccctgtgtggaagcggaggagggcgggatggccatacctgcagcactgcatcaccagcgtctggcgttgccagcggttttgtcttatttctgctggctgtgcagagtgactgccagaattgtctcttgcaggctggaggagattgatggattctttgcgagaaataacgaagagtacctggctctgatctttgaaaagggaggctcctacctgggtagagaggtggctctggacctgtcccagcacaaaggcgtggcggtgcgcagggtgctgaacacagaggccaatgtggtgagaaagtttggtgtcaccgacttcccctcttgctacctgctgttccggaatggctctgtctcccgagtccccgtgctcatggaatccagggccttctataccgcttacctgcagagactctctgggctcaccagggaggctgcccagaccacagttgcaccaaccactgctaacaagatagctcccactgtttggaaattggcagatcgctccaagatctacatggctgacctggaatctgcactgcactacatcctgcggatagaagtgggcaggttcccggtcctggaagggcagcgcctggtggccctgaaaaagtttgtggcagtgctggccaagtatttccctggccggcccttagtccagaacttcctgcactccgtgaatgaatggctcaagaggcagaagagaaataaaattccctacagtttctttaaaactgccctggacgacaggaaagagggtgccgttcttgccaagaaggtgaactggattggctgccaggggagtgagccgcatttccggggctttccctgctccctgtgggtcctcttccacttcttgactgtgcaggcagctcggcaaaatgtagaccactcacaggaagcagccaaggccaaggaggtcctcccagccatccgaggctacgtgcactacttcttcggctgccgagactgcgctagccacttcgagcagatggctgctgcctccatgcaccgggtggggagtcccaacgccgctgtcctctggctctggtctagccacaacagggtcaatgctcgccttgcaggtgcccccagcgaggacccccagttccccaaggtgcagtggccaccccgtgaactttgttctgcctgccacaatgaacgcctggatgtgcccgtgtgggacgtggaagccaccctcaacttcctcaaggcccacttctccccaagcaacatcatcctggacttccctgcagctgggtcagctgcccggagggatgtgcagaatgtggcagccgccccagagctggcgatgggagccctggagctggaaagccggaattcaactctggaccctgggaagcctgagatgatgaagtcccccacaaacaccaccccacatgtgccggctgagggacctgaggcaagtcgacccccgaagctgcaccctggcctcagagctgcaccaggccaggagcctcctgagcacatggcagagcttcagaggaatgagcaggagcagccgcttgggcagtggcacttgagcaagcgagacacaggggctgcattgctggctgagtccagggctgagaagaaccgcctctggggccctttggaggtcaggcgcgtgggccgcagctccaagcagctggtcgacatccctgagggccagctggaggcccgagctggacggggccgaggccagtggctgcagcttatttgaagtcctgcctcattctcactggagcctcagtctctcctgcttggtcttggccctcaactggggcaagtgaagccagaggagggtcccccagctgggtgggctggaatggaactcctcactagctgctggggctccgcccaccctgctcccttccggacaatgaagaagcctttgcaccctgggaggatgaccaccccgggccctctatgcctggccagcctccagctcctcagacctcctgggtggggtttggctttcagggtggggtttggaagcttctggaagtcgtgctggtctcccaggtgaggcaagccatggttgctgggctg

SEQ ID NO: 184751 - DNA, 1061 bp, Homo Sapiens
gagcaatgcttttcctataatagccaactttgtacaaaaaagttggctggacggggccgaggccagtggctgcaggtgctgggagggggcttctcttacctggacatcagcctctgtgtggggctctattccctgtccttcatgggcctgctggccatgtacacctacttccaggccaagataagggccctgaagggccatgctggccaccctgcagcctgaaccacctggggaggaggcgggagagggagctgccatctctaggcacctcaagccccctgaccccattccctcccctcccaccccttgctccttgtctggcctagaagtgtgggaaattcaggaaaacgagttgctccagtgaagcttcttggggttgctaggacagagagctcctttgacacaaaagacaggagcagggtccaggttcccctgctgtgcagggagggcagccccgggcagtgggcatagggcagctcagtccctggcctcttagcaccacattcctgtttttcagcttatttgaagtcctgcctcattctcactggagcctcagtctctcctgcttggtcttggccctcaactggggcaagtgaagccagaggagggtcccccagctgggtgggctggaatggaactcctcactagctgctggggctccgcccaccctgctcccttccggacaatgaagaagcctttgcaccctgggaggaaggaccaccccgggccctctatgcctggccagcctccagctcctcagacctcctgggtggggtttggcttcagggtggggtttggaagcttctggaagtcgtgctggtctcccaggtgaggcaagccatggttgctgggctgtagggtgagtggcttgcttggtgggacctgacgagttggtggcatgggaaggatgtgggtctctaatgccttgccctggcttagctgcaggagaagatggttgctttcacttccccccattgagctctgctccctctgagcctggtctttttgtcctttttattttggtctccaagatgaatgctcatctttggaggtgccaggta

SEQ ID NO: 184752 - DNA, 1074 bp, Homo Sapiens
  misc_feature (216)..(228): n is a, c, g, or t
ttggcacagatgaggacattagagagtgaatagcgagaagaaaacctcactctcagcctctggttcttagcatagggcctttttttccatgctaaaacaacctgtggcctttaaattatcagcaacttgaaatgctggaaaattggggttttgccatatcactctgacagttgatgaggaaaggcgatttttcaacattgagacaagagacttcannnnnnnnnnnnnatttcttccaaacagatagaacagttgaaacaaaaagcagataagagagtcagaagtgttcgctataaagtaatagaagattatagtggtgcctgctgccctctgaataaaggaatcaaaaccttcttcacaagtccctgcaccgaagagcctcgaatacagctgcaaaaaggggaattcattttagccacaagaggtttacgatactggttatatggagacaaaattcttgatgattcctttatagaaggtgtttcaagaataaggggttggttccctagaaaatgtgtggaaaagtgtccctgtgatgctgaaacagatcaagccccagagggggagaagaaaaatagatagctgctgttaaaacaaaattatcctttaagtctgcttaattacttgaaaattgtacatattactaaagaattatgcaatgagcctactctggttaagatgttcttttcctcaaaggtgccctagtgccatgatttaaatatttttattaccattttgaaatggagaagccattctgcatatgcctttgaattcctgcccctctttaccacctcttcctccccctcaaaggaaaaacatttcatccaagtaagttaacggcattttctgtaggattttcttatgcactgcacactctggacctcacctgcagatacagttccccccttgccaggagcatctgcatgtggtacttctcttttccctcagttgatatttcttatatgatattctagatactatagaactcaatttgtcagattcagtataacctcagattttgttacctgtcttttaaaaatgcagattttgtcaaatcaaataaagatcaatgga

SEQ ID NO: 184753 - DNA, 1948 bp, Homo Sapiens
tttgtaaagtttgtcggcaaagaagagaggcttgttcttgacactttgaacaatggccacaaatgcatcctgacatccccagacatctcttcttgatggtgtgctccacgtcatagttggtcatcttgatgaactcctggaagactctccgggaggtgcggatagctccgggtacacaggatcgtcatgaaacgtgtctccaaggaagttttgtctccactgggtgtgtctgctatttccaagatctcagcagccacctgggcatcttcccgtgcctggtccaggttttctcctccctcctcacgatgccccgtggccagagaaatgaggatcctcctgaagtggccagatgtgtctgagctcagagcatcctccagggacttgtgatagtcctccttataggcctcattgatggcccggatttcagcattggtccgagtggccaggatttcaataagagccttttcatctgtgccggctccctccatggccttcttcaactgcttggcatcgtaatgggccggtggcatcatgagccccagaatcagccttgccaggtctccagagatctcagacttcaggtcagtcattaagtcccggccaaagtgagacttgaaggtctgccggatctgctgccgctggacattgctgcggtgcgtgatgatatcgatgattgtgtcttcgtcagtcccgagtcccttcatggctttccgcagcgctttggcatctgcgtcagggttgaagtcattggctgggcgcacagttcccttcagctctactcgggccactgcactaagttcccacatctgataggccacctgcgctgcctccgggaagaactggccagcagcatcatcatctcccccagacagcttcagcagagtcttcttgtactcgccagaggtgtcattcttgatcatgctgtagagggacttctcatacttggtccggaagatctcccgaatgtcgagcatgtccaactcactacgggagaccatgatgcggatcagggtgttgtcccgagtccccaggcccttcatagccttgaagagcctttcagcaaaatattccggggtgctccggatacacttcactacggccagcattagcttctcaaagtccccagacagctcccctcggatgctggcttcaatcggcttccctgtggtcttcagatactcatcgaacaccaaccgaagatgctgcttgctgcgatttcccaagatgtaaatgaactgggcttcatctgttccccatttcagttcccctgcctcgtataggtcctggacatcctgttgtaccaggtcctcgctcactacgtcatcctcctccctggttccctggagcaggaccacaagcatcttctggaagtggccagaggtgtcgccgatgatgtcagcctccaggtcccgctcgtaggcatctttgtatgctgccaccagctggtgcatctgctcattggtccgggaagccaagatctcaatgaggcacttctcatcagtgccaatgcccgagatggcatctttaatttctttggcatcacaataggcaggtggcctcatcaggcccacaatcaaccgttcaaacttgcccgtcaattcatactttaaatcagcaatgaggtccttgccgtagagggacttgtagctctggcagacctcctgcctctgcctgttgctccgtgaggtgattatgtccagtatggcctccttgtcactgccaaagcccttcatggcagtgtacagagcctcggcatcctggttggggtcaaagcctgggaagtcatggatggagccccggtacttggcaccctgtgctggtttggccatggtctccggttcgcagcagaatccacgcgcagcggaggcctcgggtcgcagacggacgcacgggcgcagggactcgaggacgcagcgctcgctggatcggagcccgttagcccagccaa

SEQ ID NO: 184754 - DNA, 1067 bp, Homo Sapiens
  misc_feature (905)..(914): n is a, c, g, or t
ttggccccatcgaggtggccattgacgagatgagtaagaaggtggcggagctccggcagctgtgctcctcggccgaggtggacatgatcaaactgcagctcaaactccagggcagcgtgagtgttcaggtcaatgctggcccactagcatatgcgcgagctttcttagatgatacaaacacaaagcgatatcctgacaataaagtgaagctgcttaaggaagttttcaggcaatttgtggaagcttgcggtcaagccttagcggtaaacgaacgtctgattaaagaagaccagctcgagtatcaggaagaaatgaaagccaactacagggaaatggcgaaggagctttctgaaatcatgcatgagcagatctgccccctggaggagaagacgagcgtcttaccgaattcccttcacatcttcaacgccatcagtgggactccaacaagcacaatggttcacgggatgaccagctcgtcttcggtcgtgtgattacatctcatggcccgtgtgtggggacttgctttgtcatttgcaaactcaggatgctttccaaagccaatcactggggagaccgagcacagggaggaccaaggggaaggggagagaaaggaaataaagaacaacgttatttcttaacagactttctataggagttgtaagaaggtgcacatatttttttaaatctcactggcaatattcaaagttttcattgtgtcttaacaaaggtgtggtagacactcttgagctggacttagattttattcttccttgcagagtagtgttagaatagatggcctacagaaaaaaaaggttctgggatctacatggcagggagggctgcactgacattgatgcctgggggaccttttgcctcgaggctgagctggaaaatcttgaaaatannnnnnnnnncctgtggcacattcaggttgaatacaagaactatttttgtgactagtttttgatgacctaagggaactgaccattgtaatttttgtaccagtgaaccaggagatttagtgcttttatattcatttccttgcatttaagaaaatatgaaagctt

SEQ ID NO: 184755 - DNA, 1516 bp, Homo Sapiens
ttgggtcttttttctctcttagaattggaggatttgccattgtccaggaaagaaacttgcagctttaacctgctgggaatggcaaacgattttactagactttatgtttaaaaataaataaataagggaaattcctaactttgccctccaaagtctaactttggttttcttgttaactggttaaagtgacagtatcttttttccttatctattctattcaaaatgacctttgatagaaatgttggcatttagtagaaatagtgataagttgaggaaagaaataatataaattggctttcaagtgagacccaaaggaagaactggataaaatcttccaaatccaaaagcatgagatttttctatccaaatatgcaaaaatgacccaagagaactttcttattttgctactgagtcacacaagggaagtggaaggaagaacagttaatttaagaatgaaactataaatcctgatgcctgggggtcaagtattttaagataagagggggaaaaacacataaagtcaaaacaaatgttttaaaaattcataacagcaaccttgaaaaaatagacttaaatgaatgcttctagaaacttccagcggctcacaaagaataagcctgccttagggctggcaacatctaagcctctaacagcacagggaagcaaatatcttaccaggcagcctatgaattaacccaaagaagctttggttggttttggtggatttttatcatgccatgttggacatgagattttttagatcttccttcccacattgctagacgtctcactcaaagacatttgttgggagtcacatttgcatcatagacgagacagtccattcatcttagttaaattggattgagaatgccttttgtttccaggaaaatattgatcaccatgaaagaagaatagttttttgtccccagagacattcatttagttgatataatcctaccagaaggaaagcactaagaaacactcgtttgttgtttttaaaggcaacagacttaaagttgtcctcagccaaggaaaaatgatactgcaactttaaaatttaaagtatcttgcactgataaatatatttaaaaattatatgtttataaagttattaatttgtaaaggcagtgttacaaaatgttcagtttatattgttttagattgttttgtaatttttaaaggtgtaaaataacatattttttctttatggaaatctataaaactttctgtagtaaaatgttttcattttactggtatattattgcttcatgttttgtaccatcataagattttgtgcagattttttttacagaaattattattttctatgacaatatgacacttgtaaattgttgtttcaaaatgaacagcgaagccttaactttaaatgacatttgtattctcagacactgagtagcataaaaaccacatagaactgaactgtaacttaaattccaaactatgactactacattccaaagaaacagttgaattaaacattttcataaaatatccc

SEQ ID NO: 184756 - DNA, 2880 bp, Homo Sapiens
  misc_feature (1938)..(1957): n is a, c, g, or t
  misc_feature (2687)..(2731): n is a, c, g, or t
ttggcctgttctctttcagggaaacaccaaccccacagatgttgtggttgcagtattccccaaaccactgataactcgatttgtccgaatcaagcctgcaacttgggaaactggcatatctatgagatttgaagtatacggttgcaagataacagattatccttgctctggaatgttgggtatggtgtctggacttatttctgactcccagatcacatcatccaaccaaggggacagaaactggatgcctgaaaacatccgcctggtaaccagtcgctctggctgggcacttccacccgcacctcattcctacatcaatgagtggctccaaatagacctgggggaggagaagatcgtgaggggcatcatcattcagggtgggaagcaccgagagaacaaggtgttcatgaggaagttcaagatcgggtacagcaacaacggctcggactggaagatgatcatggatgacagcaaacgcaaggcgaagtcttttgagggcaacaacaactatgatacacctgagctgcggacttttccagctctctccacgcgattcatcaggatctaccccgagagagccactcatggcggactggggctcagaatggagctgctgggctgtgaagtggaagcccctacagctggaccgaccactcccaacgggaacttggtggatgaatgtgatgacgaccaggccaactgccacagtggaacaggtgatgacttccagctcacaggtggcaccactgtgctggccacagaaaagcccacggtcatagacagcaccatacaatcagagtttccaacatatggttttaactgtgaatttggctggggctctcacaagaccttctgccactgggaacatgacaatcacgtgcagctcaagtggagtgtgttgaccagcaagacgggacccattcaggatcacacaggagatggcaacttcatctattcccaagctgacgaaaatcagaagggcaaagtggctcgcctggtgagccctgtggtttattcccagaactctgcccactgcatgaccttctggtatcacatgtctgggtcccacatcggcacactcagggtcaaactgcgctaccagaagccagaggagtacgatcagctggtctggatggccattggacaccaaggtgaccactggaaggaagggcgtgtcttgctccacaagtctctgaaactttatcaggtgattttcgagggcgaaatcggaaaaggaaaccttggtgggattgctgtggatgacattagtattaataaccacatttcacaagaagattgtgcaaaaccagcagacctggataaaaagaacccagaaattaaaattgatgaaacagggagcacgccaggatacgaaggtgaaggagaaggtgacaagaacatctccaggaagccaggcaatgtgttgaagaccttagaccccatcctcatcaccatcatagccatgagcgccctgggggtcctcctgggggctgtctgtggggtcgtgctgtactgtgcctgttggcataatgggatgtcagaaagaaacttgtctgccctggagaactataactttgaacttgtggatggtgtgaagttgaaaaaagacaaactgaatacacagagtacttattcggaggcatgaaggcagacagagatgaaaagacagtcaaaggacggaagtggaaggacgggagtgagctggggagctgttgatctttcactatacaggctgggaagtgtgttgatgaccactgagccaggcttttctcaggagcttcaatgagtatggccgacagacatggacaaggagctgtgttcaccatcggactcatgtgcagtcagcttttttcctgttggtttcatttgaataatcagatgctggtgttgagaccaagtatgattgacataatcattcatttcgacccctcctgcccnnnnnnnnnnnnnnnnnnnnccctttgtggattctttttggaaactgagcgaaatccaagatgctggcaccaagcgtattccgtgtggccctttggatggacatgctacctgaaacccagtgcccagaatatactagaatcaccgcatttcagtggactcctgaagttgtacttgtgtataattgcccgcgtcgtgcataggcaaagaaggattaggctgttttctttttaaagtactgtagcctcagtactggtgtagtgtgtcagctctgtttacgaagcaatactgtccagttttcttgctgtttttccggtgttgtactaaacctcgtgcttgtgaactccatacagaaaacggtgccatccctgaacacggctggccactgggtatactgctgacaaccgcaacaacaaaaacacaaatccttggcactggctagtctatgtcctctcaagtgcctttttgtttgtactggttcattgtgttacattaacgacccactctgcttcttgctggtgaaagccctgctctttaatcaaactctggtggcccactgactaagaagaaagtttattttcgtgtgagatgccagcccctccgggcaggcaagggctctgaagatttggcaacgtggcttaattgttctgctttttctgtagttcaatttcatgtttcttgacccttttgtataaagctgcaatattctctcttattgttctttcatatggaatgtattttcaaatgtaaannnnnnnnnnnnnnnnnnnnnnnnnnnnnnnnnnnnnnnnnnnnntagaattggaggatttgccattgtccaggaaagaaacttgcagctttaacctgctgggaatggcaaacgattttactagactttatgtttaaaaataaataaataaggaaattcctaactttgccctccaaagtctaactttggttttc

SEQ ID NO: 184757 - DNA, 3724 bp, Homo Sapiens
  misc_feature (3397)..(3409): n is a, c, g, or t
ttgtacaaaaaagttggagattggaactcctacgtaaagggcagtttgctggtggtgggaagcttcctggggctagtggtcctctggtcttccctgaccccgcggccggacgacccaagcccgctgagcaggatgagggaagacagagatgtcaatgaccccatgcccaaccgaggcggcaatggactagctcctggggaggacagattcaaacctgtggtaccatggcctcatgttgaaggagtagaagtggacttagagtctattagaagaataaacaaggccaaaaatgaacaagagcaccatgctggaggagattcccagaaagatttcatgcagaggcagtatctcacatttaagcctcagacattcacctaccatgatcctgtgcttcgcccagggatcctcggtaactttgaacccaaagaacctgagcctcctggagtggttggtggccctggagagaaagccaagccattggttttgggaccagaattcaaacaagcaattcaagccagcattaaagagtttggatttaacatggtggcaagtgacatgatctcactggaccgcagcgtcaatgacttacgccaagaagaatgcaagtattggcattatgatgaaaacttgctcacttcgagcgttgtcattgtcttccataatgaaggatggtcaaccctcatgagaacagtccacagtgtaattaaaaggactccaaggaaatatttagcagaaattgtgttaattgacgatttcagtaataaagaacacttaaaagaaaaactggatgaatatattaagctgtggaatggcctagtgaaggtatttcgaaatgaaagaagggaaggtttaattcaagcacgaagtattggtgctcagaaggctaaacttggacaggttttgatataccttgatgcccactgtgaggtggcagttaactggtatgcaccacttgtagctcccatatctaaggacagaaccatttgcactgtgccgcttatagatgtcataaatggcaacacatatgaaattataccccaagggggtggtgatgaagatgggtatgcccgaggagcatgggattggagtatgctctggaaacgggtgcctctgacccctcaagagaagagactgagaaagacaaaaactgaaccgtatcggtccccagccatggctgggggattatttgccattgaacgagagttcttctttgaattgggtctctatgatccaggtctccagatttggggtggtgaaaactttgagatctcatacaagatatggcagtgtggtggcaaattattatttgttccttgttctcgtgttggacatatctaccgtcttgagggctggcaaggaaatcctccgcccatttatgttgggtcttctccaactctgaagaattatgttagagttgtggaggtttggtgggatgaatataaagactacttctatgctagtcgtcctgaatcgcaggcattaccatatggggatatatcggagctgaaaaaatttcgagaagatcacaactgcaaaagttttaagtggttcatggaagaaatagcttatgatatcacctcacactaccctttgccacccaaaaatgttgactggggagaaatcagaggcttcgaaactgcttactgcattgatagcatgggaaaaacaaatggaggctttgttgaactaggaccctgccacaggatgggagggaatcagcttttcagaatcaatgaagcaaatcaactcatgcagtatgaccagtgtttgacaaagggagctgatggatcaaaagttatgattacacactgtaatctaaatgaatttaaggaatggcagtacttcaagaacctgcacagatttactcatattccttcaggaaagtgtttagatcgctcagaggtcctgcatcaagtattcatctccaattgtgactccagtaaaacgactcaaaaatgggaaatgaataacatccatagtgtttagagagaaaaaaataaaccaataacctacctactgacaagtaaatttatacaggactgaaaaccgcctgaaacctgctgcaactattgttattaactctgtatagctccaaacctggaacctcctgatcagtttgaaggacattgataaactgtgattttacaataacattatcatctgcagttactgtttacaagactgcttttaccttaaactttgtagatgtttacatctttttgttgtgttttaagatgatgttggtaatttgtgcctttagctctgttttattagacagagttaaagcatgttgtcttctttgggattacactcaggggtctgaaaggcagtttgatttttatttttaacacacttgaaaaaaggttggagtagccagactttcatatataacttggtgattatcaacctgttgtgtctttatttaattttacatctttttgaagcactgccacaggttattagccaaggtggccttccttcacagtcatgctgcttttttgaaaggtgaatttcaacacatttagtgcctctttcatttctcagtatatatttcaagagcttgtgatgaaatctataggatggtaatgatggacttgtcacctgtatggggaatacttttactactcagaaatgaatttatgtgctgccatttgctataaagttgaactttgtatggcttgaaaaagaaatgacaatatggaacatcccaaggctgtcccatagggttggaagttgtgtagcattcactcccttacctactggcattcccagtgccctctgtccatacctacttctaggattgcaaaggagtcttccaactagagaaaaattgtccactgacatttgggatttacttttctccaatacctgccaatacagaaaactattatcagttgttattgttatcccttgaaagcgagggtgacaaaaacaacaaaacaccgttataaacacatcaaaggttcattctgactgaggtaagactttccaagcccttgttagattaggccttataaaacttgtgtgcattataacctaagctgtgcaacctgtgaagccaagagtgaactgatgtttcatttatattttcatccaaatgacattatctgcacgtttttaaaatttaaaaacaaaggactatttaaaaatacagtttattaacaaacgtgaactactttctgttacattaggtgttccctagtgtttcttaatttctttttagaaagtgtatttttattagtatttttccggtgaacagaagatttgtttggatttaaacatttactaagacagtacctattaggaaaaccaaatattgcaaatggtcaattcgattttaatttctcaaaagatactctgttatccagaagattaaaatgcctacattgagtgcttnnnnnnnnnnnnncaactgtgatgatgtgagcagaatggcaagtaagttaagcatttttgatcctgtaatcatggtatcattacaatgaaaggaattcacaaactactgccagaggaagtttgttttttaatttaagagggaaatataacctataaatttgtttcttccaagcttagctcttaaatttggagactcaaagttaaacatcctcaacagagttttatttataattttgaattgtcaatttgtattttgctactgatctgtgatcaaccattttaactttcatctctagggatgtttaacatttatagtgcaaaataaacc

SEQ ID NO: 184758 - DNA, 2141 bp, Homo Sapiens
ttgtccccgacgagcactggtatccgtgctgtagatttctttggagctttctacatgagcaacacgacagatgtggagctggctgggctagatggggacaaaacagtgactgtggagttcaagcatgacgatcggctcaatgaagagagcggagctctcctgcagtgtgccctgctttacaccagctgtgcagggcagcgtcggctccgcatccataatctggccctgaactgctgcacccagctggctgatctatatcgaaactgtgagactgacacgctcatcaactacatggccaagtttgcatatcggggagtcctgaatagccctgtgaaggctgttcgtgacacgctcatcacccagtgtgcccagatcctggcctgttacagaaagaactgtgctagcccctcctctgcaggacagttgatccttcctgagtgcatgaagctactcccagtttacctgaactgtgtgttgaagagtgatgtcctgcagcctggagctgaagtcactactgatgaccgtgcctatgtccgacagctagttacctccatggatgtgactgagaccaatgtcttcttctaccctcggctcttacctttgacaaagtctcccgttgagagtactaccgaaccaccagcagttcgagcctctgaagagcgtctaagcaatggggggatatatatttactggagaatgggctcaacctcttcctctgggtgggagcaagcgtccaacagggtgttgtccagagccttttcagcgtctcctccttcagtcagatcaccagtggtttgagtgttctgccagttctggataatccactgtccaagaaggttcgaggcctcattgatagcttacgggcacagagatcccggtacatgaagcttaccgtggtgaaacaggaagacaagatggagatgctgttcaagcacttcctggtggaagacaagagtctgagtgggggagcatcttatgtggactttctctgtcatatgcacaaggagattcggcagctactgagctaaagcaagtgggtaaatggcatagggcccaggctagcttccagaaagcaccccaggatgtcagagaaattgggacagtaacatatcttatgtaagctgacctcagtctctctggggggagggggagatataaggagacaccttctttctgggctcaagtatcctgccactctgtcatgtcctgctgatggaaggtgcccctgttccctcattctaccctctttttcctgctaatcctgtcataatgaatgtagcttctcagttcactgtatatgattcggtattgggggtttggaggcacccagaccctggcaatattatgtgtccctttggaccagtctcccaagaggagaggggcaggcaggaaagagtggggatcctaaggttactacagggggctcagtgtcatccacaacttcctatattagggataaaacatataggtgcacaagagctggggtatagcccatatgtggtggagagaaaagtggtcagtccttcttgggcctggaggttagcagtcaagtttctctgctttcactgctcgctcgctctctcctgcaatgattgatgatcactccggggataaagaggcacactgtcataggtgaccggataactgatttgcaaaatatattaagatctgttagaggtaccagcttcctttccagctggagaggccccaacactggatggttctgtagggagcctagggagcctggtcatcaacttgcaatacctcacacagccagttcacatcccactctgagctcccacgaaaaattctgcttctccaattccggggttgttggggagagaggcagaggcagctggatcgccgttctctcctgctgggacaccgcttgggctttggtattgactgagtggctgacagttctcttccaaccccaactggcttgggggcaggacaacggctaggcttgatggtgggcaggcttgcctgctccccacctgggatgcccctgctctggacctctcatttctcttcattggtttatttttctgtgcatctctaatttgtagagacatgacataccctactatgtaaccattagcctgtgtctcaagctctctggaaagtggccctgccccgga

SEQ ID NO: 184759 - DNA, 1298 bp, Homo Sapiens
ttggctgcagatgtatctttttccctccagtttttcctctagttcttttaggcatttaaattgtttctgttactctgtgcaaaataactttgagattggacaagaagatgttactaaagagaagttcctttaaaaggtcttgttcttgtgtcaaaaagctgcaagtttggtttgttctcgtgtgtgatcatgagtgcacaatgaagaagaccctagatgctgcattttttagctctgaagattccttaggtatccctgaagacagctcgctcagatgatcagcatttagagtgaaaacaagggcccttcatgggtgaacattagaaagagccagggttcaaagctggcgaatggatgacgcaccctagccactggcccctctctgtttcatgtatttccaaaagttgtaaactttgatggctgatttttcgtaagtcaggtttctaagtgagctccctgaggtgccaaggccatggtgtccgccctgctgcgtctgttcgtcagctgagttccttgtgaatctctgttttagggtttggggctagtgtgtttgtgtttccattctaagattgagtctggcagtccctgtttttttgcattggggtaactgctctttgattttttttaattgcagtatttgtgtgattgcaataataaagtttggtttggtttttacagtcatgcgcagggacgatccttgttctctgctgtaaactgtaaaaagtttatggagacttaaagtcttgatgttgtgaagcagaggttattttgtggaaagattaaaaggattttgttggtacctggttttgtgttgtgtatatatacatgaggttgaacagtgaaaggaaagttcagtagtgatgttagaagggtaactatgacaaagatacttttgagataacatttaaaagtactttatattttacataatagcatgtttcattttgattaaaagctaccaaaggaattttgatcatggcataagtgtttaaagcaatattttctggaatataccaagtttatataatttgattttgtgctaaattattaagagtctctttttgaaacatgcgagtttgaaatatgacaccttgtgggtttccatattaaaatcctcactctttaattgtcatttctatctttgaaaatattcatttatgagttccatgatatgtggtctagaaagacgaaacagattttctattttttgtttcttataaattcgttgtgtctaaagattgtttaatattgtaatttagtgtagacttaactttgaataaaattagtttaattgaccc

SEQ ID NO: 184760 - DNA, 3166 bp, Homo Sapiens
  misc_feature (2999)..(3007): n is a, c, g, or t
ttggccaagcccgcggccctggccgccgcgcccgccaagccggggggcgcgggcggctccaagaagctggtcatcaagaacttccgagacagacctcggctgcccgacaactacacgcaggacacgtggcggaagctgcacgaggcggtgcgggccgtgcagagcagcacctccatcaggtacaacctcgaggagctctaccaggctgtggaaaatctctgttctcacaaagtctccccaatgctctacaagcaactgcgtcaggcctgtgaagaccacgtccaggcacagatccttccgtttagagaagactcactagatagtgttttatttttaaagaagattaacacgtgctggcaggaccactgcagacaaatgatcatgatcagaagcatcttcctgttcttggaccgcacctatgtgctgcagaactccacgctgccctccatctgggatatgggattagaactgtttagaacccatattattagtgataaaatggttcagagtaaaaccattgatggaatcctactgctgatcgagcgcgagaggagcggcgaggccgtggaccggagcctgttgcggagcctcctgggcatgctgtctgacctgcaggtgtataaagattcatttgaactgaaatttttggaagagactaattgcttatatgctgccgaaggccaaaggttaatgcaggaaagagaggttccagaatatcttaaccatgtaagtaaacgcttagaggaagagggagacagagtaatcacttacttggaccacagcacacagaaaccactgattgcttgtgtggagaaacagctattaggagaacatttaacagcaattctgcagaaagggctcgaccacttactggatgagaacagagtgccggacctcgcacagatgtaccagctgttcagccgggtgaggggcgggcagcaggcgctgctgcagcactggagcgagtacatcaagacttttggaacagcgatcgtaatcaatcctgagaaagacaaagacatggtccaagacctgttggacttcaaggacaaggtggaccacgtgatcgaggtctgcttccagaagaatgagcggttcgtcaacctgatgaagagtcctttgagacgttcatcaacaagagacccaacaagcctgcagaactgatcgcaaagcatgtggattcaaagttaagagctggcaacaaagaagccacagacgaggagctggagcggacgttggacaagatcatgatcctgttcaggtttatccacggtaaagatgtctttgaagcattttataaaaaagatttggcaaaaagactccttgttgggaaaagtgcctcagtcgatgctgaaaagtctatgttgtcaaagctcaagcatgagtgcggtgcagccttcaccagcaagctggaaggcatgttcaaggacatggagctttcgaaggacatcatggttcatttcaagcagcatatgcagaatcagagtgactcaggccctatagacctcacagtgaacatactcacaatgggctactggccaacatacacgcccatggaagtgcacttaaccccagaaatgattaaacttcaggaagtatttaaggcattttatcttggaaagcacagtggcgaaaacttcagtggcaaactactttgggacatgctgttttaaaagcggagtttaaagaagggaagaaggaattccaggtgtccctcttccagacactggtgctcctcatgttcaacgagggagatggcttcagctttgaggagataaaaatggccacggggatagaggatagtgaattgcgcagaacgctgcagtccctggcctgtggcaaagcacgtgtgctgattaaaagtcccaaaggaaaggaagtggaagatggagacaagttcatttttaatggagagttcaagcacaagttgtttagaataaagatcaatcaaattcagatgaaggaaactgttgaggaacaggttagcaccactgagagagtgtttcaggatagacaatatcagattgatgctgctatcgtcagaataatgaagatgagaaagactcttggtcataatcttctagtttctgaattatataatcagctgaaatttccagtaaagcctggagatttgaaaaagagaattgaatctctgatagacagagactatatggagagagacaaagacaatccgaatcagtaccactacgtggcctgacgcatctgcagacggttccccttcatgaaacactagaatgtaccctcagagcaggaagcacacctgtgccatttctgggactctgattgatccagctgtggacattggaaggcgaaggaagggaggtggctcctgggtcatctttcacaaggctcaagacttcaacctgcagatgtatctttttccctccagtttttcctctagttcttttaggcatttaaattgtttctgttactctgtgcaaaataactttgagattggacaagaagatgttactaaagagaagttcctttaaaaggtcttgttcttgtgtcaaaaagctgcaagtttggtttgttctcgtgtgtgatcatgagtgcacaatgaagaagaccctagatgctgcattttttagctctgaagattccttaggtatccctgaagacagctcgctcagatgatcagcatttagagtgaaaacaagggcccttcatgggtgaacattagaaagagccagggttcaaagctggcgaatggatgacgcaccctagccactggcccctctctgtttcatgtatttccaaaagttgtaaactttgatggctgatttttcgtaagtcaggtttctaagtgagctccctgaggtgccaaggccatggtgtccgccctgctgcgtctgttcgtcagctgagttccttgtgaatctctgttttagggtttggggctagtgtgtttgtgtttccattctaagattgagtctggcagtccctgtttttttgcattggggtaactgctctttgannnnnnnnnaattgcagtatttgtgtgattgcaataataaagtttggtttggtttttacagtcatgcgcagggacgatccttgttctctgctgtaaactgtaaaaagtttatggagacttaaagtcttgatgttgtgaagcagaggttattttgtggaaagattaaaa

SEQ ID NO: 184761 - DNA, 1205 bp, Homo Sapiens
ttggggtgggtgaatggatgaaggagggagggatgggcaggtagatggatagattagtggatggatgggtggatgggctgacaaatggcttgttcccagactgtttgtccttgggtggagtcatgcaggtatctattgcagctgggcctgaactgatatctgaagagagaagtggagacagcgaccagacagatgaggatggagaacctggctcagaggcccaggcccaggcccagccctttggcagcaaaaaaaagcgcctcctctccgtccacgacttcgacttcgagggagactcagatgactccactcagcctcaaggtcactccctgcacctgtcctcagtccctgaggccagggacagcccacagggtctaggtgctggagtgcgcacggaggccgatgtagaggaggaggccctgaggaggaagctggaggagctgaccagcaacgtcagtgaccaggagacctcgtccgaggaggaggaagccaaggacgaaaaggcagagcccaacagggacaaatcagttgggcctctcccccaggcggacccggaggtttcagacattgaatccaggattgcagccctgagggccgcagggctcacggtgaagccctcgggaaagccccggaggaagtcaaacctcccgatatttctccctcgagtggctgggaaacttggcaagagaccagaggacccaaatgcagacccttcaagtgaggccaaggcaatggctgtgccctatcttctgagaagaaagttcagtaattccctgaaaagtcaaggtaaagatgatgattcttttgatcggaaatcagtgtaccgaggctcgctgacacagagaaaccccaacgcgaggaaaggaatggccagccacaccttcgcgaaacctgtggtggcccaccagtcctaacgggacaggacagagagacagagcagccctgcactgttttccctccaccacagccatcctgtccctcattggctctgtgctttccactatacacagtcaccgtcccaatgagaaacaaagaaggagcaccctccacatggactcccacctgcaagtggacagcgacattcagtcctgcactgctcacctgggtttactgatgactcctggctgccccaccgtcctctctgatctgtgaaaaacagctaaagctgctgtgacttccctttaggacatgttgtgtaaatcttt

SEQ ID NO: 184762 - DNA, 1572 bp, Homo Sapiens
  misc_feature (315)..(362): n is a, c, g, or t
ttgggggtggatgagtgggcagctggatggatgggtagatgaatgaaggagagaggcatgggtggtaggtggatggatggatgaataaatggataggtaggtggatgggcagatgggtaggcggataagtaggtagatgggtaggtggatgagtaggtagatggatagatgggccactgattgattgagtggatggatggataaatcgattgatgggtgggtgcatggatgaaggagggaggggtggatgggtgggtgagtggatgagccactgattgattgggtagatggatgtatagatggattgatgatgannnnnnnnnnnnnnnnnnnnnnnnnnnnnnnnnnnnnnnnnnnnnnnntaggtgaatacatggatggatgagccactgattgagtgggtggatgggtggatgaatagatgggtggaggatagataggtgggtgtatgggtgggtggatggattgatgcatggatggatgggctgcccattgagtaggtggatgagtggataaatgggtgtgtgggtaggtgaatagatgaatagattgataaatagggggatgggtggattggtagatgggtagatggagggatacattgctgtgtggataggtgggtgaatggatgaaggagggagggatgggcaggtagatggatagattagtggatggatgggtggatgggctgacaaatggcttgttcccagactgtttgtccttgggtggagtcatgcaggtatctattgcagctgggcctgaactgatatctgaagagagaagtggagacagcgaccagacagatgaggatggagaacctggctcagaggcccaggcccaggcccagccctttggcagcaaaaaaaagcgcctcctctccgtccacgacttcgacttcgagggagactcagatgactccactcagcctcaaggtcactccctgcacctgtcctcagtccctgaggccagggacagcccacagtccctcacagatgagtcctgctcagagaaggcagcccctcacaaggctgagggcctggaggaggctgatactggggcctctgggtgccactcccatccggaagagcagccgaccagcatctcaccttccagacacggcgccctggctgagctctgcccgcctggaggctcccacaggatggccctggggactgctgctgcactcgggtcgaatgtcatcaggaatgagcagctgcccctgcagtacttggccgatgtggacacctctgatgaggaaagcatccgggctcacgtgatggcctcccaccattccaagcggagaggccgggcgtcttctgagagtcagggtctaggtgctggagtgcgcacggaggccgatgtagaggaggaggccctgaggaggaagctggaggagctgaccagcaacgtcagtgaccaggagacctcgtccgaggaggaggaagccaaggacgaaaaggcagagcccaacagggacaaatcagttgggcctctcccccaggcggacccggaggtgggcacggctgcccatcaaaccaacagacaggaaaaaagcccctaggactctgggga

SEQ ID NO: 184763 - DNA, 1424 bp, Homo Sapiens
ttggcaaatgattttcaaaatgccctgcgtagactaatgtttgctgtggaaaagtctataaatagaaagagattgtggaatttcacagaggaggaagtctcagaacgagtgacacttcacatttgtgcttctacaaaaaaaatattttgtcgaacttatgatatccatgatccaaagagttcagcaagaccagcagattggaagtatcaaagtggattatcatcctcatggctttctttagagtgtacagttcacattaatattcacatcccactttctgctacttctgtcagctatactctggagaaaaatacaaagaatggacttacacgctgggccaaggaaatagaaaatggtgtttatttgattaatggacaagttaaagatgaagattgtgacctattagaaggacagaaaaaatcttctagaggaaatactcaagcaactagtcattgttttgatgtcagagtgctaacgcagttgctcctgaattcagaccacagatccacagccacagtccagatatgtagcggttctgtaaaccttaagggtgctgtgaaatgcagagcttatatccacagcagtaaacccaaagttaaagatgctgtgcaggcagtaaagagggatatattgaacacagttgctgatcgttgtgaaatgctatttgaggatctgcttttgaatgaaattccagaaaaaaaagattctgaaaaagagttccacgtcctcccttatcgagtctttgttccccttcctggatccactgtaatgttgtgtgattataaatttgacgatgagtcagctgaagaaatcagggaccattttatggagatgttggatcacacaattcaaatagaagatttggaaattgcagaggaaacaaacacagcttgtatgagttcttctatgaatagtcaagcttcattggacaacacagatgatgaacaaccaaaacaaccaattaaaactacaatgttattgaaaattcagcaaaacataggtgtgattgcagcatttacagttgcagtccttgctgcgggtatctcctttcattacttcagtgattagggtgaggcacaaagagtttcttgatcatccagagaacattgacagacaattatgaataataaagatgttaacaatccatctgtatttaaaacactagcagccagatctgctgccatgatgcctatttggtgtgtttctgattaaaatgaaatcacaagctgccttgtttagcctgctttacattgtaggtggcccgcatttccagaaataacgttatgcatctagatggaagctgcatgtaacaaatcattattatctatttttaaaagcttcaaaatgatgggatatgatcatagattttagtcttactaatctgaatcacatattaatcaggacattaaaaaactttaaaaaga

SEQ ID NO: 184764 - DNA, 703 bp, Homo Sapiens
gccaactttgtacaaaaaagttggctgtgaaatcttcagcagcttatatcctcttttatacttcattgggaccacgagtaactgatgtagccacataaggagacataggttataaactagttatcttttaaaaggctcagcaacacaactcttgaaatgcttatcaggataatggtagctatagctggccatttagaggaattctaggacagtgggagctgtgttactagcactatataattccggtcagtgctgacaaataacatttaacaagtattgcagtaatcatcacttacaggtaccatttatttcaaaacaacttttttagtctgctccaaagttaaaataattaactagctaagcattattattcgactggtctaaaaactattgttatcattttttttccttttcactgttatggccttttcacatttctaaatcccatcttgatatactatgaatactctagaatgatgtaaagcagataggaatgtatgtgtacatatttattgcatacttgcacatcaaatcgatgtacatagtttaacacgtggtccttttgtgaaacctagaactcagaggattgctttttttctttcagcctattttgagtaacttcagtgctttcttagggaaatgacagggcaaagcaatttttctgttggctttgggctgtatttgtgcactaaatctttattct

SEQ ID NO: 184765 - DNA, 1841 bp, Homo Sapiens
  misc_feature (1624)..(1633): n is a, c, g, or t
agcaatgctttctttttaatggccaactttgtacaaaaaagttggcaactcatacccgccaagccacagattcctgctgagcgggatagggaaccttccaaactgaagcgctcctactcctccccagatataacccaggctattcaagaggaagagaagaggaagccaacagtaactccaacagttaatcgggaaaacaagccaacatgttatcctaaagctgagatctcaaggctttctgcttctcagattcggaacctcaatcctgtttttggaggttctggaccagctcttactggacttcgtaacttaggaaatacttgttatatgaactcaatattgcagtgcctatgtaacgctccacatttggctgattatttcaaccgaaactgttatcaggatgatattaacaggtcaaatttgttggggcataaaggtgaagtggcagaagaatttggtataatcatgaaagccctgtggacaggacagtatagatatatcagtccaaaggactttaaaatcaccattgggaagatcaatgaccagtttgcaggatacagtcagcaagattcacaagaattgcttctgttcctaatggatggtctccatgaagatctaaataaagctgataatcggaagagatataaagaagaaaataatgatcatctcgatgactttaaagctgcagaacatgcctggcagaaacacaagcagctcaatgagtctattattgttgcactttttcagggtcaattcaaatctacagtacagtgcctcacatgtcacaaaaagtctaggacatttgaggccttcatgtatttgtctctaccactagcatccacaagtaaatgtacattacaggattgccttagattattttccaaagaagaaaaactcacagataacaacagattttactgcagtcattgcagagctcgacgggattctctaaaaaagatagaaatctggaagttaccacctgtgcttttagtgcatctgaaacgtttttcctacgatggcaggtggaaacaaaaattacagacatctgtggacttcccgttagaaaatcttgacttgtcacagtatgttattggtccaaagaacaatttgaagaaatataatttgttttctgtttcaaatcactacggtgggctggatggaggccactacacagcctattgtaaaaatgcagcaagacaacggtggtttaagtttgatgatcatgaagtttctgatatctccgtttcttctgtgaaatcttcagcagcttatatcctcttttatacttcattgggaccacgagtaactgatgtagccacataaggagacataggttataaactagttatcttttaaaaggctcagcaacacaactcttgaaatgcttatcaggataatggtagctatagctggccatttagaggaattctaggacagtgggagctgtgttactagcactatataattccggtcagtgctgacaaataacatttaacaagtattgcagtaatcatcacttacaggtaccatttatttcaaaacaacttttttagtctgctccaaagttaaaataattaactagctaagcattattattcgactggtctaaaaactattgttatcnnnnnnnnnnccttttcactgttatggccttttcacatttctaaatcccatcttgatatactatgaatactctagaatgatgtaaagcagataggaatgtatgtgtacatatttattgcatactttgcacatcaaatcgatgtacatagtttaacacgtggtccttttgtgaaacctagaactcagaggattgcttttttttctttcagcctattttg

SEQ ID NO: 184766 - DNA, 2473 bp, Homo Sapiens
  misc_feature (1392)..(1672): n is a, c, g, or t
  misc_feature (1674)..(1693): n is a, c, g, or t
cctcagcaaagaggggcaaagaaataacaggagtaaaaagacaaagtaaaagtgaacatgaaacttctgatgccaagaaatctgtagaagatagggggaaaaggtgtccaaccccagaaatacagaaaaagtcaacaggagatgtgccccatacatctgtgacaggggattcaggttcaggcaagccatttaagattaaaggacaaccagaaagtggaattctaaggacaggaacttttagagaggatacagacgataccgaaagaaataaagctcaacgagaacctttgacaagagcacgaagtgaagaaatggggaggatcgtaccaggactgccttcaggctgggccaagtttcttgacccaatcactggaacctttcgttattatcattcacccaccaacactgttcatatgtacccaccggaaatggctccttcatctgcacctccttccacccctccaactcataaagccaagccacagattcctgctgagcgggatagggaaccttccaaactgaagcgctcctactcctccccagatataacccaggctattcaagaggaagagaagaggaagccaacagtaactccaacagttaatcgggaaaacaagccaacatgttatcctaaagctgagatctcaaggctttctgcttctcagattcggaacctcaatcctgtttttggaggttctggaccagctcttactggacttcgtaacttaggaaatacttgttatatgaactcaatattgcagtgcctatgtaacgctccacatttggctgattatttcaaccgaaactgttatcaggatgatattaacaggtcaaatttgttggggcataaaggtgaagtggcagaagaatttggtataatcatgaaagccctgtggacaggacagtatagatatatcagtccaaaggactttaaaatcaccattgggaagatcaatgaccagtttgcaggatacagtcagcaagattcacaagaattgcttctgttcctaatggatggtctccatgaagatctaaataaagctgataatcggaagagatataaagaagaaaataatgatcatctcgatgactttaaagctgcagaacatgcctggcagaaacacaagcagctcaatgagtctattattgttgcactttttcagggtcaattcaaatctacagtacagtgcctcacatgtcacaaaaagtctaggacatttgaggccttcatgtatttgtctctaccactagcatccacaagtaaatgtacattacaggtaagtttaagaagtagagagaaaatgatttattggataaaaatgctgtttttatggatatagagatgtaaatttctggtctttacccttacaaacattttatcagtaaaactcnnnnnnnnnnnnnnnnnnnnnnnnnnnnnnnnnnnnnnnnnnnnnnnnnnnnnnnnnnnnnnnnnnnnnnnnnnnnnnnnnnnnnnnnnnnnnnnnnnnnnnnnnnnnnnnnnnnnnnnnnnnnnnnnnnnnnnnnnnnnnnnnnnnnnnnnnnnnnnnnnnnnnnnnnnnnnnnnnnnnnnnnnnnnnnnnnnnnnnnnnnnnnnnnnnnnnnnnnnnnnnnnnnnnnnnnnnnnnnnnnnnnnnnnnnnnnnnnnnnnnnnnnnnnnnnnnnnnnnnnntnnnnnnnnnnnnnnnnnnnnccttttatcagtaaaactcaatataaattctgttttataattaggcctatgtagattagaaagaattagaaatttcttttttaaagatacctttattaaatattctttcaggatttcaggattgttagtatgtttttaaaaagttttataagttaatttggaaagttgtctgttgactaacttaggcctacttttcataagcatttgctttacatggggatatcaaataaatatcctgttttccatgtatcaacaatgtttcttatataaaagcttgttgatacctttagtcttaaagtacctccagaatgtcatttcctccaacagggtttctctgattgaccaggttaggggctttcctgtgtcctgtcacaacacactgtaggtagcactcaccacactctgtgctgtcattgttcacttgtctatgcttctcactagatcacaagctttgggaaggcaggaactcttttgtgtagattgctgttgaatcactggtgcctgcagagtgactaactaaataggtgctctctgacattattgaagaatcgaattaacgagtatctgctacttgtttttttctgccaggattgccttagattattttccaaagaagaaaaactcacagataacaacagattttactgcagtcattgcagagctcgacgggattctctaaaaaagatagaaatctggaagttaccacctgtgcttttagtgcatctgaacggtaaaggggaaagtttgtcctcctgttcagtgaaattaaatgaggaattt

SEQ ID NO: 184767 - DNA, 2417 bp, Homo Sapiens
ttgtacaaaaaagttggttctaaaccacctaaagagattttaaatttggagtttcatctgaatctaagcccgaagaagttaaaaaagatagtaagaatgataattttaagtttggactttcttctggtttaagcaacccagtttctttaactccatttcaatttggggtatctaatcttggacaggaagaaaagaaagaggaactgcccaaatcttcctctgcaggttttagctttggtacaggtgttattaactccacccctgctcctgctaacaccatagtgacctctgagaacaagagcagcttcaaccttggaaccatagaaaccaatagtgcttcagtggctcctttcacatgtaagacatcagaagctaaaaaagaagaaatgcctgccaccaaaggaggattctcttttggcaacgtggagcctgcctctctgccatctgcctcagtgtttgttttgggaaggacagaagagaaacagcaagagcctgtcacttctacttccctagtttttgggaagaaagctgacaatgaagagccaaagtgtcaaccagtgttttcctttgggaattcagagcaaaccaaagatgagaattcttcaaagtccacatttagttttagtatgacaaaaccatctgagaaggaatctgaacagccagcaaaagccacttttgcctttggagctcaaactagtactacagctgatcaaggtgcagcaaagccagtttttagtttcttgaacaacagttcctctagttcaagtacaccagccacttctgctggtggtggcatatttggtagttccacctcttcctccaatccacctgtggctacctttgtgtttggacagtccagcaatcctgtgagcagctctgcctttggtaacactgctgaatccagcacctctcagtctttgctattttctcaagatagcaaactagcaaccacatccagcacaggtacagctgtcaccccatttgtctttggtccaggagccagcagtaataatactaccacctctggtttcggctttggagccacaaccacatctagctctgcaggatcctcctttgtatttggaactggaccctcagcaccatctgccagtccagcatttggtgctaaccagaccccaacatttggacaaagtcaaggtgccagccagcccaatcccccaggctttggatctatatcatcttccacagcattatttcccactggttctcagcctgcaccacctacttttgggacagtgtcaagcagtagccagccccctgtgtttggacagcaacctagtcagtctgcatttggctctggaacaactcctaattctagttcggctttccagtttggcagcagcactacaaatttcaacttcacaaacaacagtccatcaggagtgttcacatttggtgcaaattctagcacacctgcagcctcagcccagccttcaggctcggggggctttccatttaaccagtctccagcagcatttacagtggggtcaaatgggaaaaatgtgttctcttcttctggaacttcattctctggtcgcaagataaagactgctgttagacgcaggaaataaaggtcacattggtgttgtactcaattttaacaacagctggtgccctgctttcagatactggattgtactttgtgctggggttatctgaagtcagatctgcctaaggacttctttaattttggaattttcctcctttctctttcgttacagaagccccaccctgcctcacccacccttttttaaataaataaatagctagactggtgactgattcttcagcaaaaatattttatgatccagcagattattcactgatttgacatagtctggctgtacccaggaatggagcctgcacggtgaatggctttgtatagaacctctttgtctacaccattatgtgcgctgataagcgttcatggaacgcgttgaaattgtaattatatctgaggaattctgtatagattagaattctgtatagattagagagtgttgaaacggatgatttctatgctgagtttgtgctggtgtatgtgtgaagtgagtgagttgggtgtattgtgcgctaaacttttctgatagaggaagcctgattaaagaatggtccgtgctaaggacttgttagatctagttcactctccatttaataattatatgctatttctatattttcattctcctatcacctgtcttgcctttttcattattttattatgaaacttgtgtaaatacaattttgtttctgtactttttggcataacataaatctgtgaacttgaaatttgaattttgtgttagagatttttttgttgtttgtttagtcttgtctcagattttattatgtaaatcccattattcaaagttgcctaaatccatttggaaatcttt

SEQ ID NO: 184768 - DNA, 1421 bp, Homo Sapiens
ttggctgtgaaacaccgaaacctggaacttgtgtgaagcgagcccttacattgacagtggtttcggaaagtgctgagactatgactgcttcatcttccagctgcactgtaaccactggtaccttaggatttggagataaattcaaaaggcccattggatcttgggagtgttcagtatgctgtgtttctaataatgcagaagacaataagtgtgtgtcctgtatgtctgagaaaccaggaagttcagtacctacttcaagtagcagcactgtacctgtctctctgccttctggaggctctctaggattggaaaagttcaagaaacccgagggaagctgggactgtgaattgtgcctagtgcagaataaggcagactctaccaaatgtttggcatgtgaaagtgcaaagccaggcacaaaatctgggtttaaaggctttgacacatcttcctcatcttcgaactcagcagcctcctcatccttcaaatttggtgtctcatcatcctcttctgggccttctcagactttaacaagcactggaaattttaaatttggagatcagggaggattcaaaataggtgtgtcatctgattctgggtctataaaccccatgagtgaaggctttaaattttctaaaccaataggagattttaaatttggagtttcatctgaatctaagcccgaagaagttaaaaaagatagtaagaatgataattttaagtttggactttcttctggtttaagcaacccagtttctttaactccatttcaatttggggtatctaatcttggacaggaagaaaagaaagaggaactgcccaaatcttcctctgcaggttttagctttggtacaggtgttattaactccacccctgctcctgctaacaccatagtgacctctgagaacaagagcagcttcaaccttggaaccatagaaaccaagagtgcttcagtggctcctttcacatgtaagacatcagaagctaaaaaagaagaaatgcctgccaccaaaggaggattctcttttggcaacgtggagcctgcctctctgccatctgcctcagtgtttgttttgggaaggacagaagagaaacagcaagagcctgtcacttctacttccctagtttttgggaagaaagctgacaatgaagagccaaagtgtcaaccagtgttttcctttgggaattcagagcaaaccaaagatgagaattcttcaagtccacatttagttttagtatgacaaaccatctgaaaggaatctgaacagccagcaaaagccacttttgcctttggagctcaaactagtactacagctgatcaaggtgcagcaaagccagtttttagtttcttgaacacagttcctctagttcaagtacaccagccacttctgctggtggtggcatatttggtagttccacctctt

SEQ ID NO: 184769 - DNA, 3303 bp, Homo Sapiens
actttgtacaaaaaagttggctacatttattccatcatgatggaaatattattgatgctgccagcattgctgcaatcgtggccttatgtcatttccgaagacctgatgtctctgtccaaggagatgaagtaacactgtatacacctgaagagcgtgatcctgtaccattaagtatccaccacatgcccatttgtgtcagttttgcctttttccagcaaggaacatatttattggtggatcccaatgaacgagaagaacgtgtgatggatggcttgctggtgattgccatgaacaaacatcgagagatttgtactatccagtccagtggtgggataatgctactaaaagatcaagttctgagatgcagtaaaatcgctggtgtgaaagtagcagaaattacagagctaatattgaaagctttggagaatgaccaaaaagtaaggaaagaaggtggaaagtttggttttgcagagtctatagcaaatcaaaggatcacagcatttaaaatggaaaaggcccctattgatacctcggatgtagaagaaaaagcagaagaaatcattgctgaagcagaacctccttcagaagttgtttctacacctgtgctatggactcctggaactgcccaaattggagagggagtagaaaactcctggggtgatcttgaagactctgagaaggaagatgatgaaggcggtggtgatcaagctatcattcttgatggtataaaaatggacactggagtagaagtctctgatattggaagccaagatgctcccataatactctcagatagtgaagaagaagaaatgatcattttggaaccagacaagaatccaaagaaaataagaacacagaccaccagtgcaaaacaagaaaaagcaccaagtaaaaagccagtgaaaagaagaaaaaagaagagagctgccaattaaagctaacagttgtatatctgtatatataactattaaaagggatatttattccattctgagaaccctgggtattttttattcacaaatccattataaaatctagcaggattttaaaaatagttttttgtttttaatgtgctttaaaataataaaccttctggagcatttctcgtctgttaatttgcatataagcttcccaccctcttccactcccaacctctgttgagtttacctcgcaaaacctaaacaaacaggttttacaaagagcgaaaaagtctggggaatctctactgtatctatctctgaatactgtattcagatatgcttagattagattatgcccaagtcagcaaattgatccagttgcttaggaaaatgaatgtcagaatttgagggtctgttttcctaaacctactttaattttagaggaaggcttttcacttcccattatatagtaaaccaagtaaacttctttactaagcaaaatcctgaagaagttaaatttgacttgcaaagttttccaaatcaatttattatcctgacagctggcatcattaatactttaacaaaaccacttaaaattagccaaatatctaagacagatacatatacaaaagatatacaaattaaaaccatttaaaaagtaatagataccataatttgtacttggccacaacttctgtattcagaaatgattgtaaaattaaaacctaagttaaaaactgtacaccatatactttgagtgatttacatcttagaaaacaaaggcagtctttcattgttacagatttagtgtctctggtgggttgaggagagaaacaccatgatactttgaatttttgtacttttctcttattgactgttgtgcatgctgtggtgctttgaggtaggtctggtgaaggtccatgagacaaggcttaagactttccagggtatatccagtctttcgtattaatgattcaggccagctttgtcccgtgactgtgtagagtgctaaatgaaaggcagctccagcaataactgatggcaaatacttgaggtatgggtcagcatctatcaaacttaattctcccaaaaacattgctaaactttcaactttgcagtttgcaggctgctgatgcagaaagtattgggtaagaaactgatttactgttggagcagctaagtcaaaagtaaggactttcaaaactagatgctccattctcagaacttgtttcttggtgtaggtatcatctgtaatgtacacaaactctgctacttctggggggtatatttcttcaaactttgaggctaacagcatagcagcagtgcccacaagctgaagttttcctctcagcactgacatggaagacaggaacctatcaatgtagttcacagccaaatgcagggtctcattctgtagtttatattcttctcctacttcaactaaccagtccacgaggatagctctcatactgttagtgatgtctggctgtttcttcatgtaacccactttaggtttacatttaacctccatttccctaaggtatgtgtgaatatcctcatggtagtctggtacttcattaacactcactggcttttcatcttctaatacaattgacatgtccatagtatgtggtgactcaaaactaccatccattggataatcaagagggaccaatggttttctgggtccaggtaaactaatggctgaattaaaagccagggcatcttcacgctctattttttgagattcagctggcttcttctgagcttctttttctgcttcatccacatgaatggtgaacgcaggctgtttactgtttgctttccaaggaggaacggtgacatgctcatcatttacaggaagatccttaaggggtgcaacccgtctcgtcttcggcctctgctgctgcgctagaccccgcgggttcccggacttcagtaccgccagcgcggcccgggtccgcggttgttggacgggcgctgccttttccgggttgatattctcctggtcctcttggagcgccgtctgctgcaatgctagcagcgccgagcccgcctcgcgggtcgcaggccccggcgcagagttgcccaacatcactgctcccgggagtggacggcgggatcagcctgcggcgccaagcagcgtgcactctgcccagccgaccactcgcaccgacccggccaaagaatagtcgtagccgccggtcgcagcccaggccagcctaccagcccgcccgctcgctcacccagctcgagaccacgcagggccgaggaggttgcgaaaggcgcaggcaggcactgcccagcgtggcgagccaaagacccccagagatgcagcgagcagcccgccggagcggcggctgttcttgcagttcaagtccaa

SEQ ID NO: 184770 - DNA, 1175 bp, Homo Sapiens
  misc_feature (216)..(246): n is a, c, g, or t
ttggaacagcttccgggagaagccggaagagaccggaccctgaacagaatcgcagattgccagcccttttcccgacccctacggaaagacgagtccaggggccgtcctggcgaggtcaaaacatttagtctggtcttttcaggtgaggacttccccatccaggcacagtgccggtccaatccccctttaatttcccatgactcctcgcgtcctgannnnnnnnnnnnnnnnnnnnnnnnnnnnnnngaagtttgaggggtgtggacggtttgtgacccccttagccgaccctactcctcactggccgggacaactggtcttatcacggaggctggggccaggcagcccttcggttcgggtgggcccatggaccccagtccaacgccgagggaataggaccatccaaaagcggaaccttcgcctcagaaaaagggtgcgggacccctcctcaccgtgcggtcacggtacggacagggtagatcacaggctgagggacagagcaaagacccctgaggccggacacctggggtcctgccgggcccctccccacgagagttccctgtgtctgtgccaatcgttttcgtctttctttgccgcagtttcttttcctgtaaatcatggttaatgacattaaccttcttaccatcaggggttagttgtggttgtgataaataattactaccgttattaagcaattgcaatttgcagtgtgccaggcactgtgccaagtattttgcttcgatgatttcacgtcatcttcaaaacaacctcatgagggctgggtcagttagaacctaaacaaactagagacctggttgcaacccctcaggctctgctgatgctgtccccctttgttcctgcagcgtggaccctgccagcagccaggccatggagctctctgatgtcaccctcattgagggtgtgggtaatgaggtgatggtggtggcaggtgtggtggtgctgattctagccttggtcctagcttggctctctacctacgtagcagacagcggtagcaaccagctcctgggcgctattgtgtcagcaggcgacacatccgtcctccacctggggcatgtggaccacctggtggcaggccaaggcaaccccgagccaactgaactcccccatccatcagaggcaaatacttccctggacaagaaagccagatgaaa

SEQ ID NO: 184771 - DNA, 1698 bp, Homo Sapiens
ttggggacggtttgtgacccccttagccgaccctactcctcactggccgggacaactggtcttatcacggaggctggggccaggcagcccttcggttcgggtgggcccatggaccccagtccaacgccgagggaataggaccatccaaaagcggaaccttcgcctcagaaaaaggcgtggaccctgccagcagccaggccatggagctctctgatgtcaccctcattgagggtgtgggtaatgaggtgatggtggtggcaggtgtggtggtgctgattctagccttggtcctagcttggctctctacctacgtagcagacagcggtagcaaccagctcctgggcgctattgtgtcagcaggcgacacatccgtcctccacctggggcatgtggaccacctggtggcaggccaaggcaaccccgagccaactgaactcccccatccatcagagggtaatgatgagaaggctgaagaggcgggtgaaggtcggggagactccactggggaggctggagctgggggtggtgttgagcccagccttgagcatctccttgacatccaaggcctgcccaaaagacaagcaggtgcaggcagcagcagtccagaggcccccctgagatctgaggatagcacctgcctccctcccagccctggcctcatcactgtgcggctcaaattcctcaatgataccgaggagctggctgtggctaggccagaggataccgtgggtgccctgaagagcaaatacttccctggacaagaaagccagatgaaactgatctaccagggccgcctgctacaagacccagcccgcacactgcgttctctgaacattaccgacaactgtgtgattcactgccaccgctcacccccagggtcagctgttccaggcccctcagcctccttggccccctcggccactgagccacccagccttggtgtcaatgtgggcagcctcatggtgcctgtctttgtggtgctgttgggtgtggtctggtacttccgaatcaattaccgccaattcttcacagcacctgccactgtctccctggtgggagtcaccgtcttcttcagcttcctagtatttgggatgtatggacgataaggacataggaagaaaatgaaaggcatggtctttctcctttatggcctccccacttttcctggccagagctgggcccaagggccggggagggaggggtggaaaggatgtgatggaaatctcctccataggacacaggaggcaagtatgcggcctccccttctcatccacaggagtacagatgtccctcccgtgcgagcacaactcaggtagaaatgaggatgtcatcttccttcacttttagggtcctctgaaggagttcaaagctgctggccaagctcagtggggagcctgggctctgagattccctcccacctgtggttctgactcttcccagtgtcctgcatgtctgcccccagcacccagggctgcctgcaagggcagctcagcatggccccagcacaactccgtagggagcctggagtatccttccatttctcagccaaatactcatcttttgagactgaaatcacactggcgggaatgaagattgtgccagccttctcttatgggcacctagccgcccttcaccttctttctctaccccttagcaggaatagggtgtcctcccctcctttccaagcactttgcctgc

SEQ ID NO: 184772 - DNA, 1326 bp, Homo Sapiens
  misc_feature (173)..(214): n is a, c, g, or t
ttggctcagaggatgaaaaggtcgttgttgaaccccctgagggagaggagaaagtggaaaaggcagaggtgaaggagagaacagaggaacctatggagacagagcccaaaggtgctgctgatgtagagaaggtggaggaaaagtcagcaatagatctgacccctattgtggtnnnnnnnnnnnnnnnnnnnnnnnnnnnnnnnnnnnnnnnnnnggtgatgcttcagaatggagagacccccaaggacctgaatgatgagaaacagaagaaaaatattaaacaacgtttcatgtttaacattgcagatggtggttttactgagttgcactccctttggcagaatgaagagcgggcagccacagttaccaagaagacttatgagatctggcatcgacggcatgactactggctgctagccggcattataaaccatggctatgcccggtggcaagacatccagaatgacccacgctatgccatcctcaatgagcctttcaagggtgaaatgaaccgtggcaatttcttagagatcaagaataaatttctagctcgaaggtttaagctcttagaacaagctctggtgattgaggaacagctgcgccgggctgcttacttgaacatgtcagaagacccttctcacccttccatggccctcaacacccgctttgctgaggtggagtgtttggcggaaagtcatcagcacctgtccaaggagtcaatggcaggaaacaagccagccaatgcagtcctgcacaaagttctgaaacagctggaagaactgctgagtgacatgaaagctgatgtgactcgactcccagctaccattgcccgaattcccccagttgctgtgaggttacagatgtcagagcgtaacattctcagccgcctggcaaaccgggcacccgaacctaccccacagcaggtagcccagcagcagtgaagatgcagactgataccacctccaccgctgagcagtgaccttcctcactttctcttgtcccagcttctcccctgggggcctgagagaccctcaccttccttctgcccatcttccatgttgtaaaggaacagccccagtgcactgggggaggggagggagtgaggggcagtggtgcccttcctgcagaagagacatgcagcagtagcgctggcgccatctgcaggagctggcgggctggccttctggaccctggcttctccccactgtaacgcctgttacacacaaactgttgtgggttcctgccaggcttgaaaaaatgatctgaaatttttcctcctttgggtttatttgttggttatttgtgtttctttctccttttgggggg

SEQ ID NO: 184773 - DNA, 1644 bp, Homo Sapiens
  misc_feature (491)..(499): n is a, c, g, or t
  misc_feature (832)..(840): n is a, c, g, or t
ttggcatccattcaaagcctacctggacgtagacattactctgtcctcagaagctttccataattacatgaatgctgccatggtgcacatcaacagggccctgaaactcattattcgtctctttctggtagaagatctggttgactccttgaagctggctgtcttcatgtggctgatgacctatgttggtgctgtttttaacggaatcacccttctaattcttgctgaactgctcattttcagtgtcccgattgtctatgagaagtacaagacccagattgatcactatgttggcatcgcccgagatcagaccaagtcaattgttgaaaagatccaagcaaaactccctggaatcgccaaaaaaaaggcagaataagtacatggaaaccagaaatgcaacagttactaaaacaccatttaatagttataacgtcgttacttgtactatgaaggaaaatactcagtgtcagcttgagcctgcattccaagcnnnnnnnnnaatttggtgttttctcccatcctttccctttaaccctcagtatcaagcacaaaaattgatggactgataaaagaactatcttagaactcagaagaagaaagaatcaaattcatagggataagtcaataccttaatggtggtagagcctttacctgtagcttgaaaggggaaagattggaggtaagagagaaaatgaaagaacacctctgggtccttctgtccagttttcagcactagtcttactcagctatccattatagttttgcccttaagaagtcatgattaacttatgaaaaaattatttggggacaggagtgtgataccttccttggnnnnnnnnngcagccctcaaatcctatcttcctgccccacaatgtgagcagctacccctgatactccttttctttaatgatttaactatcaacttgataaataacttataggtgatagtgataattcctgattccaagaatgccatctgataaaaaagaatagaaatggaaagtgggactgagagggagtcagcaggcatgctgcggtggcggtcactccctctgccactatccccagggaaggaaaggctccgccatttgggaaagtggtttctacgtcactggacaccggttctgagcattagtttgagaactcgttcccgaatgtgctttcctccctctcccctgcccacctcaagtttaataaataaggttgtacttttcttactataaaataaatgtctgtaactgctgtgcactgctgtaaacttgttagagaaaaaaataacctgcatgtgggctcctcagttattgagtttttgtgatcctatctcagtctgggggggaacattctcaagaggtgaaatacagaaagcctttttttcttgatcttttcccgagattcaaatctccgattcccatttgggggcaagtttttttcttcaccttcaatatgagaattcagcgaacttgaaagaaaaatcatctgtgagttccttcaggttctcactcatagtcatgatccttcagagggaatatgcactggcgaagtttaagtaagggctatgattttgatgggtcccaagtacggcagcctgccaaagtaatggaagaaattgtctacgtgtcttggaaaaattaatttaggaattt

SEQ ID NO: 184774 - DNA, 1780 bp, Homo Sapiens
  misc_feature (987)..(995): n is a, c, g, or t
  misc_feature (1327)..(1335): n is a, c, g, or t
acaaaaaagttggctgagtcagtcagtctgtcggggtctgtcctcggagcaggcggagtaaagggacttgagcgagccagttgccggattattctatttcccctccctctctcccgccccgtatctcttttcacccttctcccaccctcgctcgcgtagccatggcggagccgtcggcggccactcagtcccattccatctcctcgtcgtccttcggagccgagccgtccgcgcccggcggcggcgggagcccaggagcctgccccgccctggggacgaagagctgcagctcctcctgtgcggtgcacgatctgattttctggagagatgtgaagaagactgggtttgtctttggcaccacgctgatcatgctgctttccctggcagctttcagtgtcatcagtgtggtttcttacctcatcctggctcttctctctgtcaccatcagcttcaggatctacaagtccgtcatccaagctgtacagaagtcagaagaaggccatccattcaaagcctacctggacgtagacattactctgtcctcagaagctttccataattacatgaatgctgccatggtgcacatcaacagggccctgaaactcattattcgtctctttctggtagaagatctggttgactccttgaagctggctgtcttcatgtggctgatgacctatgttggtgctgtttttaacggaatcacccttctaattcttgctgaactgctcattttcagtgtcccgattgtctatgagaagtacaagacccagattgatcactatgttggcatcgcccgagatcagaccaagtcaattgttgaaaagatccaagcaaaactccctggaatcgcccaaaaaaaggcagaataagtacatggaaaccagaaatgcaacagttactaaaacaccatttaatagttataacgtcgttacttgtactatgaaggaaaatactcagtgtcagcttgagcctgcattccaagcnnnnnnnnnaatttggtgttttctcccatcctttccctttaaccctcagtatcaagcacaaaaattgatggactgataaaagaactatcttagaactcagaagaagaaagaatcaaattcataggataagtcaataccttaatggtggtagagcctttacctgtagcttgaaaggggaaagattggaggtaagagagaaaatgaaagaacacctctgggtccttctgtccagttttcagcactagtcttactcagctatccattatagttttgcccttaagaagtcatgattaacttatgaaaaaattatttggggacaggagtgtgataccttccttggnnnnnnnnngcagccctcaaatcctatcttcctgccccacaatgtgagcagctacccctgatactccttttctttaatgatttaactatcaacttgataaataacttataggtgatagtgataattcctgattccaagaatgccatctgataaaaaagaatagaaatggaaagtgggactgagagggagtcagcaggcatgctgcggtggcggtcactccctctgccactatccccagggaaggaaaggctccgccatttgggaaagtggtttctacgtcactggacaccggttctgagcattagtttgagaactcgttcccgaatgtgctttcctccctctcccctgcccacctcaagtttaataaataggttgtacttttcttactataaaataatgtctgtaactgctgtgcactgctgtaaacttgttagagaaaaaaataacctgcatg

SEQ ID NO: 184775 - DNA, 1544 bp, Homo Sapiens
ccaactttgtacaaaaaagttggcatggtggcacccgtgctggagacttctcacgtgttttgctgcccaaaccgggtgcggggagtcctgaactggagctctgggcccagaggacttctggcctttggcacgtcctgctccgtggtgctctatgaccccctgaaaagggttgttgttaccaacttgaatggtcacaccgcccgagtcaattgcatacagtggatttgtaaacaggatggctccccttctactgaattagtttctggaggatctgataatcaagtgattcactgggaaatagaggataatcagcttttaaaagcagtgcatcttcaaggccatgaaggacctgtttatgcggtgcatgctgtttaccagaggaggacatcagatcctgcattatgtacactgatcgtttctgcagctgcagattctgctgttcgactctggtctaaaaagggtccagaagtaatgtgccttcagactttaaactttggaaatggatttgctttggctctctgcttatcttttttgccaaatactgatgtaccaatattagcatgtggcaatgatgattgcagaattcacatatttgctcaacaaaatgatcaggtagagatcttttcctagcaagctgttcacaagattgcctgataagaatatggaagctgtatataaagtcaacatctttagaaactcaggatgacgataacataagactgaaagaaaatacttttaccatagaaaatgaaagtgttaaaatagcatttgctgttactctggagacagtgctagccggtcatgaaaactgggtaaatgcagttcactggcaacctgtgttttacaaagatggtgtcctacagcagccaatgagattattatctgcttccatggataaaaccatgattctctgggctccagatgaagagtcaggagtttggctagaacaggttcgagtaggtgaagtaggtgggaatactttgggattttatgattgccagttcaatgaagatggctccatgatcattgctcatgctttccacggagcgttgcacctttggaaacagaatacagttaacccaagagagtggactccagagattgtcatttcaggacactttgatggtgtccaagacctagtctgggatccagaaggagaatttattatcactgttggtactgatcagacaactagactttttgctccatggaagagaaaagaccaatcacaggtgacttggcatgaaattgcaaggcctcagatacatgggtatgacctgaaatgtttggcaatgattaatcggtttcagtttgtatctggagcagatgaaaaagttcttcgggttttttctgcacctcggaattttgtggaaaatttttgtgccattacaggacaatcactgaatcatgtgctctgtaatcaagatagtgatcttccagaagagccactgtccctgcattgggattatcaaataaagctgtctttcaggagatatagcttctcagccttctgatgaagagagctgttaactagtactggtttt

SEQ ID NO: 184776 - DNA, 1983 bp, Homo Sapiens
  misc_feature (1436)..(1449): n is a, c, g, or t
  misc_feature (1576)..(1670): n is a, c, g, or t
ctttgtacaaaaaagttggtgatggtgtccaaccacctagtctgggatccagaaggagaatttattatcactgttggtactgatcagacaactagactttttgctccatggaagagaaaagaccaatcacaggtgacttggcatgaaattgcaaggcctcagatacatgggtatgacctgaaatgtttggcaatgattaatcggtttcagtttgtatctggagcagatgaaaaagttcttcgggttttttctgcacctcggaattttgtggaaaatttttgtgccattacaggacaatcactgaatcatgtgctctgtaatcaagatagtgatcttccagaaggagccactgtccctgcattgggattatcaaataaagctgtctttcagggagatatagcttctcagccttctgatgaagaggagctgttaactagtactggttttgagtatcagcaggtggcctttcagccctccatacttactgagcctcccactgaggatcatcttctgcagaatactttgtggcctgaagttcaaaaactatatgggcacggttatgaaatattttgtgttacttgtaacagttcaaagactctgcttgcctcagcttgtaaggcagctaagaaagagcatgcagctatcattctttggaacactacatcttggaaacaggtgcagaatttagttttccacagtttgacagtcacgcagatggccttctcacctaatgagaagttcttactagctgtttccagagatcgaacctggtcattgtggaaaaagcaggatacaatctcacctgagttcgagccagtttttagtctttttgccttcaccaacaaaattacttctgtgcacagtagaattatttggtcttgtgattggagtcctgacagcaagtatttcttcactgggagtcgagacaaaaaggtggttgtctggggtgagtgcgactccactgatgactgtattgagcacaacattggcccctgctcctcagtcctggacgtgggtggggctgtgacagctgtcagcgtctgcccagtgctccacccttctcaacgatacgtggttgcagtaggattggagtgtggaaagatttgcttatatacctggaaaaagactgatcaagttccagaaataaatgactggacccactgtgtagaaacaagtcaaagccaaagtcatacactggctatcagaaaattatgctggaagaattgcagtggaaaaactgaacagaaggaagcagaaggtgctgagtggttacactttgcaagctgtggtgaagatcacactgtgaagatacacagagtcaataaatgtgcactgtaatggacttaataactacatgcttgcagtcactggtatcttaaaatattatcatgtaaacaggtcatctttaccttcataactgaattgagtttctgggnnnnnnnnnnnnnngagatggagtcttgctttgtcacaacctccacctcccaggttcaagcgattctctttcttcagcctcctgagtagctgggactagaggcacaccaccatgcccggctaatttttgtatttttagtannnnnnnnnnnnnnnnnnnnnnnnnnnnnnnnnnnnnnnnnnnnnnnnnnnnnnnnnnnnnnnnnnnnnnnnnnnnnnnnnnnnnnnnnnnnnnntgagccactgcgcccagcctgagtttcattttttaagtcacatagcagtagtccttatttcagtgctagaccctttgaaatgcgatgaaagctatatggacccttcgctttgttatataacatatgcacacatacccagaattttgcacatatgttcagagattcctagacctgcagacctgcctctgtgtgtcccaatttaagaacctctgttctttcttcatgactggatttgcccaattttgtgttattttgggacttaatttgtccctctttgggacatttccttatttattgccctcttcagagagta

SEQ ID NO: 184777 - DNA, 1512 bp, Homo Sapiens
  misc_feature (82)..(119): n is a, c, g, or t
  misc_feature (275)..(398): n is a, c, g, or t
  misc_feature (420)..(434): n is a, c, g, or t
ttggctcaccatgcgattgccctgcaacaccttggaactctgcagagagtccccagcaggaaggtctcacctgaggtgaacnnnnnnnnnnnnnnnnnnnnnnnnnnnnnnnnnnnnnnggcaaccatcaaatcaagaaattggcccaaagccctacagtctgcaaacatcataacaattcatcctgaagtttctccatgaattgtgatgctttgctacatcattctgcaatcccagaagattttttgcatatttttttgctattacagaaaaannnnnnnnnnnnnnnnnnnnnnnnnnnnnnnnnnnnnnnnnnnnnnnnnnnnnnnnnnnnnnnnnnnnnnnnnnnnnnnnnnnnnnnnnnnnnnnnnnnnnnnnnnnnnnnnnnnnnnnnnnnnatccttcccatgtttctctctnnnnnnnnnnnnnnntcattcacagctttcaaaagacacgtctgtccttaccttcactttttgttttaaacagcacactcactttactctgaactatacctcacatgcacacgagctttctgctccatctgttcatcccacatgtgtcttcacattcaaagcagcaccttccccaagaccagctacctaaccacctcccacctccaccccatccctagtcagaggaaggcctggttcccacctgaattcagctttgtcaaagagcctcctggaaagctgtcatcttcagttagtagggataatgggattattctatctgtgtaataataacatgttcaatttaaagaaaaaaatctgaagccacttaaaagctactgtttggcaccgatacattattccagtaatgaataatcattaaagatattattctggatgcagttaccatgcagtgatgtgaataaaatgcattagatggaaaattgtatttcaagtaaatatatgcactggtagaaatgtattaccacccactaatatgtattaattcaaaaccaaatgccaactggagttcgcctacacgggtttgaatggcaggcagtgatttggaagtgggaggaaataggtttggatttggtcaaatagactgagaagtgatagtgggggcgggggtttatgactcaaactttaacaggtgagaagactatgccatggacagaacaggcatgaggggctcccctcctacacctctttaagagatttttatctctgactaaggattactggtagttgttgacatttctgaagcagtggatctttttcctttttcactatctgcatcttcaaatattcttttctgaagaaagttaaaaggaagcctgtacattttttgctaaggtaaatgccttgccatcttatttcattttctcatttttttcttcagtgcacaacataagcaactgtcctccttgtcatactcaagatgagcttggcatatctgaaatctgcagggattttctcattagcacagggttccaagcccaaaccgtgaagatggagttttcatttttaaatggcacatcttcaagttcttgccctg

SEQ ID NO: 184778 - DNA, 2171 bp, Homo Sapiens
ctttgtacaaaaaagttggccatgagcctctggcagcccctggtcctggtgctcctggtgctgggctgctgctttgctgcccccagacagcgccagtccacccttgtgctcttccctggagacctgagaaccaatctcaccgacaggcagctggcagaggaatacctgtaccgctatggttacactcgggtggcagagatgcgtggagagtcgaaatctctggggcctgcgctgctgcttctccagaagcaactgtccctgcccgagaccggtgagctggatagcgccacgctgaaggccatgcgaaccccacggtgcggggtcccagacctgggcagattccaaacctttgagggcgacctcaagtggcaccaccacaacatcacctattggatccaaaactactcggaagacttgccgcgggcggtgattgacgacgcctttgcccgcgccttcgcactgtggagcgcggtgacgccgctcaccttcactcgcgtgtacagccgggacgcagacatcgtcatccagtttggtgtcgcggagcacggagacgggtatcccttcgacgggaaggacgggctcctggcacacgcctttcctcctggccccggcattcagggagacgcccatttcgacgatgacgagttgtggtccctgggcaagggcgtcgtggttccaactcggtttggaaacgcagatggcgcggcctgccacttccccttcatcttcgagggccgctcctactctgcctgcaccaccgacggtcgctccgacggcttgccctggtgcagtaccacggccaactacgacaccgacgaccggtttggcttctgccccagcgagagactctacacccaggacggcaatgctgatgggaaaccctgccagtttccattcatcttccaaggccaatcctactccgcctgcaccacggacggtcgctccgacggctaccgctggtgcgccaccaccgccaactacgaccgggacaagctcttcggcttctgcccgacccgagctgactcgacggtgatggggggcaactcggcgggggagctgtgcgtcttccccttcactttcctgggtaaggagtactcgacctgtaccagcgagggccgcggagatgggcgcctctggtgcgctaccacctcgaactttgacagcgacaagaagtggggcttctgcccggaccaaggatacagtttgttcctcgtggcggcgcatgagttcggccacgcgctgggcttagatcattcctcagtgccggaggcgctcatgtaccctatgtaccgcttcactgaggggccccccttgcataaggacgacgtgaatggcatccggcacctctatggtcctcgccctgaacctgagccacggcctccaaccaccaccacaccgcagcccacggctcccccgacggtctgccccaccggaccccccactgtccacccctcagagcgccccacagctggccccacaggtcccccctcagctggccccacaggtccccccactgctggcccttctacggccactactgtgcctttgagtccggtggacgatgcctgcaacgtgaacatcttcgacgccatcgcggagattgggaaccagctgtatttgttcaaggatgggaagtactggcgattctctgagggcagggggagccggccgcagggccccttccttatcgccgacaagtggcccgcgctgccccgcaagctggactcggtctttgaggagccgctctccaagaagcttttcttcttctctgggcgccaggtgtgggtgtacacaggcgcgtcggtgctgggcccgaggcgtctggacaagctgggcctgggcgccgacgtggcccaggtgaccggggccctccggagtggcagggggaagatgctgctgttcagcgggcggcgcctctggaggttcgacgtgaaggcgcagatggtggatccccggagcgccagcgaggtggaccggatgttccccggggtgcctttggacacgcacgacgtcttccagtaccgagagaaagcctatttctgccaggaccgcttctactggcgcgtgagttcccggagtgagttgaaccaggtggaccaagtgggctacgtgacctatgacatcctgcagtgccctgaggactaggttcccgtcctgctttgggcagtgcc

SEQ ID NO: 184779 - DNA, 1975 bp, Homo Sapiens
  misc_feature (1026)..(1042): n is a, c, g, or t
  misc_feature (1613)..(1621): n is a, c, g, or t
ttggtaaaaagattattcatcaggaaactgtgagcaaaaacggaaacggactaaagaacacccccaggtttaaacgaaggagagttcgccgccgtcgaatggaaacgattgtctttttggacaaagaagtctttgccagtcggatttccaacccctcagatgacaacagctgtgaagacttggaagaggaacggagggaagaagaagagaagaccccgccggaaacaaagccagaccccccagtgaacttcctacgccagaaggtcctgagcctccctctgccagatcccctgaaatactacttgctttattacagagaaaaataagtctcctgtttgaaagggggaaataggaagagcagattgctgagtgtgaagttcgtgctgcctgtgtgctgttgaagggtcacctggaggcagacgttgtggggaagggaactgctgggctcatccacaccatggttttcttctagttcctgattgacctctaaaattctattcagttgtatgatttgtttacatagttccacaagaccttcattgcatagaagattgttttcccaaagtggagagaatcttcatagagaaaaagagaaggctgtttctttttcggctctgacgaaacactgaagtctgcgtaagagagactgtttgatgaccgtccctcatgcaacatgcacggtactcactaaaaatgaaaactgaagtggaaactaacctgtgttgcttataaagtgtgaaagcacaagcttataaatgtataaaatcttttctgggtgtgacgcacctgcgtccaagtttgaatttttatgatatgtaccacttaattactggcactgagtatcactgaatttcttagttttctagtggggaaacattattgagaagccctcccttattttaagtaagttgattaaatcttatgtgagttgccagttgtaatttttcaaaggaaaaattttgatggggtggaggaatgaattgccagataatctttctggaattccgagagaattccaaagagggnnnnnnnnnnnnnnnnnaggacatcttttgatacctttaaaagaaccactgtcaagtaatccttaaaagaatatcttggaaaaggaaacagattttttcctgtgtgtaagcaataagtgaagttacatttgccctaaccctagggatgattctttacccagttttaaagcccatcatggtattctaaggtgttgacaccctccatcctcagagcaggtcgaaaatattaaatagactggggactctatgatgggcagcctgtgctttttgacttcaatttgctatttttctgtgatcacattagtactgattcatagattctatcttttataattctggagaaaaagatttgttagttttgtaatttttttgtaagaccaaatgtatgtattttagtagctccattgcatgagaagagtgtaactcacactgacttgtgatatcagccttctctgggccttgtgtgtggagagctttctatcttaccaagtggtagggctaaaagaacaacagcctttttggtagtcacatagcagaatgatcagagttacattgcttattccaaaacattggttctttttaaaacannnnnnnnnacccaaagaaaagaataatagaaattactaacaataaatataaattcagagtgttgatataggattcagtatccagagtttatttttaatcttaatcctcagcttcttgggagttgctgggcttcagtgtctctgtggtttcaccagcttaacttgagctctggttattttggatcttttctgctttttttaagtaactgagtcatttttaccacacagtccagtttgcatgtatagctaggaaacatgtattgctctagattgggcagtttaagtcattttcaaagaaagttagttcatagttgttgactttttactcatagtcaagcttcagtctttcaagagaaatgtgtg

SEQ ID NO: 184780 - DNA, 2092 bp, Homo Sapiens
  misc_feature (1249)..(1257): n is a, c, g, or t
  misc_feature (1828)..(1844): n is a, c, g, or t
aatatttgctgaaagtaaacacatgatgttaataaagaaaaaaggttcttttcttaagattttgaaaagaacatattcaagaattggaatcctacacaggatgcagaagcaatgctaaggataaaatatcctgactacctttattgacatgatttgtgtttaccagctcattaaaatctatgtttcaaattccctggattttcccaagttccagactggtaaaaagtatttttacatacacatttgatgctcacattacaaacttaatatctataaacttgaaacttgttttgcacaagtctatggctttactacttttcaagacaaaagtcacatattaaaatacaaactactcaaaagcaaatagttgtcaagaatgtggtttacaagacagatcttacagataatacagactatattatgatttatctgtttgaaaacagaaagtagtgtattatactgaattctggtataaggtgcgcaggaaactttacttacaatcctttattttcataaggtaaacaccaaagtatttctcacatatattaccaccagattttttttaaaccaaattccggtttaaaaatcacacactgacaacacagaaatacgaaatgctaggaaaagtctagcatatgaaggaaaaacatgtcttatgcattctaatataattttttacaatctagcataaaggcaaatgcggtttttttaaaaatgcagttcatatacaattatagaaaaaacattagtcaagccacctaatataaccaatttcacagatagcactcatttaatataatgtccaaaaatttccaagtaagtgtctacgtatcagttagaataatgcccacaaggatctccaaactacaaaatatcagcaagtaaatgaaaatcacacatttctctttgaaagactgaagcttgactatgagttaaaaggcaacaactatgaactaactttctttaaaatgacttaaactgcccaatctagagcaatacatgtttcctagctatacatgcaaactggactgtgtggtaaaaatgactcagttacttaaaaaaaagcagaaaagatccaaaataaccagagctcaagctaagctggtgaaaccacagagacactgaagcccagcaactcccaagaagctgaggattaagattaaaaataaactctggatactgaatcctatatcaacactctgaatttatatttattgttagtaatttctattattcttttctttgggtnnnnnnnnntgttttaaaaagaaccaatgttttggaataagcaatgtaactctgatcattctgctatgtgactaccaaaaaggctgttgttcttttagccctaccacttggtaagatagaaagctctccacacacaaggcccagagaaggctgatatcacaagtcagtgtgagttacactcttctcatgcaatggagctactaaaatacatacatttggtcttacaaaaaaattacaaaactaacaaatctttttctccagaattataaaagatagaatctatgaatcagtactaatgtgatcacagaaaaatagcaaactgaagtcaaaaagcacaggctgcccatcatagagtccccagtctatttaatattttcgacctgctctgaggatggagggtgtcaacaccttagaataccatgatgggctttaaaactgggtaaagaatcatccctagggttagggcaaatgtaacttcacttattgcttacacacaggaaaaaatctgtttccttttccaagatattcttttaaggattacttgacagtggttcttttaaaggtatcaaaagatgtcctnnnnnnnnnnnnnnnnnccctctttggaattctctcggaattccagaaagattatctggcaattcattcctccaccccatcaaaatttttcctttgaaaaattacaactggcaactcacataagatttaatcaacttacttaaaataagggagggcttctcaataatgtttccccactagaaaactaagaaattcagtgatactcagtgccagtaattaagtggtacatatcataaaaattcaaacttggacgcaggtgcgccaa

SEQ ID NO: 184781 - DNA, 1276 bp, Homo Sapiens
  misc_feature (1003)..(1047): n is a, c, g, or t
ttgggactaccgttggtttccgcaacttcctggattatcctcgccaaggactttgcaatatatttttccgccttttctggaaggatttcgctgcttcccgaaggtcttggacgagcgctctagctctgtgggaaggttttgggctctctggctcggattttgcaatttctccctggggactgccgtggagccgcatccactgtggattataattgcaacatgacgctggaagagctcgtggcgtgcgacaacgcggcgcagaagatgcagacggtgaccgccgcggtggaggagcttttggtggccgctcagcgccaggatcgcctcacagtgggggtgtacgagtcggccaagttgatgaatgtggacccagacagcgtggtcctctgcctcttggccattgacgaggaggaggaggatgacatcgccctgcaaatccacttcacgctcatccagtccttctgctgtgacaacgacatcaacatcgtgcgggtgtcgggcatgcagcgcctggcgcagctcctgggagagccggccgagacccagggcaccaccgaggcccgagacctgcattgtctcctggtcacggtgagtcgggcctctgccctgccccgccacgcccgggcacctgggccggtgtttgtcaacaaagtcaggctgactggtcctgcacagctcagcgctcagccacgtttggcatgtcccgtgggcagccgggctggggcctcctcacccaggaagctattttgagcctgactgttttccccacacaggggccccgggagagggaggctccactaaaccccttcttttccctcctacagaaccctcacacggacgcctggaagagccacggcttggtggaggtggccagctactgcgaagaaagccggggcaacaaccagtgggtcccctacatctctcttcaggaacgctgaggcccttcccagcagcagaatctgttgagttgctgccacaaacaaaaaatacaataaatatttgnnnnnnnnnnnnnnnnnnnnnnnnnnnnnnnnnnnnnnnnnnnnnacgaggaccatcgggggcagagtcgttggagactgaagaggaagaggaggaggagaaggggagtgagcggccgcccccagggcggagatccaggagctggcggccgccgatccgatggagaaggggggacccaggccagcaggagacaggacccccgaagctgaggccttgggatggagcagaagccggagtggccggggcacgctgcccgccttcccatcacggaggg

SEQ ID NO: 184782 - DNA, 1221 bp, Homo Sapiens
  misc_feature (377)..(421): n is a, c, g, or t
caagtcccaaagtggggtttttgttggagggtgcagacaaggaccaaccaagttcaaccaagtctctcgtatgcagacgccagctccagtctcaaggagggtggggcttgcagtcagtctcactccacccccgagtggacagtctggaccctccgtgatggggaaggcggcagcgtgccccgccactccggcttctgctccatcccaaggcctcagcttcgggggtcctgtctcctgctggcctgggtccccccttctccgtcggatcggcggccgccagctcctggatctccgccctgggggcggccgctcactccccttctcctcctcctcttcctcttcagtctccaacgactctgcccccgatggtcctcgtnnnnnnnnnnnnnnnnnnnnnnnnnnnnnnnnnnnnnnnnnnnnnaaatatttattgtattttttgtttgtggcagcaactcaacagattctgctgctgggaagggcctcagcgttcctgaagagagatgtaggggacccactggttgttgccccggctttcttcgcagtagctggccacctccaccaagccgtggctcttccaggcgtccgtgtgagggttcgtgaccaggagacaatgcaggtctcgggcctcggtggtgccctgggtctcggccggctctcccaggagctgcgccaggcgctgcatgcccgacacccgcacgatgttgatgtcgttgtcacagcagaaggactggatgagcgtgaagtggatttgcagggcgatgtcatcctcctcctcctcgtcaatggccaagaggcagaggaccacgctgtctgggtccacattcatcaacttggccgactcgtacacccccactgtgaggcgatcctggcgctgagcggccaccaaaagctcctccaccgcggcggtcaccgtctgcatcctcaggcggcggcagccccggctacttacttctgcgccgcgttgtcgcacgccacgagctcttccagcgtcatgttgcaattataatccacagtggatgcggctccacggcagtccccagggagaaattgcaaaatccgagccagagagcccaaaaccttcccacagagctagagcgctcgtccaagaccttcgggaagcagcgaaatccttccagaaaaggcggaaaaatatattgcaaagtccttggcgaggataatccaggaagttgcgccaacttttttgtacaaagttggcat

SEQ ID NO: 184783 - DNA, 1429 bp, Homo Sapiens
ttggcgaggttcccgagatgaaggtctggctgctgcttggtcttctgctggtgcacgaagcgctggaggatgttactggccaacaccttcccaagaacaagcgtccaaaagaaccaggagagaatagaatcaaacctaccaacaagaaggtgaagcccaaaattcctaaaatgaaggacagggactcagccaattcagcaccaaagacgcagtctatcatgatgcaagtgctggataaaggtcgcttccagaaacccgccgctaccctgagtctgctggcggggcaaactgtagagcttcgatgtaaagggagtagaattgggtggagctaccctgcgtatctggacacctttaaggattctcgcctcagcgtcaagcagaatgagcgctacggccagttgactctggtcaactccacctcggcagacacaggtgaattcagctgctgggtgcagctctgcagcggctacatctgcaggaaggacgaggccaaaacgggctccacctacatcttttttacagagaaaggagaactctttgtaccttctcccagctacttcgatgttgtctacttgaacccggacagacaggctgtggttccttgtcgggtgaccgtgctgtcggccaaagtcacgctccacagggaattcccagccaaggagatcccagccaatggaacggacattgtttatgacatgaagcggggctttgtgtatctgcaacctcattccgagcaccagggtgtggtttactgcagggcggaggccgggggcagatctcagatctccgtcaagtaccagctgctctacgtggcggttcccagtggccctccctcaacaaccatcttggcttcttcaaacaaagtgaaaagtggggacgacatcagtgtgctctgcactgtcctgggggagcccgatgtggaggtggagttcacctggatcttcccagggcagaaggatgaaaggcctgtgacgatccaagacacttggaggttgatccacagaggactgggacacaccacgagaatctcccagagtgtcattacagtggaagactttgagacgattgatgcaggatattacatttgcactgctcagaatcttcaaggacagaccacagtagctaccactgttgagttttcctgacttggaaaaggaaatgtaatgaacttatggaaagcccatttgtgtacacagtcagctttggggttccttttattagtgctttgccagaggctgatgtcaagcaccacaccccaaccccagcgtctcgtgagtccgacccagacatccaaactaaaaggaagtcatccagtctattcacagaagtgttaacttttctaacagaaagcatgattttgattgcttacctacatacgtgttcctagtttttatacatgtgtaaacaattttatatattcaatcatttc

SEQ ID NO: 184784 - DNA, 870 bp, Homo Sapiens
  misc_feature (813)..(838): n is a, c, g, or t
catttatggggaaattttatagtttgcataaacaaagtataaacttaaggcacagtgaataactatattgataaacataaactagccactattggacaagtagcaaaagtaaaattcaagaaacaaaaccttcataagtcactacttccttttgttacaatcataaaattttttgggtaaactctagatactagtacctctagggagacaggattcagaagatcacttttagacacacctatcttcacttgataaccaaataaatatctgtgagtgagaggtactatctcgaatgaagttaaaaacaaattagaaggaaaaggtcaggttagcatgttttagaactattggtaaactataattcatgggacattatataatcaaaagattaatattttaagcactaagttataaagggtttacacccatgaataaaaagattaccatcacttactatgaaccaccattccatgaatccatgtagctgaacactcctaatgaaaagtttaattatccttcaacctgtagttgaagaactcagttcatgttcattgacagatttccattacagacccactatattgatgttactttctttgacactatattttatatagatatattaaaattgaaaacttaatgctgtttagaaggctattaatataactattaatttctgaaagctttgagtttctgaaaaggcttttaggatcaaaatttctgaaacactccacacattcttcctcacccacatttaattataaatcaatgttatactgataaaaggttctatacacacatttagagatatannnnnnnnnnnnnnnnnnnnnnnnnnggtatatatatatccaacttttttgtacaaag

SEQ ID NO: 184785 - DNA, 1229 bp, Homo Sapiens
tttgacttaatattttaagtttttgaattataaggagtctctattgttctttcatttttaattgtatgaatttatgccattgtttgctaatttatgtagaagtcattttcttttatgttggcagatcatttaaatctttattttcttttcttaggcaatttttcacagcaaaagtctttgctaaactccttcatacagattcatatggaagaatttccatcatgcagttctttaattatgtcatgagaaaagtttggcttcatcaaacaagaataggactcagtttatatgatgtcgctgggcaggggtaccttcgggaatctgatttagaaaactacatattggaacttatccctacgttgccacaattagatggtctggaaaaatctttctactccttttatgtttgtacagcagttaggaagttcttcttctttttagatcctttaagaacaggaaagataaaaattcaagatattttagcatgcagcttcctagatgatttattggagctaagggatgaggaactgtccaaggagagtcaagaaacaaattggttttctgctccttctgccctaagagtttatggccagtacttgaatcttgataaagatcacaatggcatgctcagtaaagaagaactctcacgctatggaacagctaccatgaccaatgtcttcttagaccgtgttttccaggagtgtctcacttatgatggagaaatggactataagacctacttggactttgtccttgcattagaaaacagaaaggaacctgcagctctacaatatattttcaaactgcttgatattgagaacaaaggatacctgaatgtcttttcacttaattatttctttagggccatacaggaactaatgaaaatccatggacaagatcctgtttcatttcaagatgtcaaggatgaaatctttgacatggtaaaaccaaaggatcctttgaaaatctctcttcaggatttaatcaacagtaatcaaggagacacagtaaccaccattctaatcgatttgaatggcttctggacttacgagaacagagaggctcttgttgcaaatgacagtgaaaactctgcagaccttgatgatacatgatctctgaaagactagactgtcttatattatgagatacttgaatgctgcatgtaaagcctttaaagcaaaatcctcagaaatggtctaaataaaacacttgatatgcctagagaacac

SEQ ID NO: 184786 - DNA, 2196 bp, Homo Sapiens
ttgggtctttaatagctgtactattcccttcagtacagctttaatagctgtactattcccttctttttcaactccagcctttcgattaccaggcattggtattagatactgtgatgtgtgcagttacttcttgcagtccttcccttgaccttgtggccttgaagttcctggcactcccagttccagattagaagtctgagacccagaggtatgcagactgcccagtgccacacagctaggctgtggcaggcaagggccagccaaagacccttaggtctagagcttctctcctactcatttttgcctaatgcttaggtcagcacacatttatggagcttctgctgtatattaggacttatagagctcctgctgcaaacctagtcactggggagaggtaggaaaagaagattgtcagtgtctttggtaatatcagtatacttagaaaggggaaactggcttggagatgagagaggagggatagttgggagccaagcatatcttggggtatagactggggagctcagtgtgtttttagaagaggtgaatggatggccctctttgctgaggacttggtgaatgtttggagcagggtaagctagcagtagctgggtctttattcagcacttatttgctgtgcatcttgtgcatgggcctctgaaaataaggaactggatatagtcccaggccctgcatttgggggatcaggtccaggagggaactggagacaggaactgagtttctatcaagggggatgtccttgaggcctgcatgtaggggggagtccagcaatgccaccctgcacccagggaagtggggttttgctgaccttgttaactactgttagctcctggtttctcatccacccactttactcctttccagatctcaggatggacccaagctctgccggacatggtggtgtcccacctttttgggaaggaagaaatgcagagtaacgtggaagtggtccacacctaccgccagcacattgtgaatgacatgaaccccggcaacctgcacctgttcatcaatgcctacaacagccggcgcgacctggagattgagcgaccaatgccgggaacccacacagtcaccctgcagtgccctgctctgttggtggttggggacagctcgcctgcagtggatgccgtggtggagtgcaactcaaaattggacccaacaaagaccactctcctcaagatggcggactgtggcggcctcccgcagatctcccagccggccaagctcgctgaggccttcaagtacttcgtgcagggcatgggatacatgccctcggctagcatgacccgcctgatgcggtcccgcacagcctctggttccagcgtcacttctctggatggcacccgcagccgctcccacaccagcgagggcacccgaagccgctcccacaccagcgagggcacccgcagccgctcgcacaccagcgagggggcccacctggacatcacccccaactcgggtgctgctgggaacagcgccgggcccaagtccatggaggtctcctgctaggcggcctgcccagctgccgcccccggactctgatctctgtagtggccccctcctccccggccccttttcgccccctgcctgccatactgcgcctaactcggtattaatccaaagcttattttgtaagagtgagctctggtggagacaaatgaggtctattacgtgggtgccctctccaaaggcggggtggcggtggaccaaaggaaggaagcaagcatctccgcatcgcatcctcttccattaaccagtggccggttgccactctcctcccctccctcagagacaccaaactgccaaaaacaagacgcgtagcagcacacacttcacaaagccaagcctaggccgccctgagcatcctggttcaaacgggtgcctggtcagaaggccagccgcccacttcccgtttcctctttaactgaggagaagctgatccagtttccggaaacaaaatccttttctcatttggggaggggggtaatagtgacatgcacgcacctcttttaaacaggcaaaacagaagggggaaaaggtgggattcatgtcgaggctagaggcatttggaacaacaaatctacgtagttaacttgaagaaaccgatttttaaagttggtgcatctagaaagctttgaatgcagagcaaacaagcttgatttttctagcatcctc

SEQ ID NO: 184787 - DNA, 1192 bp, Homo Sapiens
tttgtacaaaaaagttggcacctggacatcacccccaactcgggtgctgctgggaacagcgccgggcccaagtccatggaggtctcctgctaggcggcctgcccagctgccgcccccggactctgatctctgtagtggccccctcctccccggccccttttcgccccctgcctgccatactgcgcctaactcggtattaatccaaagcttattttgtaagagtgagctctggtggagacaaatgaggtctattacgtgggtgccctctccaaaggcggggtggcggtggaccaaaggaaggaagcaagcatctccgcatcgcatcctcttccattaaccagtggccggttgccactctcctcccctccctcagagacaccaaactgccaaaaacaagacgcgtagcagcacacacttcacaaagccaagcctaggccgccctgagcatcctggttcaaacgggtgcctggtcagaaggccagccgcccacttcccgtttcctctttaactgaggagaagctgatccagtttccggaaacaaaatccttttctcatttggggaggggggtaatagtgacatgcaggcacctcttttaaacaggcaaaacaggaagggggaaaaggtgggattcatgtcgaggctagaggcatttggaacaacaaatctacgtagttaacttgaagaaaccgatttttaaagttggtgcatctagaaagctttgaatgcagaagcaaacaagcttgatttttctagcatcctcttaatgtgcagcaaaagcaggcaacaaaatctcctggctttacagacaaaaatatttcagcaaacgttgggcatcatggtttttgaaggctttagttctgctttctgcctctcctccacagccccaacctcccacccctgatacatgagccagtgattattcttgttcagggagaagatcatttagatttgttttgcattccttagaatggagggcaacattccacagctgccctggctgtgatgagtgtccttgcaggggccggagtaagaagcactggggtgggggcggaattggggttactcgatgtaagggattccttgttgttgtgttgagatccagtgcaggttgtgatttctgtggatcccagcttgggttcaaggaatttgtgtgattggcttaaatccagttttcaatcttcgacagctggg

SEQ ID NO: 184788 - DNA, 1585 bp, Homo Sapiens
ttggcctttaccaacttaggacccattgtcgatatgtgcgtggtggacctggagaggcaggggcaggggcagctggtcacttgctctggggctttcaaggaaggttctttgcggatcatccggaatggaattggaatccacgagcatgccagcattgacttaccaggcatcaaaggattatggccactgcggtctgaccctaatcgtgagactgatgacactttggtgctctcttttgtgggccagacaagagttctcatgttaaatggagaggaggtagaagaaaccgaactgatgggtttcgtggatgatcagcagactttcttctgtggcaacgtggctcatcagcagcttatccagatcacttcagcatcggtgaggttggtctctcaagaacccaaagctctggtcagtgaatggaaggagcctcaggccaagaacatcagtgtggcctcctgcaatagcagccaggtggtggtggctgtaggcagggccctctactatctgcagatccatcctcaggagctccggcagatcagccacacagagatggaacatgaagtggcttgcttggacatcaccccattaggagacagcaatggactgtcccctctttgtgccattggcctctggacggacatctcggctcgtatcttgaagttgccctcttttgaactactgcacaaggagatgctgggtggagagatcattcctcgctccatcctgatgaccacctttgagagtagccattacctcctttgtgccttgggagatggagcgcttttctactttgggctcaacattgagacaggtctgttgagcgaccgtaagaaggtgactttgggcacccagcccaccgtattgaggacttttcgttctctttctaccaccaacgtctttgcttgttctgaccgccccactgtcatctatagcagcaaccacaaattggtcttctcaaatgtcaacctcaaggaagtgaactacatgtgtcccctcaattcagatggctatcctgacagcctggcgctggccaacaatagcaccctcaccattggcaccatcgatgagatccagaagctgcacattcgcacagttcccctctatgagtctccaaggaagatctgctaccaggaagtgtcccagtgtttcggggtcctctccagccgcattgaagtccaagacacgagtgggggcacgacagccttgaggcccagcgctagcacccaggctctgtccagcagtgtaagctccagcaagctgttctccagcagcactgctcctcatgagacctcctttggagaagaggtggaggtgcacaacctacttatcattgaccaacacacctttgaagtgcttcatgcccaccagtttctgcagaatgaatatgccctcagtctggtttcctgcaagctgggcaaagaccccaacacttacttcattgtgggcacagcaatgggtgtatcctgaagaggcagagcccaagcaggtcgcattgtggtctttcagtattcggatggaaaactacagactgtggctgaaaaggaagtgaaaaggccgtgtactctatggtggaatttaacgggaa

SEQ ID NO: 184789 - DNA, 2172 bp, Homo Sapiens
actttgtacaaaaaagttggatcttcctagcattgtgagagctcctatggaaggtttccagctttgaagcaatactctgctttcacgttcctgtgtcagaccaggctacccagtcgagtcctcttgtggagcccacagtcctcatggagctaacttctcaaatgttttccataatactgtttgcgctcatttgcttgccttgcgcacctgctctcttacacacatctggaaaacctccggctctctgtggtggaatacccttctaataaaagggtaaccagaacggcccactctcttttacggaaaaatccctaggctttggagatccgcacttacattagagttatgggaatatacacatattaatgtggctccctttttcttgtgggggaataaaagaggactcctcctcattccctttaacatgggggaaaaaactgacattaaaagatgagactaaatctttatcttgaattttacacaactacttacgacaagggagatgtttagacctgttgtgtatacttcagagtacttttcatgagttcttccacagtgaacccttggattacctggtggctttttctagccagatttgcattaatccttactgagattggatggttttctttcctctattggcgccattcttcagatattaaagttaaaccatccactccctcaccttcagccttcagtgaatgtgctttctagttgtcaggaatgctgaagaattaacactttgactcctaaatgtgatactggtttgtagattcccttagagcagaaaggagaggggcacatattaatttgtatcgcttttgcttctctttggtcttttgtgtcttagaatttggaagtggttcatttctgttgctggtatgaggatttcgaatacttagtaatcgaaaaccatatcctgtaatttaataaaaaaaactaaggacgaaaaaaccctccaattttcccaaatgcaatcagtgtaactaggggctgtgtttctgcattaaaataaatgtttcaggctttgtggtcctgatcaaggtcctcattaaaaaattggagttcaccctaggtgcttttcccctctgtgactggcagataacacatacttttgaaagtaactttgggatttttttcttaggtgcagctcgattctaatcttttcatgctgcacacgattcctttaatgtagcatccttatctgaaagaaataaccatcttctcaacatgacctgcttaacccaaataagaacagtgatcttataacctcattgtttcctaatcattttatttcatctcctgctagtactgtgccgcttccccctccccccacacaaaataaaaacagtatctgccttctggctcatttaatgatgactgcaatctgtacctgcaaatggcgcttccagtactgtgttcagtgatccacatttgtgcttggactggaatgaaaaaatacgcttaattgccaagacaactgcaaatgagttcaatacgacttctcggtgctagttggccatcttgactcaatgttgggatacactaccagagaagatttttttgttgatgtgctgttcaaagtgaattctgaaggaaaaggttgctcacctctgtttcagagcatacccttttaaacctttttagacttgtcctcttctagaattcattataaccccaaagtgtaaaaactatttggaagttgcccctgacaagctattatacatctctggtaaatcctgctgaatgtaagggatattcagagcttttcatacctcatcatgatgttatttaagcagccaacttatgtgacctgatttaaacttttaaaaaatccacttcattcaaactagaaagagtcaaagacaaaggacatttatcagccaagagtgtgacgcattcttcgcatctagtctgtagtagtgtctgtgctctgggatggataccgtctgatgtctgtttgttattgatggcgcagccactgcaaaactagtcaactcccatctataactgttactttttctagtgctgctttgtgctgagagaacattttagtttactgcacttgacctgtaaaagactgattctttgtaattttagggataaattaggtggttaatttaaagaagaaatttcaatgttgcctttacatcacattaaaatataacccaa

SEQ ID NO: 184790 - DNA, 981 bp, Homo Sapiens
ggctgctggaattgaaggtgttggaggtcaggccattgtttggttagactgttgtgggacagccgcacatacagcagcttgggcgccccccggaagtagctatcggggacggtgtagacattgttgtgctccatgtacagctgctcaagagctgagggcagcccatcaggcaccttccgaaggtggttataactcaggtccagcaagatcagtgaccggaggcccctcatggaactgcccacttcctggatctcattgtgttggaggtacaaggccgtgaggttctccagcccctccagagcattgttggggacccgtgagatctggttgtggtcgagatggagctctctcagggatcgaggcaggggaccgggcatccgggtcaggttgttgtggtccaggtacagcctctccaggtgcctcagcttggagaagaccttcctgcccaccttatcactggtgatctggttgccgtggagagcaatccagagcagccctgtggcattgtcaaagacgccttcctggatggaggtgatctggttgttctggaagtacacatacttcatgcgggagggaacgaagggcaggtacttgaggttgcgattgtcacagtacatggccgtggggaagttgggtgggcagtcgcattcctgggggcagtcgcggggatctggaggggatggagagccgtaggtgtaggctggcccttcatccaccccataggggtaaggctcgtaggtctcatacgggtaagggtcatagggatcgtagtaggtggactgctggctgcggaggtagtggaaccaccaatgagggtcatcttcatactgggcctgggagagggagaagagccctgccagcagcaggagggaggtccactgcattttgtctctcaagttgaacttttcagagagtgaccacgtccctctgtctggcctccttgggttggagaacgtgtgagagccaacttttttgtacaaa

SEQ ID NO: 184791 - DNA, 926 bp, Homo Sapiens
ttcccgtccaggcgcagcactgcagcttggagaagtcacgacgtccaccacggtgcagaagctgctgatggagaactcattgatcctattgccttggaggtagaggttctccaggttggtgttgactggggagatcttctgcagctggttgtaggagaggtctagctcaaggaggctgctggaattgaaggtgttggaggccaggccattgttggttagactgttgtgggacagccgcacatacagcagcttgggcgccccccggaagtagctatcggggacggtgtagacattgttgtgctccatgtacagctgctcaagagctgagggcagcccatcaggcaccttccgaaggtggttataactcaggtccagcaagatcagtgaccggaggcccctcatggaactgcccacttcctggatctcattgtgttggaggtacaaggccgtgaggttctccagcccctccagagcattgttggggacccgtgagatctggttgtggtcgagatggagctctctcagggatcgaggcaggggaccgggcatccgggtcaggttgttgtggtccaggtacagcctctccaggtgcctcagcttggagaagaccttcctgggggcagtcgcggggatctggaggggatggagagccgtaggtgtaggctggcccttcatccaccccataggggtaaggctcgtaggtctcatacgggtaagggtcatagggatcgtagtaggtggactgctggctgcggaggtagtggaaccaccaatgagggtcatcttcatactgggcctgggagagggagaagagccctgccagcagcaggagggaggtccactgcattttgtctctcaagttgaacttttcagagagtgaccacgtccctctgtctggcctccttgggttggagaacgtgtgccaa

SEQ ID NO: 184792 - DNA, 1421 bp, Homo Sapiens
  misc_feature (165)..(184): n is a, c, g, or t
ttggctcggcgatgactgtctgccttggtgatgaatctcttcctagggagaagcaggatactttccctcagctgactggtgttctacctgcaagatgtgcagagggcataaaagcaaatcaacactttatagttattcttctgaactaagacatgtcaatattcnnnnnnnnnnnnnnnnnnnnaaaatattgatttgaatgcagtaggcttttttgtataaaattattttattctaaaactgggtcccattattttcttaaacaacagcattttgtatatatggattatgttttagcattttatacagtcaactttgtaatgaactttttaaaaattaattgattttcctttggggttccagataatattttctacagattttgaaaaatgtaataatattaatgcagtattgcaacaggggtgcaatttaaggctatgtgatagagggttatttactcagtgtgtgcagatatttatgaagtggtgaaatttcaagtgtggctcactaggtacttcaggccttcttggactgttgttagaaaagtgatcctctgcttttcttagtaggtcattggtttgatttttggataccactctgctgttctaaaaggactattatattatataattcactttgttttacttttgttccccagatgaaagaactctaagtaaatacattttaaaaaatttttctgacaccctttaatgtggttgcagatctcagatgaaaccaagcttaattatactatgccattatattctaatttattccatttttgaaatcaagttgtatgtgtaccaataaaagagatttctgcttcaaaaggctctcaacatgaaggttaacacagtcaatcaaacttacattcctgccaagatgcatggccaaaaaactaagtatcaaagcagcagaaggtttttgattatagtaactgagatggaattttgtgcctagctcagttctccagatctggctaggagcagtcaatgactaatgttctgtcctagccaaattctcaggacaatttggggagcagaaagagttatggcagaggttccactcatctacaaagtcacagtcacatgccacatttgatctcctaaccctggtgtagtttctttcaagagtgagaactttatttgttgggcagaggctgttccattgagaggaatgtttacagcagtttcaaaaatgacaaagtcagtttggagacagaaaaagacaaaaggtccagtctcatccatctctatatggtacatttgcctcacttatggttgccttaaaggcaagagggaaggtcaccatcagtgaacgcaatgcaatctcaacagtgtattgattcatattctcctagggctcaaactactctctattggttccaggataatgacaaattgaaccatatgtaagtaatc

SEQ ID NO: 184793 - DNA, 3863 bp, Homo Sapiens
  misc_feature (3399)..(3484): n is a, c, g, or t
tttgtacaaaaaagttggctgggacatcgctcgggtacgctccacgccgtcgcagccactgctgtggtcgccggtcggccgaggggccgcgatactggttgcccgcggtgtaagcagaattcgacgtgtatcgctgccgtcaagatggaggggcctttgtccgtgttcggtgaccgcagcactggggaaacgatccgctcccaaaacgttatggctgcagcttcgattgccaatattgtaaaaagttctcttggtccagttggcttggataaaatgttggtggatgatattggtgatgtaaccattactaacgatggtgcaaccatcctgaagttactggaggtagaacatcctgcagctaaagttctttgtgagctggctgatctgcaagacaaagaagttggagatggaactacttcagtggttattattgcagcagaactcctaaaaaatgcagatgaattagtcaaacagaaaattcatcccacatcagttattagtggctatcgacttgcttgcaaggaagcagtgcgttatatcaatgaaaacctaattgttaacacagatgaactgggaagagattgcctgattaatgctgctaagacatccatgtcttccaaaatcattggaataaatggtgatttctttgctaacatggtagtagatgctgtacttgctattaaatacacagacataagaggccagccacgctatccagtcaactctgttaatattttgaaagcccatgggagaagtcaaatggagagtatgctcatcagtggctatgcactcaactgtgtggtgggatcccagggcatgcccaagagaatcgtaaatgcaaaaattgcttgccttgacttcagcctgcaaaaaacaaaaatgaagcttggtgtacaggtggtcattacagaccctgaaaaactggaccaaattagacagagagaatcagatatcaccaaggagagaattcagaagatcctggcaactggtgccaatgttattctaaccactggtggaattgatgatatgtgtctgaagtattttgtggaggctggtgctatggcagttagaagagttttaaaaagggaccttaaacgcattgccaaagcttctggagcaactattctgtcaaccctggccaatttggaaggtgaagaaacttttgaagctgcaatgttgggacaggcagaagaagtggtacaggagagaatttgtgatgatgagctgatcttaatcaaaaatactaaggctcgtacgtctgcatcgattatcttacgtggggcaaatgatttcatgtgtgatgagatggagcgctctttacatgatgcactttgtgtagtgaagagagttttggagtcaaaatctgtggttcccggtgggggtgctgtagaagcagccctttccatataccttgaaaactatgcaaccagcatggggtctcgggaacagcttgcgattgcagagtttgcaagatcacttcttgttattcccaatacactagcagttaatgctgcccaggactccacagatctggttgcaaaattaagagcttttcataatgaggcccaggttaacccagaacgtaaaaatctaaaatggattggtcttgatttgagcaatggtaaacctcgagacaacaaacaagcaggggtgtttgaaacaaccatagttaaagttaagagtttgaaatttgcaacagaagctgcaatcaccattcttcgaattgatgatcttataaattacatccagaaagtaaagatgataaacatggaagttatgaagatgctgttcactctggagccccttaatgattgatctgatgttccttttatttataacaatgttaaatgcaattgtcttgtacttgagttgagtattacacattaaagtaaagtacaagctgtaaacttgggtttttgtgatgtaggaaatggtttccatctgtactttggtcctctgatttcacatattgcaacctagtactttattagtttaaaaagaaattgaggttgttcaaagtttaagcaattcattctctctgaacacacattgctattcccatcccacccccaatgcacagggctgcaacaccacgacttctgcccattctctccagtgtgtgtaacagggtcacaagaattcgacagccagatgctccaagagggtggcccaaggctatagcccctccttcaatattgaccttctctgggtttaatccaagttctttaactattgcagcagagacagctgcaaaggcttcattgatttcaaatatgtcaacatcttccagtgaccaacctgcttttgtaacagcttgctttatggctggaattggtcctattcccataatggaaggctccacacccacttgggaccaggaaactatccgtgctaaaggtgtaagcccacgtttatcagcttctgacttcttcataagaacgacagctgcagcaccatcatttattcctgaagcattggctggggtgactgttcccgttccatcagtaagaaagtaaggctttagcttggacatggcttctatgttgctcccatggcgaggaaactcatctgttttaacttcaataagacctcttctagttgacaccaaaactggtacaatctctttgtcaaaatggccagctttctgtgcattctctgtcctgttctgggacagaactgcaaccttgtcctgatcttctctactcacttgccattttttggctacattttcagctgtaatacccatatgacagttgtgaaatgcatctgtaagaccatcacagagtatactgtcagtcagtggcatctcacctatctttactcctgttctcaagtaagccaagtgaggagccttgctcatattttccatgcctcctgcaaccacaatgctggagtctcctatccctattgactggactgcaaggcacacagcttttaggcctgacccacagatcatctggcagctccatgctggaacagagtagggaattcctgcacccacactggcttgtctaacaggattctgcccacagcctgctgccaagacatgtccaaagatgacctcagacacatcttccggagccacagtggccctcttcaagacttctttgatgacagtggagcccaggtcctggacaggaacagcagctaaggcaccattgaaggaacctatgatggtccgcgccgccgagacgatgaccacaggatctgagcctgcattcatcttgcttctcctgccgccgtctgccctgcgctgcctgcaagctaggcaaagctcctcctcgcagcccacaggcctgccgcgggcgggacctgaggtagccccgcccctcgccctccacctccccgcgcaccacctccccgcgcatcccactgtgcgcaggcgcaaggccggagcannnnnnnnnnnnnnnnnnnnnnnnnnnnnnnnnnnnnnnnnnnnnnnnnnnnnnnnnnnnnnnnnnnnnnnnnnnnnnnnnnnnnnctgggcctgcgggcagaaccgcggacctcggacgcatttacagagcgcctgaaacgccagtgtttctggacaccccaatgttggagttccccgacttgacgttttgggcttttttttaaaaaatcttagggtttctcgaaacagtaaagactggggggtgacaaagacttatctctcgttcagctcaggactggaatcccacgggcgagaatctcgagtgcgagcccggcccgcagcgggtctcagcacagctctgatgggtccttttgctctcggcggcttcgggaggtcctatgcgtttctcctggcgccagtcattcgctcgcgtgaggggcttgctaggagcgtctcggtgcgagccccctgccttctaagccaa

SEQ ID NO: 184794 - DNA, 1397 bp, Homo Sapiens
  misc_feature (804)..(973): n is a, c, g, or t
ctttgtacaaaaaagttgggctctggtcacccacaccaacaccaaatccatcagcaaattctactggacaatcctcccttttagtagcagagttgaccgccttttcccattgcatgataggtttctttccctcattctgcctagtgtgtaagttttctatttccccagtacttttagccaaccttaccaagtggtgtgtaaactagtatgtatgtgctttgcttactttttaaaaaaatgtagttagactgtgaggagttactttatgtacgttgcatattcaaactgtgatgttttatccttcaaaacaatctgcattaagaagatattgtgccctactagacagctttcattcactttattactctctcatatatgctgtgagaagttgtaatattaattggcctctttgggtgggactctaagcagtatttgcagaaatatgcttctggtccaacttgtacatccagaacaaaagggcccctctagtagctgtgtgctggattattcaggactgattaactcaagttgctcattgaatcacatcatccactttatcccagaaactagaactgtgagaaaccaggtttagaagacagtcacagaacagcacacatccaaattcagcgccattgaaagttggcctaaggctcagtgccactcacccctccctccccaaaagacaagagaaatttggccagatggggaaggtcactggaaattgaggccaaagggctgatcagaattgcctttataatatatttgatggatgcctataaatgtgggttttgcaaatattgtttnnnnnnnnnnnnnnnnnnnnnnnnnnnnnnnnnnnnnnnnnnnnnnnnnnnnnnnnnnnnnnnnnnnnnnnnnnnnnnnnnnnnnnnnnnnnnnnnnnnnnnnnnnnnnnnnnnnnnnnnnnnnnnnnnnnnnnnnnnnnnnnnnnnnnnnnnnnnnnnnnnnnnnnnnnacaaaacttgaagtttgaaacccccagcttgctgaggagccctttttatttttggtactgagagtctcaaggtcccatagctacatggtacagggctgttgtctgcttgctgcacagcagaaattacaccatccacaggaaatggactatttttgcagtccaacatcagccaaccacacacagccgtgtttggaagctgaagagtaaagaaatttctaggaatggctgttgttctgtttttttagcacagccatttagatataacatccttcacttaaaaattaaaaacatcagtactaccaccaccaccaacaacatcaacacagatcttcacatctgcccattctgtggttagtcaatggcttgcaataaaatgtgcaaactgcatctataggaaacatttttgtgattacggaatacttta

SEQ ID NO: 184795 - DNA, 3614 bp, Homo Sapiens
  misc_feature (1685)..(1743): n is a, c, g, or t
  misc_feature (2080)..(2114): n is a, c, g, or t
  misc_feature (2159)..(2172): n is a, c, g, or t
ttggcaaaaacgtttggtggatagcccacactactttgcctctagttgtaccaaattttcttaccattaaaaggactgtgaattggagaatcaagaggcacatgagcaagatggaaatgatgaactaaaggactctgaagaatttggtgaaaatgaagaagaaaatgtgcattccaaggagttactctctgcagaagaaaacaagagagctcatgaattaatagaggcagaaggaatagaagatatagaaaaagaggacatcgaaagtcaggtctttagccagttttttttaaaacatgacacagataaattaagttttaaataataaaaagtatttttttctagttcaatttggaagtctcagaatttttaaaagatgtgttactaaagctacttataagtcatctaaaatcctaccaccttaggcaaccttttaaatttttgcttatttcatataatatatatttatacatagttgttatagagtaagttcctatttattctgtattttcacatgacgtataatttcataatttccccataatttattagactgctttctacatatctaatagacactcctttaattttggacattttaagttttaaggcttttttcctactccacgatgaatgaatgtaccaatttcattctggcattgccaacattacttggtggtagggttttttcccctttctgctaccttagcaagtataaaaggttactttaatttacatttctttggttatatcaagggtggggaattacttatgaaagtttaattttaaagcagataatatttcaaatattttctttgaaatagaccatttgtcctgccttgaagtatgttagtacattttaagaaagtcagtgggttaaggagtcagtgctgttagtattcatgcttaaaacacttcccttctacctaccctaataaatgaggggctcaagagaaatatttctaattctctagcgacatggctaattttttttggcataaaaaatatagtctgaatattaagcattgatttagtacccatggtatcgcagatattatacagaacacaaggcaaatgataatcaggtgtaagcataaaagcattctcacgttaccccgatattttataaagcaaagctattgtatacccttttacttaggaaattgaagctcaagaaggtgaagatgatacctttctaacagcccaagatggtgaggaagaagaaaatgagaaagctcttcaaaggaatctaaagacagcaagacatcatctaaagatgacaaaggaagtacaagtagtactagtggtagcagtggaagctcaactaaaaatatctgggttagtggactttcatctaataccaaagctgctgatttgaagaacctctttggcaaatatggaaaggttctgagtgcaaaagtagttacaaatgctcgaagtcctggggcaaaatgctatggcattgtaactatgtcttcaagcacagaggtgtccaggtgtattgcacatcttcatcgcactgagctgcatggacagctgatttctgttgaaaaagtaaaaggtgatccctctaagaaagaaatgaagaaagaaaatgatgaaaagagtagttcaagaagttctggagataaaaaaaatacgagtgatagaagtagcaagacacaagcctctgtcaaaaaagaagnnnnnnnnnnnnnnnnnnnnnnnnnnnnnnnnnnnnnnnnnnnnnnnnnnnnnnnnnnnggtaaagatgagaagaatgataatggagcaagtggccaaacatcagaatcgattaaaaaaagtgaagaaaagaagcgaataagttccaagagtccaggacatatggtaatactagaccaaactaaaggagatcattgtagaccatcaagaagaggaagatatgagaaaattcatggaagaagtaaggaaaaggagagagctagtctagataaaaaaagagataaagactacagaaggaaagagatcttgccttttgaaaagatgaaggaacaaaggttgagagaacatttagttcgttttgaaaggctgcgacgagcaatggaacttcgaagacgannnnnnnnnnnnnnnnnnnnnnnnnnnnnnnnnnnacgcattagaataattcgtgaacgggaagaacgggaacgcttacnnnnnnnnnnnnnncgcctagaaattgaaaggcaaaaactagagagagagagaatggaacgcgaacgcttggaaagggaacgcattcgtattgaacaggaacgtcgtaaggaagctgaacggattgctcgagaaagagaggaactcagaaggcaacaacagcagcttcgttatgaacaagaaaaaaggaattccttgaaacgcccacgtgatgtagatcataggcgagatgatccttactggagcgagaataaaaagttgtctctagatacagatgcacgatttggccatggatccgactactctcgccaacagaacagatttaatgactttgatcaccgagagaggggcaggtttcctgagagttcagcagtacagtcttcatcttttgaaaggcgggatcgctttgttggtcaaagtgaggggaaaaaagcacgacctactgcacgaagggaagatccaagcttcgaaagatatcccaaaaatttcaggtgactccagaagaaatgagcctccaccaccaagaaatgaacttagagaatcagacaggcgagaagtacgaggggagcgagacgaaaggagaacggtgattattcatgacaggcctgatatcactcatcctagacatcctcgagaggcagggcccaatccttccagacccaccagctggaaaagtgaaggaagcatgtccactgacaaacgggaaacaagagttgaaaggccagaatgatctgggagagaagtatcagggcacagtgtgagaggcgctccccctgggaatcgtagcagcgcttcggggtacgggagcagagagggagacagaggagtcatcacagaccgaggaggtggatcacagcactatcctgaggagcgacatgtggttgaacgccatggacgggacacaagcggaccaaggaaagagtggcatggtccaccctctcaagggcctagctatcatgatacgaggcgaatgggtgacggccgggcaggagcaggcatgataacccaacattcaagtaacgcatccccaattaatagaattgtacaaatcagtggcaattccatgccaagaggaagtggctccggatttaagccatttaagggtggacctccgcgacgattctgaaaatgagctctctgccaaggttttaagataatttattgaaatctcctgtaaactttacttgactacttatgaagaggacctctgacttgcttgagagttctgtcagacttttctttttaaaaatttaacatgattgcttttctcaattttggagaagatgtttaaatagttctgttgtaacttttaatagttttgtgtatcattcaactttttttcttgcagcaccgaggcacatttgaaaagatggaattgaagtcgttttgtttaacgctgtgtgaatataaagagtagtttgcagctgtgtggtagtggtttaatttgcagccttagc

SEQ ID NO: 184796 - DNA, 919 bp, Homo Sapiens
ttgcacaaattgatgagcaatgctttttcctaaaagacaactttgtacaaaaaagttggaatttattgaaatctcctgtaaactttacttgactacttatgaagaggacctctgacttgcttgagagttctgtcagacttttctttttaaaaatttaacatgattgcttttctcaattttggagaagatgtttaaatagttctgttgtaacttttaatagttttgtgtatcattcaactttttttcttgcagcaccgaggcacatttgaaaagatggaattgaagtcgttttgtttaacgctgtgtgaatataaagagtagtttgcagctgtgtggtagtggtttaatttgcagccttagctctgtggtgtctggctctagagttacttctttttaccaagcattttcagcctccattttgaaggctgtctacacttaagaagtcttagctgtctaatttttagagaataagattgttcattgcatttctgagtattatgtaacctatttttgcagaaggtactgttacattaagtgcatctgtgtatcctggtttaaaaaaatgtaatcttttttgaaataaaccttcatattctgtatagttgctaaagtgttgagaacctttttaattgtaaaatgagaaccgattttcagtttagtgtagcagcacacttgttcaggtttgcatggtatgaaaccaaatagattcatgaaacccttggccatgaggtttgtttcacaaggttcttaagaccgagttgtgcaggtaagtgcactttttaggtaatctgcactgtttgtttgatggataattccattctctgggaattgtgtgggtattatgtttcctggttcccaactatgttgagaaatgaaaaaaacccaggttctaaatgggtgaatcagttgggttttgtaa

SEQ ID NO: 184797 - DNA, 2527 bp, Homo Sapiens
actttgtacaaaaaagttggatttttcagaaatataaagattttaatacctgccacatggaaagctaataataacagcaaaataaaacaagaatcatatgaaaaggcaaatgtcatagtgactgactggtatggggcacatggagatgatccatacaccctacaatacagagggtgtggaaaagagggaaaatacattcatttcacacctaatttcctactgaatgataacttaacagctggctacggatcacgaggccgagtgtttgtccatgaatgggcccacctccgttggggtgtgttcgatgagtataacaatgacaaacctttctacataaatgggcaaaatcaaattaaagtgacaaggtgttcatctgacatcacaggcatttttgtgtgtgaaaaaggtccttgcccccaagaaaactgtattattagtaagctttttaaagaaggatgcacctttatctacaatagcacccaaaatgcaactgcatcaataatgttcatgcaaagtttatcttctgtggttgaattttgtaatgcaagtacccacaaccaagaagcaccaaacctacagaaccagatgtgcagcctcagaagtgcatgggatgtaatcacagactctgctgactttcaccacagctttcccatgaacgggactgagcttccacctcctcccacattctcgcttgtagaggctggtgacaaagtggtctgtttagtgctggatgtgtccagcaagatggcagaggctgacagactccttcaactacaacaagccgcagaattttatttgatgcagattgttgaaattcataccttcgtgggcattgccagtttcgacagcaaaggagagatcagagcccagctacaccaaattaacagcaatgatgatcgaaagttgctggtttcatatctgcccaccactgtatcagctaaaacagacatcagcatttgttcagggcttaagaaaggatttgaggtggttgaaaaactgaatggaaaagcttatggctctgtgatgatattagtgaccagcggagatgataagcttcttggcaattgcttacccactgtgctcagcagtggttcaacaattcactccattgccctgggttcatctgcagccccaaatctggaggaattatcacgtcttacaggaggtttaaagttctttgttccagatatatcaaactccaatagcatgattgatgctttcagtagaatttcctctggaactggagacattttccagcaacatattcagcttgaaagtacaggtgaaaatgtcaaacctcaccatcaattgaaaaacacagtgactgtggataatactgtgggcaacgacactatgtttctagttacgtggcaggccagtggtcctcctgagattatattatttgatcctgatggacgaaaatactacacaaataattttatcaccaatctaacttttcggacagctagtctttggattccaggaacagctaagcctgggcactggacttacaccctgaacaatacccatcattctctgcaagccctgaaagtgacagtgacctctcgcgcctccaactcagctgtgcccccagccactgtggaagcctttgtggaaagagacagcctccattttcctcatcctgtgatgatttatgccaatgtgaaacagggattttatcccattcttaatgccactgtcactgccacagttgagccagagactggagatcctgttacgctgagactccttgatgatggagcaggtgctgatgttataaaaaatgatggaatttactcgaggtattttttctcctttgctgcaaatggtagatatagcttgaaagtgcatgtcaatcactctcccagcataagcaccccagcccactctattccagggagtcatgctatgtatgtaccaggttacacagcaaacggtaatattcagatgaatgctccaaggaaatcagtaggcagaaatgaggaggagcgaaagtggggctttagccgagtcagctcaggaggctccttttcagtgctgggagttccagctggcccccaccctgatgtgtttccaccatgcaaaattattgacctggaagctgtaaaagtagaagaggaattgaccctatcttggacagcacctggagaagactttgatcagggccaggctacaagctatgaaataagaatgagtaaaagtctacagaatatccaagatgactttaacaatgctattttagtaaatacatcaaagcgaaatcctcagcaagctggcatcagggagatatttacgttctcaccccaaatttccacgaatggacctgaacatcagccaaatggagaaacacatgaaagccacagaatttatgttgcaatacgagcaatggataggaactccttacagtctgctgtatctaacattgcccaggcgcctctgtttattccccccaattctgatcctgtacctgccagagattatcttatattgaaaggagttttaacagccaatgggtttgataggaatc

SEQ ID NO: 184798 - DNA, 1799 bp, Homo Sapiens
ccaactttgtacaaaaaagttggatttactcgaccgtatttttttctcctttgctgcaaatggtagatatagcttgaaagtgcatgtcaatcactctcccagcataagcaccccagcccactctattccagggagtcatgctatgtatgtaccaggttacacagcaaacggtaatattcagatgaatgctccaaggaaatcagtaggcagaaatgaggaggagcgaaagtggggctttagccgagtcagctcaggaggctccttttcagtgctgggagttccagctggcccccaccctgatgtgtttccaccatgcaaaattattgacctggaagctgtaaaagtagaagaggaattgaccctatcttggacagcacctggagaagactttgatcagggccaggctacaagctatgaaataagaatgagtaaaagtctacagaatatccaagatgactttaacaatgctattttagtaaatacatcaaagcgaaatcctcagcaagctggcatcagggagatatttacgttctcaccccaaatttccacgaatggacctgaacatcagccaaatggagaaacacatgaaagccacagaatttatgttgcaatacgagcaatggataggaactccttacagtctgctgtatctaacattgcccaggcgcctctgtttattccccccaattctgatcctgtacctgccagagattatcttatattgaaaggagttttaacagcaatgggtttgataggaatcatttgccttattatagttgtgacacatcatactttaagcaggaaaaagagagcagacaagaaagagaatggaacaaaattattataaataaatatccaaagtgtcttccttcttagatataagacccatggccttcgactacaaaaacatactaacaaagtcaaattaacatcaaaactgtattaaaatgcattgagtttttgtacaatacagataagatttttacatggtagatcaacaaattctttttgggggtagattagaaaacccttacactttggctatgaacaaataataaaaattattctttaaagtaatgtctttaaaggcaaagggaagggtaaagtcggaccagtgtcaaggaaagtttgttttattgaggtggaaaaatagccccaagcagagaaaaggagggtaggtctgcattataactgtctgtgtgaagcaatcatttagttactttgattaatttttcttttctccttatctgtgcagaacaggttgcttgtttacaactgaagatcatgctatattttatatatgaagcccctaatgcaaagctctttaccttttgctattttgttatatatattacagatgaaatctcactgctaatgctcagagatcttttttcactgtaagaggtaacctttaacaatatgggtattacctttgtctcttcataccggttttatgacaaaggtctattgaatttatttgtttgtaagtttctactcccatcaaagcagctttctaagttattgccttggttattatggatgatagttatagcccttataatgccttaactaaggaagaaaagatgttattctgagtttgttttaatacatatatgaacatatagttttattcaattaaaccaaagaagaggtcagcagggagatactaacctttggaaatgattagctggttctgttttttggttaaataaaagtctttaatcctttctcccccaagagttacttaccaagggcaggggaagggggatatagaggtcaaaaggaaataaaaatcatct

SEQ ID NO: 184799 - DNA, 1159 bp, Homo Sapiens
actttgtacaaaaaagttggatctgcatccatattgaaaacctgacacaatgtatgcagcaggctcagtgtgagtgaactggaggcttctctacaacatgacccaaaggagcattgcaggtcctatttgcaacctgaagtttgtgactctcctggttgccttaagttcagaactcccattcctgggagctggagtacagcttcaagacaatgggtataatggattgctcattgcaattaatcctcaggtacctgagaatcagaacctcatctcaaacattaaggaaatgataactgaagcttcattttacctatttaatgctaccaagagaagagtatttttcagaaatataaagattttaatacctgccacatggaaagctaataataacagcaaaataaaacaagaatcatatgaaaaggcaaatgtcatagtgactgactggtatggggcacatggagatgatccatacaccctacaatacagagggtgtggaaaagagggaaaatacattcatttcacacctaatttcctactgaatgataacttaacagctggctacggatcacgaggccgagtgtttgtccatgaatgggcccacctccgttggggtgtgttcgatgagtataacaatgacaaacctttctacataaatgggcaaaatcaaattaaagtgacaaggtgttcatctgacatcacaggcatttttgtgtgtgaaaaaggtccttgcccccaagaaaactgtattattagtaagctttttaaagaaggatgcacctttatctacaatagcacccaaaatgcaactgcatcaataatgttcatgcaaagtttatcttctgtggttgaattttgtaatgcaagtacccacaaccaagaagcaccaaacctacagaaccagatgtgcagcctcagaagtgcatgggatgtaatcacagactctgctgactttcaccacagctttcccatgaacgggactgagcttccacctcctcccacattctcgcttgtagaggctggtgacaaagtggtctgtttagtgctggatgtgtccagcaagatggcagaggctgacagactccttcaactacaacaagccgcagaattttatttgatgcagattgttgaaattcataccttcgtgggcattgccagtttc

SEQ ID NO: 184800 - DNA, 2440 bp, Homo Sapiens
ctttgtacaaaaaagttggagaaagatcttgccattcaaaagagaatcagagccctgcgctgggttacgcctcagatgctgtgtgtccctgttaatgaagacatcccagaagtgtctgatatggtggtgaaggcgatcacagatatcattgaaatggattccaagcgtgtgcctcgagacaagctggcctgcatcaccaagtgcagcaagcacatcttcaatgccatcaagatcaccaagaatgaaccggcgtcagcggatgacttcctccccaccctcatctacattgttttgaagggcaaccccccacgccttcagtctaatatccagtatatcacgcgcttctgcaatccaagccgactgatgactggagaggatggctactatttcaccaatctgtgctgtgctgtggctttcattgagaagctagacgcccagtctttgaatctaagtcaggaggattttgatcgctacatgtctggccagacctctcccaggaagcaagaagctgagagttggtctcctgatgcttgcttaggcgtcaagcaaatgtataagaacttggatctcttgtctcagttgaatgaacgacaagaaaggatcatgaatgaagccaagaaactggaaaaagacctcatagattggacagatggaattgcaagagaagttcaagacatcgttgagaaatacccactggaaattaagcctccgaatcaaccgttagcagctattgactctgaaaacgttgaaaatgataaacttcctccaccactgcaacctcaagtttatgcaggatgatcacaatttagtggagagtatttatttgagcctaaattgtaggtagcccttactacactcaactgattgggatctagaatgtaactaaattgcttataaatgtcagagcattttttaaaggtacagtatatggggattgtttcgtttttcctagcaggggaaccttagttaataataaaatactacttatttgagttactgatacagattcatttaaggcttgtgtgcaaattttgtctcaatcttttttccctccatgattttcctatgtgcttcctctggcattcactgtggttttggtaaataattgccttttaaaggattaaacaaatgaatgctacaaagtgtatgttcaagaaaattaaatggtaccactcttccacagtttggaataattttataattgtaaagatagaaattatattgataagtaaatatgtaaaattgtaaatatgtaaaaaaaagaatggtgtctgctgtgcatggcattttatatgttaattttttagtttaaaatgaagtatattgaatgtttgcctttagcaccattttatttggtttgtcccactaaaatgactcgagaagtgtttagacaaactccccttaagatgtgcactccatctttaagaacgtgttagccttaactttgaggttctatatagtcagagactatgacaccactaaggttcagaataaagtttaggccacataaaattgctgtttaatgtagtcgatggaagactttaaactatgcttctagcttatttttccctcattcattcagcaaatctctattgagttcttcagtgagaaggagcaggcactgggcctggaatggaaggcgggaatgaatgggcctctgatggtgagaggtgacggggtccctcagctgtgagatgcaaggggcgccttgcagcctccataatatacatttgactttgcaaacgtctagacatgttttctgaacctttttcaggacatttcaacctcgggactattcatattagtggcctgagaggtgtttgttgtggggccaccctgtgcatggtagaatgttcagcagcattcctgccatccatatccattaggtgccagtagcacccccgctagagctgtgaaaaattctctccagacatagtcagatgtctcctggggccatatcacccctccgttaagaaccactgatgtcttttacaaaccaggagttatcctcctggtggttaatatggtgtaaccaaagaatcttgcactcaatgcacagtgtgatgttaactaaaacgagttaaatatttaggaggcttgacagctacctgcattgtagaaccttttcttatctcagtggaaccttctataacctaaatataccattgatgattcttcttccattcagtgacatccacagattatgcagctatacttgtgaaatcgtgcatgaggccccagggcaccgttctagaacaacgtcacttcacacaggcagctgagaaaggttctcttgcttttccagtatcttcctaagatggagcccaaaattgcagagcagtaactttggaataaaaccagggtgggtataaaacttcttattcttaaatttacatataagatctattaagcttgacacatctgtgtcatcacgcactga

SEQ ID NO: 184801 - DNA, 2117 bp, Homo Sapiens
  misc_feature (1433)..(1444): n is a, c, g, or t
agcaatgcttttcctattaaaagccaactttgtacaaaaaagttggctgggattacacgatataagaaatggattccaggcgtgtgcctcgagacaagctggcctgcatcaccaagtgcagcaagcacatcttcgatgccatcaagatcacctagaacgagctggcgtcagcagatgacttcctccccaccctcatctacattgttttgaagggcaacccccatgccttcagtctaatatccagtatatcacgcgcttctgcaatccaagccgactgatgactggagaggatggctactatttcaccaatctggtgagtaagtgagttcttggcgttgtggagaaggactaggaaggtggtggttttggggatgtgataggtcactcaggcccatgacaggtgaatgcttctgtgtgagaaggcagcacggctgaggaagctcactttgcatcagggagcacaaggaccaggccgtacagacactccgcctcccagcacttgatcagagattgtgtttatcctacagaaacagatgacatgtgttgggcatcactccccacggtcctgggtagaagagtccttcacttggcagggctttttcaaccaatgaataaggcaaattatatataagttaataatgccatttcgaaccgagacagatggcagctaaatgaagtttaattaaagaatgagtgctggggccctttttattgggtactgcatctactttgaccacaaaagacgaagtgaccccaacttcaagaacaggctttgagatggaagaaagaaacagaagcttgccaaggagagagctgggctttccaagttacctgaccttaaagatgctgaagctgttcagaagttcttccttgaagaaatacagcttggtgaagagttactagctcaaggtgaatatgagaagggcgtagaccatctgacaaatggaattgctgtgtgtggacagccacagcagttactgcaggccttacagcaaactcttccaccactagtgttccagatgcttttgactaagctcccaacaattagagaattctaagtgctcagagcttggctgaagatgatgtggaatgagaaacaaatgttaacataataaaatctcagttaaaaatatttaaaaaattcttggtagttgagcagctctgggggaataagggctattattcttgttatgaactacactgaaatctaccaaagttaatgtttactttgtgtagatccatttgtctattttatttatttttcccagtgaaaagtgtattttgatagagaacttttcattttataaatacactatgagttactaaaatatcatggattttgtttattcctgaaacatagttacatagttaaactgtacatatgacatggcttatgttaaaaatacccagtgctcagttttgaaagataggcnnnnnnnnnnnngtataggagaaactgaagaatgtacacttttttagagggcacattttgctgtaaatctggaaatttgatagacttgactgtgtttgtgaaaactgagcattaaaggttttgattgatcctttctttccatttaatctctgagacgtaaatatgtgaggtgtgctgctgtgctgggttaacagcttccttccctttctgtgtagcagtcttgaaatgttctgtttaaatcagtaggcttaatgtgttctgggtatttatctccttgtattttaaatatatgtagttgcaaatagcaccaggaattagatttctgtacacccctaatctagccttgtgagcttcgctagttaatgtgtgctcactttccctccatttgttacgtgagagaatgcgtctgctgatcactgaagtgtcccttttagcttctgattcattgggttctgttgggcatctttaaatccaccttaacctgaggaatgtatgtgggcaaccaggccctgcatttttttatattctgaattttgcatgcttgcctgacttagtatttctgaattgatgttttttttaatggtataactatcttgattttcactgaaattatatggttctgtcactactctgtaaattaatccgaaacttttaaggtaactgggatgatctgctttgtaaaatg

SEQ ID NO: 184802 - DNA, 2338 bp, Homo Sapiens
  misc_feature (115)..(126): n is a, c, g, or t
ttggctaaaatatcatggattttgtttattcctgaaacatagttacatagttaaactgtacatatgacatggcttatgttaaaaatacccagtgctcagttttgaaagataggcnnnnnnnnnnnngtataggagaaactgaagaatgtacacttttttagagggcacattttgctgtaaatctggaaatttgatagacttgactgtgtttgtgaaaactgagcattaaaggttttgattgatcctttctttccatttaatctctgagacgtaaatatgtgaggtgtgctgctgtgctgggttaacagcttccttccctttctgtgtagcagtcttgaaatgttctgtttaaatcagtaggcttaatgtgttctgggtatttatctccttgtattttaaatatatgtagttgcaaatagcaccaggaattagatttctgtacacccctaatctagccttgtgagcttcgctagttaatgtgtgctcactttccctccatttgttacgtgagagaatgcgtctgctgatcactgaagtgtcccttttagcttctgattcattgggttctgttgggcatctttaaatccaccttaacctgaggaatgtatgtgggcaaccaggccctgcatttttttatattctgaattttgcatgcttgcctgacttagtatttctgaattgatgttttttttaatggtataactatcttgattttcactgaaattatatggttctgtcactactctgtaaattaatccgaaacttttaaggtaactgggatgatctgcttgtaaaaatgcttgttgccttttgctttatcttcagtgtacctccttaatcctgcttcaacttgattatcttgtgaaacgatgagagtaagttgcaaccttgtgactgaaaacttgaaaagagtggagcaggtgggacctcttattctcaaatagtgacatattctccgtagtcacagtttcagaactgagtaaggatccttggtacttggtggcatctgttgaactgaggagcatttctcattgtaaagattgcctttgttctgtctaaaagtctggagaaatcccaaagacttttcctatgtactaggcattttattttgattgacttacaaactcttcttaatcattatcaatctcggtttttttgtggtgcagtggaaggagaaataggtctagtttctgcctctgattagccgcacagccttgaacaaatcacatttcatctttgaacttacctctactgttagactaggcgactcacatttgaggacttttctcgggtatcttgagggtttgtgatcctgaacccttaaacagtgcttttttgttacacaggagggcttttttggggggatgaccagtacagacatgccagttagttttactagtgggatcccaaatccaaagcagtgtagtggtgattggtcagtgactaaccaggcagctaagaagtcttaggcagcagcccagacatgtatagaggggcagttagagggagaacaggggtgggaaagggagcaaggggcagatagctcagcaaggaaagaatgggctcagaaaaaggagggctggctggaggagtgaggggcagcttaagtttggggagggtagaaacgccgtttccttgggaactggagtgcagtatgagctgggtgtcacttggctctgaacatactggctttgctgtaatgcttgaaaaggcgttggtatcttcattttacagttcattaacccaagtacgttttcttatttaaatgacaactttggtgctttaaaatgaggtaccactttttaaagctagctgtgtcgagttaaagaaaaaatcagcagttttttctcccagaaatgtaattgccaaacactattcatccccatcttaagttttacaaggtgatgtaatcagcttgttgtagtgatgctggccaaatggtgctcagcaggtgagaacaaaaaaaccccagatttcagtgaactaatacacagcttgagcgtttccatgtgctaatgttgcacacttactaaaaaactttggaaatggaaaataatgtattagtgcaacagttgatgtgcttctttgggcaaagatatagttttgttccacaatttgtacttaaaagcgaaagaacattgaaaacatagacttactggctgtagcaatgctggcctgttaactgataactagaacttaggttcacgtttatgtaaaagtgtgtaaaacctagtagagcttgcatagtcggcactcagtaaatgtttggttcctttttgccccttggtaagtttattttaccatcctcccacctgccattctgactttatttaaatca

SEQ ID NO: 184803 - DNA, 824 bp, Homo Sapiens
ttggggcagggccagacccaggtcctgcctgctgatagccatgagcatgccagtgggcgcctgggcatctccctgacccgcgtgtcagacggcgagaatgtcattatatcccacttcaactccaaggacgagctcatccaggccaatgtctgcagcggtttcatccccgtgtactgtgggctcatccctccctccctccagggggtgcgctacgtggatggtggcatttcagacaacctgccactctatgagcttaagaacaccatcacagtgtcccccttctcgggcgagagtgacatctgtccgcaggacagctccaccaacatccacgagctgcgggtcaccaacaccagcatccagttcaacctgcgcaacctctaccgcctctccaaggccctcttcccgccggagcccctggtgctgcgagagatgtgcaagcagggataccgggatggcctgcgctttctgcagcggaacggcctcctgaaccggcccaaccccttgctggcgttgccccccgcccgcccccacggcccagaggacaaggaccaggcagtggagagcgcccaagcggaggattactcgcagctgtcgggagaagatcacatcctggagcacctgcccgcccggctcaatgaggccctgctggaggcctgcgtggagcccacggacctgctgaccaccctctccaacatgctgcctgtgcgtctggccacggccatgatggtgccctacacgctgccgctggagagcgctctgtccttcaccatccgcttgctggagtgggctgccgacgttcccgaggacatccggtggatgaagga

SEQ ID NO: 184804 - DNA, 2115 bp, Homo Sapiens
ttggctctaccaacgagatccagagtgaccagaacctgaaggtgctgccaccccctctgcccactatgcccactctcaccagcctcccatcttccaccgacaagccgtcgggcccatggagagactgcctgcaggccctggaggatggccacgacaccagctccatctacctggtgaagccggagaacaccaaccgcctcatgcaggtgtggtgcgaccagagacacgaccccgggggctggaccgtcatccagagacgcctggatggctctgttaacttcttcaggaactgggagacgtacaagcaagggtttgggaacattgatggcgaatactggctgggcctggagaacatttactggctgacgaaccaaggcaactacaaactcctggtgaccatggaggactggtccggccgcaaagtctttgcagaatacgccagtttccgcctggaacctgagagcgagtattataagctgcggctggggcgctaccatggcaatgcgggtgactcctttacatggcacaacggcaagcagttcaccaccctggacagagatcatgatgtctacacaggaaactgtgcccactaccagaagggaggctggtggtataacgcctgtgcccactccaacctcaacggggtctggtaccgcgggggccattaccggagccgctaccaggacggagtctactgggctgagttccgaggaggctcttactcactcaagaaagtggtgatgatgatccgaccgaaccccaacaccttccactaagccagctccccctcctgacctctcgtggccattgccaggagcccaccctggtcacgctggccacagcacaaagaacaactcctcaccagttcatcctgaggctgggaggaccgggatgctggattctgttttccgaagtcactgcagcggatgatggaactgaatcgatacggtgttttctgtccctcctactttccttcacaccagacagcccctcatgtctccaggacaggacaggactacagacaactctttctttaaataaattaagtctctacaataaaaacacaactgcaaagtaccttcataatatacatgtgtatgagcctcccttgtgcacgtatgtgtataccacatatatatgcatttagatatacatcacatgtgatatatctagatccatatataggtttgccttagatacctaaatacacatatattcagttctcagatgttgaagctgtcaccagcagctttgctcttaggagaaaagcatttcattagtgttgtattacttgagtctaagggtagatcacagactgtgtggtctcaactgaaaggatcacccttggcatctgtgtgcctggattcttccagaatgtctacaatgctaatctctcacatagaggttcccagcttcttaagaaccccttttggcacctaatcaaatttcaaaatccctccccccacattttcatacttttccccattctcaggacttttcaccatccatcacccacttatcccttcatttgacaccattcattaagtgccttctgtgtgtcagtccctggccactcactgcagttcaaggccccctttccgctctgctgtactcctcgcctacctactccttgccttttctgtcgcacagccccttctttccaggcgagattcctcagcttctgagtaggaaacactccgggctccaggtttctggttgggaagggaaggccaggccaaaagctccaccggccgtatagataatgtactcgcagttttgtatcttccattcatactttaacctacaggtcatttgagtcttcacacaaataataacctatctggccaggagaattatctcagaacagaagtcatcagatcatcagagctcccagatggctacagaccagagattccacgctctcacgctgactagagtccgcatctcatctccaaactacacttccctggagaacaagtgccacaaaaatgaaaacaggccacttctcacgagttgaataatcaggggtcaccggaccccttggttgatgcactgcagcatggtggctttctgagtcctgttggccaccaagtgtcagcctcagcactcccggga

SEQ ID NO: 184805 - DNA, 1347 bp, Homo Sapiens
  misc_feature (119)..(146): n is a, c, g, or t
ttggagaacttttatctctgcccagtatagtatgctccagtgacagatggattagggtgtgtcatactagggtgtgagagaggtaggtcgtagcattcctcatcacatggtcaggggannnnnnnnnnnnnnnnnnnnnnnnnnnnaagccataattggtgatactgaaaactttgggttcccatttatcctgctttctttgggattgctaggcaaggtctggccaggccccccttttttcccccaagtgaagaggcagaaacctaagaagttatcttttctttctacccaaagcatacatagtcactgagcacctgcggtccatttcctcttaaaagttttgttttgatttgtttccatttcctttccctttgtgtttgctacactgacctcttgcggtcttgattaggtttcagtcaactctggatcatgtcagggactgataatttcatttgtggattacgcagacccctctacttcccctctttcccttctgagattctttccttgtgatctgaatgtctccttttccccctcagagggcaaagaggtgaacataaaggatttggtgaaacatttgtaagggtaggagttgaaaactgcagttcccagtgccacggaagtgtgattggagcctgcagataatgctcagccatcctcccatcctgcactttagccagctgcagggcgggcaaggcaaggaaagctgcttccctggaagtgtatcactttctccggcagctgggaagtctagaaccagccagactgggttaagggagctgctcaagcaatagcagaggtttcacccggcaggatgacacagaccacttcccagggagcacgggcatgccttggaatattgccaagcttccagctgcctcttctcttaaagcattcctaggaatattttccccgccaatgctgggcgtacaccctagccaacgggacaaatcctagagggtataaaatcatctctgctcagataatcatgacttagcaagaataagggcaaaaaatcctgttggcttaacgtcactgttccacctggtgtaatatctctcatgacagtgacaccaagggaagttgactaagtcacatgtaaattagagtgttttaaagaatgccatagatgttgattcttaactgctacagataacctgtaattgagcagatttaaaattcaggcatacttttccatttatccaagtgctttcatttttccagatggcttcagaagtaactcgtcaaactctgtgaggtagaatcctttgtctatacctccatgaacattgactcgtgtgttcagagcctttggcctctctgtggagtctggctctctggctcctg

SEQ ID NO: 184806 - DNA, 2337 bp, Homo Sapiens
  misc_feature (501)..(530): n is a, c, g, or t
cattatctgcaggctccaatcacacttccgtggcactgggaactgcagttttcaactcctaccttacaaatgtttcaccaaatcctttatgttcacctctttgccctctgagggggaaaaggagacattcagatcacaaggaaagaatctcagaagggaaagaggggaagtagaggggtctgcgtaatccacaaatgaaattatcagtccctgacatgatccagagttgactgaaacctaatcaagaccgcaagaggtcagtgtagcaaacacaaagggaaaggaaatggaaacaaatcaaaacaaaacttttaagaggaaatggaccgcaggtgctcagtgactatgtatgctttgggtagaaagaaaagataacttcttaggtttctgcctcttcacttgggggaaaaaaggggggcctggccagaccttgcctagcaatcccaaagaaagcaggataaatgggaacccaaagttttcagtatcaccaattatggcttnnnnnnnnnnnnnnnnnnnnnnnnnnnnnntcccctgaccatgtgatgaggaatgctacgacctacctctctcacaccctagtatgacacaccctaatccatctgtcactggagcatactatactgggcagagataaaagttcttttcctcctggggtttgctaatccagttcccatagcccatatccttcaggccttttttgaagtagttcttggccgtctcgtagtcacgggcagctttcttggcctcaccataggagagtctcagtagatccctgcggtaacggaaggagcagagcttcttaaatagaagaaaaatgttctttttggagacccgggacaattcattccgtggcccatccacagtgcctctggtaccgtccaggatctccaggtcatagccatcagccagacaccagttgacgcttgtctccttagtcttcccggattgccttttggaatcatatatgctgactctgccaaccttggggtggttgacaataaagggatgtcgtagtccatcctcaaatgcactcccatctcttgtcacacgacagcaaatagcacgggtcagatgcccttggctgaaaaggtaacccaatgtgacagatttgagataaatgggctgcaggaagtgggtcaacagtgccccttgcaggcccagcacgttccagcgtaggattttgtcactacaggacatggtacggagtctctccccgagccgaatgccatcccacgtaggcacaatgtcactggattccacagggattgtgccttctccgttctccaccttggtgcggagctttccttgtttgggattctcgaagacagggtagtggcgggattctgtgctttccatagcacggtcgctgcaggacttgtcaaagagggcgccatctccacacggagcagtgctgatatacagatggaatgacacagtcttttttatttggagcttttctcctcccttagcaggttcaaatatactatccttcgcagtctgggagttgtatttcattaactcactgtagagaaacctgatgaagcctctccgggagattatttctgcatggcagtcattgacagtttctccttttaggctgagagaatctcctttcacacagcgattccctgttcccaagctgacgacgacacccatgtcctcagagtcttttttcataatgatggcggccagaatcttgcggccgagcaaggagggctggaagctgttagtcagagtgttgaagcaccggtggctcagcatggctatctggtcatggaaggtgctgccagtgagagggagtgtctttggctgtgcttctggggaccttgagaggaggagcatagttcttctgagactggcccctgtcactggggttacctctgtgaaacccatgcgttctgccttctcgttctccccaatcaagacacggagagccgcatctgctgcttcctgcttgccttgcttcttgctgtgtgcgcagacggctgggaaccagcgacccccaacttttgcttggtaaacgaacttgggctcgtgaggaggtccggactggtcgaccaacttgaattcagcagcaaagccatgggagcgggcgtactccaaaaggccacccacagggttggtgttcaggtatctcacgagctcgccaatcttcctgaccttgttgggcatcatggattccaagttatcaagtgactctgagatcataccttcaggctggttatcagaagccatggagttggtcgcctccccatgcagggccttcatggcttcctctgcggccatctgctttgccactttcttgctgggagcactcacactggggaaagccaa

SEQ ID NO: 184807 - DNA, 1905 bp, Homo Sapiens
  misc_feature (57)..(84): n is a, c, g, or t
acaaaaaagttgggagagaggtaggtcgtaccattcctcatcacatggtcaggggannnnnnnnnnnnnnnnnnnnnnnnnnnnaagccataattggtgatactgaaaactttgggttcccatttatcctgctttctttgggattgctaggcaaggtctggccaggccccccttttttcccccaagtgaagaggcagaaacctaagaagttatcttttctttctacccaaagcatacatagtcactgagcacctgcggtccatttcctcttaaaagttttgttttgatttgtttccatttcctttccctttgtgtttgctacactgacctcttgcggtcttgattaggtttcaatcaactctggatcatgtcagggactgataatttcatttgtggattacgcagacccctctacttcccctctttcccttctgagattctttccttgtgatctgaatgtctccttttccccctcagagggcaaagaggtgaacataaaggatttggtgaaacatttgtaagggtaggagttgaaaactgcagttcccagtgccacggaagtgtgattggagcctgcagataatgctcagccatcctcccatcctgcactttagccagctgcagggcgggcaaggcaaggaaagctgcttccctggaagtgtatcactttctccggcagctgggaagtctagaaccagccagactgggttaagggagctgctcaagcaatagcagaggtttcacccggcaggatgacacagaccacttcccagggagcacgggcatgccttggaatattgccaagcttccagctgcctcttctcttaaagcattcctaggaatattttccccgccaatgctgggcgtacaccctagccaacgggacaaatcctagagggtataaaatcatctctgctcagataatcatgacttagcaagaataagggcaaaaaatcctgttggcttaacgtcactgttccacctggtgtaatatctctcatgacagtgacaccaagggaagttgactaagtcacatgtaaattaggagtgttttaaagaatgccatagatgttgattcttaactgctacagataacctgtaattgagcagatttaaaattcaggcatacttttccatttatccaagtgctttcatttttccagatggcttcagaagtaggctcgtgggcagggcgcagacctgatctttatagggttgacatagaaagcagtagttgtgggtgaaagggcaggttgtcttcaaactctgtgaggtagaatcctttgtctatacctccatgaacattgactcgtgtgttcagagcctttggcctctctgtggagtctggctctctggctcctgtgcattctttgaatagtcactcgtaaaaactgtcagtgcttgaaactgtttcctttactcatgttgaagggactttgttggcttttagagtgttggtcatgactccaagagcagagcagggaagagcccaagcatagacttggtgccgtggtgatggctgcagtccagttttgtgatgctgcttttacgtgtccctcgataacagtcagctagacacactcaggaggactactgaggctctgcgaccttcaggagctgagcctgcctctctcctttagatgacagaccttcatctgggaacgtgctgagccagcaccctcagatgatttccctccaaactgctgactaggtcatcctctgtctggtagagacattcacatctttgcttttattctgtgctctctgtacttttgaccaaaaattgaccaaagtaagaaaatgcaagttctaaaaatagactaaggatgcctttgcagaacaccaaagcatcccaaggaactgggtagggaagtggcgcctgtctcctggagtggaagaggcctg

SEQ ID NO: 184808 - DNA, 1009 bp, Homo Sapiens
ttgggtttctcaagaaaccatcagaaacacaggagctagtccagcaggtcttgagtttggcaacacaggattctgataatcctgaccttcgagaccggggctatatttattggcgccttctctcaactgaccctgttacagctaaagaagtagtcttgtctgagaagccactgatctctgaggagacggaccttattgagccaactctgctggatgagctaatctgccacattggttctttggcctctgtgtatcataagcctcccaatgcttttgtggaaggaagtcatggaattcatcgtaaacacttgccaattcatcatgggagcactgatgcaggtgacagccctgttggcactaccactgcaacgaacctggaacagcctcaggttatcccctctcaaggtgatcttctaggggatcttttaaaccttgacctcggtcccccagtcaatgtgccacaggtgtcctccatgcagatgggagcagtggatctcctaggaggaggactagatagtctggtgggacaatccttcatcccatcatcggtgcctgcaacctttgctccttcacctacacctgctgtggtcagcagtggactgaatgacctgtttgaactctccacagggataggcatggcacctggtggatatgtggctcctaaggctgtctggctacctgcagtaaaggctaaaggcttggagatttccggaacatttactcaccgccaagggcacatctatatggaaatgaacttcaccaataaagctctgcagcacatgacagattttgcaatccagtttaacaaaaatagctttggtgtcatccccagcactcctctggccatccatacaccactgatgccaaccagagcattgatgtctccctgcctctcaataccttgggcccagtcatgaagatggaacctctgaataacctccaggtggctgtgaaaaacaatatcgatgtcttctacttcagctgcctcatcccactcatgtgctttttg

SEQ ID NO: 184809 - DNA, 3375 bp, Homo Sapiens
ttggaccatctttgtccctggcaaagtgggttttgcgcagtggcttagacctagaaaagaatcgtgacgggcaggaaaccattacaccaccacctgggctgtgctctccggctcccgccgccacccccgccctcgccttcgcctccgcctccggtgcacattaaagatccaaagtcatgactgactccaagtatttcacaaccaataaaaaaggagaaatatttgaactaaaagctgaactcaacaatgaaaagaaagaaaagagaaaggaggctgtgaagaaagtgattgctgctatgaccgtggggaaggatgttagttctctctttccagacgtagtgaactgtatgcagactgacaatctggaactaaagaagcttgtgtatctctacttgatgaactacgccaagagtcagccagacatggccatcatggctgtaaacagctttgtgaaggactgtgaagatcctaatcctttgattcgagccttggcagtcagaaccatggggtgcatccgggtagacaaaattacagaatatctctgtgagccgctccgcaagtgcttgaaggatgaggatccctatgttcggaaaacagcagcagtctgcgtggcaaaactccatgatatcaatgcccaaatggtggaagatcagggatttctggattctctacgggatctcatagcagattcaaatccaatggtggtggctaatgccgtagcggcattatctgaaatcagtgagtctcacccaaacagcaacttacttgatctgaacccacagaacattaataagctgctgacagccctgaatgaatgcactgaatggggccagattttcatcctggactgcctgtctaattacaaccctaaagatgatcgggaggctcagagcatctgtgagcgggtaactccccggctatcccatgccaactcagcagtggtgctttcagcggtaaaagtcctaatgaagtttctagaattgttacctaaggattctgactactacaatatgctgctgaagaagttagcccctccacttgtcactttgctgtctggggagccagaagtgcagtatgtcgccctgaggaacatcaacttaattgtccagaaaaggcctgaaatcttgaagcaggaaatcaaagtcttctttgtgaagtacaatgatcccatctatgttaaactagagaagttggacatcatgattcgtttggcatctcaagccaacattgctcaggttctggcagaactgaaagaatatgctacagaggtggatgttgactttgttcgaaaagctgtgcgggccattggacggtgtgccatcaaggtggagcaatctgcagagcgctgtgtaagcacattgcttgatctaatccagaccaaagtgaattatgtggtccaagaagcaattgttgtcatcagggacatcttccgcaaataccccaacaagtatgaaagtatcatcgccactctgtgtgagaacttagactcgctggatgagccagatgctcgagcagctatgatttggattgtgggagaatatgctgaaagaattgacaatgcagatgagttactagaaagcttcctggagggttttcacgatgaaagcacccaggtgcagctcactctgcttactgccatagtgaagctgtttctcaagaaaccatcagaaacacaggagctagtccagcaggtcttgagtttggcaacacaggattctgataatcctgaccttcgagaccggggctatatttattggcgccttctctcaactgaccctgttacagctaaagaagtagtcttgtctgagaagccactgatctctgaggagacggaccttattgagccaactctgctggatgagctaatctgccacattggttctttggcctctgtgtatcataagcctcccaatgcttttgtggaaggaagtcatggaattcatcgtaaacacttgccaattcatcatgggagcactgatgcaggtgacagccctgttggcactaccactgcaacgaacctggaacagcctcaggttatcccctctcaaggtgatcttctaggggatcttttaaaccttgacctcggtcccccagtcaatgtgccacaggtgtcctccatgcagatgggagcagtggatctcctaggaggaggactagatagtctgcttggcagtgaccttggcgggggcattggaggaagtccggcagtgggacaatccttcatcccatcatcggtccctgcaacctttgctccttcacctacacctgctgtggtcagcagtggactgaatgacctgtttgaactctccacagggataggcatggcacctggtggatatgtggctcctaaggctgtctggctacctgcagtaaaggctaaaggcttggagatttccggaacatttactcaccgccaagggcacatctatatggaaatgaacttcaccaataaagctctgcagcacatgacagattttgcaatccagtttaacaaaaatagctttggtgtcatccccagcactcctctggccatccatacaccactgatgccaaaccagagcattgatgtctccctgcctctcaataccttgggcccagtcatgaagatggaacctctgaataacctccaggtggctgtgaaaaacaatatcgatgtcttctacttcagctgcctcatcccactcaatgtgctttttgtagaagatggcaaaatggagcgccaggtcttccttgcaacatggaaggatattcccaatgaaaatgaacttcagtttcagattaaggaatgtcatttaaatgctgacactgtttccagcaagttgcaaaacaacaatgtttatactattgccaagaggaatgtggaagggcaggacatgctgtaccaatccctgaagctcactaatggcatttggattttggccgaactacgtatccagccaggaaaccccaattacacgctgtcactgaagtgtagagctcctgaagtctctcaatacatctatcaggtctacgacagcattttgaaaaactaacaagactggtccagtacccttcaaccatgctgtgatcggtgcaagtcaagaactcttaactggaagaaattgtattgctgcgtataatctgaaaacactgaggccacctagcaaggtagtaactattctaacctgtgctaacattagggcacaacctgttggatagttttagcctcctgtgaacatttgtaaccactgcatcagtcacctcccacctcttgccacctgctgctgctatctgtccttacttgtgggcttctccatgctgtgccaatggctggctttttctacaccctcttttgagtgtagtttggtattttgtaattgagagctcatttcaaaa

SEQ ID NO: 184810 - DNA, 1046 bp, Homo Sapiens
actttgtacaaaaaagttggatctggaagtagttctgatcgttcacgatctgctactcctccagcaacaagaaatcattctggttcacggacacctccagtagcactcaacagttccagaatgagctgcttcagtcgtcctagcatgtccccaacacctcttgatcgctgcagatcacctggaatgcttgaaccccttggcagctctagaacacccatgtctgtcctgcagcaagccggcggctccatgatggatggtccaggtccccgaatacctgaccaccagagaacatctgtgccagaaaatcatgctcagtccaggattgcacttgccctgacagctatcagtcttggcaccgctcggcctcctccgtccatgtctgctgctggccttgctgcaagaatgtcccaggttccagccccggtgcctctcatgagtctcagaaccgcaccagcagccaaccttgccagcaggattcctgcagcctctgcggcagccatgaacctagccagcgccaggacacctgccattccaacagcagtgaacctggctgactctcgaacgccagctgcagcagcggccatgaacttggccagccccagaacagcggtggcaccttcggctgtgaacctggctgaccctcgcactcccacagccccagctgtgaacctagcaggggccagaaccccagctgccttggcagctctgagtctcacaggctctggcacaccaccaactgctgcaaactatccctccagctccagaacaccacaggctccagcctctgcaaacctggtgggtcctcggtctgcacatgccacagctcctgtgaatattgccggctccagaaccgccgcagccttggcccccgcgagcctcaccagtgctaggatggctccagcattgtctggtgcaaacctcaccagccccagggtgcccctttctgcctacgagcgtgtcagtggcagaacctcaccaccgctccttgaccgagctaggtccagaacaccaccgtctgccccaagccaatctaggatgacctctga

SEQ ID NO: 184811 - DNA, 873 bp, Homo Sapiens
  misc_feature (189)..(249): n is a, c, g, or t
  misc_feature (414)..(506): n is a, c, g, or t
ttggctggggcagtggcaacgaccacgtcctctgctggtgatcacaatggcatgctctctgtccctgcccctggggtgccccactctgatgtgggggagccacctgcctctactggggcccagcagccttctgcattagccgccctgcagccagcaaaggagcggcggagttcctcctcgtcgtcgtcnnnnnnnnnnnnnnnnnnnnnnnnnnnnnnnnnnnnnnnnnnnnnnnnnnnnnnnnnnnnnagttctagtgactcagagggctctagccttcctgtgcaacctgaggtggcactgaagagggtccccagccccaccccagccccaaaggaggctgttcgagagggacgtcctccggagccaaccccagccaaacggaagaggcgctctagcagttccagttccagnnnnnnnnnnnnnnnnnnnnnnnnnnnnnnnnnnnnnnnnnnnnnnnnnnnnnnnnnnnnnnnnnnnnnnnnnnnnnnnnnnnnnnnnnnnnngtcgtcttcctccccttcccctgctaagcctggccctcaggccttgcccaaacctgcaagccccaagaagccaccccctggcgagcggaggtgagtgctgtcttgcctgagttgaaaggtgggtgggggagtgacttgtccagagaaggggccctggggtgtgagctccccgctgggtgtctcacgtggccttgggcatctggttgtgggggaggaggcacttgctctcctctccccatgctcgttgcaccctgttctggcgaagggctgcgccatccacagcggcgctcaggccaggaccagggggtccttggtttcttcctctccctccctcaacacatagcctgttcccagggttctagctttg

SEQ ID NO: 184812 - DNA, 821 bp, Homo Sapiens
  misc_feature (709)..(718): n is a, c, g, or t
aaaagccaactttgtacaaaaaagttggcgcacatccacccctgcttcccacacacggggccgtgcgtgcctttcttcaccactgagctccttcaagggcagggactgtctttatctttgcatcccccgctgcaccctgtgcctgcccactgggcactcggtggatggtgtgcgggcggatgggtgagtgagcggacaaaggtgggtctgaggctggccctgtgtggtgtgaggtttggtggtcaggacctgggcgggtggtcctgagtgctggcccgtgtgcttgaaagggtgtggtgctattgggtcctactgtgttccccaggtcccgcagcccccggaagccaatagactccctcagggactctcggtccctcagctactcgcctgtggagcgtcgccgtccctcgccccagccctcaccacgggaccagcagagcagcagcagtgagcggggttcccggagaggccagcgtggggacagccgctcccccagccacaagcgcaggagggagacacctagccctcggcccatgagacaccgctcctccaggtctccataaattgtctttgggggattccaccacacccaatgctctggagccacaaggagtgtcccttcttccccagcagagccgtgggagggtccttgtctgctctcctttgaaccttggcagcccttggatggagggctccctttccctccccnnnnnnnnnnctttgttcctgtgaaatgttaatctccgtgagttcgtcctggttcatgtgttctggggggtttggggtgggagggaaatgcagatgggagttgggggagggga

SEQ ID NO: 184813 - DNA, 772 bp, Homo Sapiens
  misc_feature (222)..(279): n is a, c, g, or t
  misc_feature (466)..(577): n is a, c, g, or t
ttgggttgtttgattgcccagaccacccctgtagcagggtctcagtccctttcctctggggcagtggcaacgaccacgtcctctgctggtgatcacaatggcatgctctctgtccctgcccctggggtgccccactctgatgtgggggagccacctgcctctactggggcccagcagccttctgcattagccgccctgcagccagcaaaggagcggcggagnnnnnnnnnnnnnnnnnnnnnnnnnnnnnnnnnnnnnnnnnnnnnnnnnnnnnnnnnntcctcctcctcctctggctggcagttctagtgactcagagggctctagccttcctgtgcaacctgaggtggcactgaagagggtccccagccccaccccagccccaaaggaggctgttcgagagggacgtcctccggagccaaccccagccaaacggaagaggcgctctagcagttccagttccagnnnnnnnnnnnnnnnnnnnnnnnnnnnnnnnnnnnnnnnnnnnnnnnnnnnnnnnnnnnnnnnnnnnnnnnnnnnnnnnnnnnnnnnnnnnnnnnnnnnnnnnnnnnnnnnncctgctaagcctggccctcaggccttgcccaaacctgtaagccccaagaagccaccccctggcgagcggaggtgagtgctgtcttgcctgagttgaaaggagggtgggggagtgacttgtccagagaaggggccctggggtgtgagctccccgctgggtgtctcacgtggccttgggcatctggttgtgggggag

SEQ ID NO: 184814 - DNA, 3476 bp, Homo Sapiens
ttggcgccaagagaaagaagtggtgctgggtcatctccagaaacaaaagagcaaaatagtgcattgcctacgtcaagccaagatgaagagttaatggaggtggtagagaagtctgaagaacccgcaggccaaatcctgtctcatttgtcttcagaacttaaagaaatgtccacaagtaactttgaatcatctcctgaagtagaagaaaggcctgctgtgtctttgactcttgatcagagccagtcacaggcttctttggaagcagtagaagtcccttcaatggcctcatcttggggtgggccacatttttctccagaacataaagaactgtctaactccccactcagggagaacagctttggatcacctttagaatttagaaactcaggcccacttggtacagaaatgaatactggattttcttctgaggttaaagaagatttgaatggaccgtttcttaatcagctggaaacagatccatctctagacatgaaagaacaatcgacaagatcctctggacacagcagttctgagttatccccagatgcagtggaaaaggcagggatgtcttcaaatcagagcatctcttcacctgtgcttgatgctgtacccagaacaccctcgagagaaagaagtagttctgcatcttctcctgaaatgaaagatggtttacccagaactccatcaaggagaagcaggtctgggtcttctccaggacttagagatgggtctgggactccctcgaggcacagcctgtctgggtcctctcctggaatgaaagatatacctagaacgccatctagagggagaagcgaatgtgattcttccccagaaccgaaagctttgcctcagactcctaggccgaggagtcgttctccatcatccccagagctcaacaacaagtgtcttaccccccagagagaaagaagcgggtcagaatcatcagttgatcagaaaactgtggctcggactcccctggggcagagaagtcgttcgggatcctctcaagaacttgatgtgaaacccagtgcatcccctcaggaaagaagtgagtcagactcttctccagattctaaagccaagacacgaaccccacttcggcagaggagtcggtctggatcatctccagaggttgacagcaaatctcgactatcccctcggcgcagtaggtctggttcctcccctgaagtgaaagataagccaagagcagcacccagggcacagagtggttctgattcctctcctgaacctaaagctccagcccctcgggcccttcccagacgaagcagatcaggttcatcaagcaaaggcagaggcccttctcctgaaggaagcagcagtaccgagtcctctcctgaacatccgcccaaatccagaactgctcgcagaggttccaggtcatcaccagagcccaagaccaagtctcgtacaccacctcgacgtcgcagctctcgatcatctccggagctaacaaggaaggccagactgtcccgtagaagccgctctgcctcatcctcaccagaaactcgctctagaactcccccaaggcaccggagaagtccctcagtgtcttccccggagccagccgaaaaatcgaggtcttcacgccgacggcgctcagcttcatctccacgcactaagacaacctcaaggagaggccgctctccttcgccaaagcctcgtggactccagaggtcccgttcccgctcaaggagagagaaaacaagaacaacccgacgtcgagataggtctggatcttctcagtcaacctctcggcgaagacagcggagccggtcaaggtcgcgggttactcggcggcggaggggaggctctggttatcactcaaggtcacctgcccggcaggaaagttcccggacctcctctcgacgccgaagaggccgctctcggacacccccaaccagtcggaagcgttctcgctcacgcacatcaccagccccgtggaaacgctctagatctcgagcctctccagccactcaccggcgatccaggtccagaacccccctgataagccgacgtaggtccagatctcgaacttcaccagtcagccggagacggtcaaggtccaggacttcagtgactcgacgaagatcccggtcaagagcatccccagtgagcagaaggcgatccagatccagaacgccaccagtaacccgccgtcgttcaaggtctagaacgccaacaacacgccgccgctcccgttctagaactccaccagtgactcgcagaaggtccagatccaggactccaccagtaccaggaggcgatctcgaagcagaacttcgcctatcactcgcagaagatcaagatccagaacatctccggtcacccgaaggagatctcgatctcgcacatctccagtaactcgaagaaggtcccgctctcgaacctcaccagtgacacgccgccgctctaggtcccggacacctccagctattcggcgccgctctagatctcgaacgccactgttaccacgcaaacgttctcgaagtcgctcaccacttgctatccgccgccgctccagatcccgtactccacgaacagctcggggtaaacggtccttaacaagatctcctccagccatccgcaggcgttctgcatctggaagtagttctgatcgttcacgatctgctactcctccagcaacaagaaatcattctggttcacggacacctccagtagcactcaacagttccagaatgagctgcttcagtcgtcctagcatgtccccaacacctcttgatcgctgcagatcacctggaatgcttgaaccccttggcagctctagaacacccatgtctgtcctgcagcaagccggcggctccatgatggatggtccaggtccccgaatacctgaccaccagagaacatctgtgccagaaaatcatgctcagtccaggattgcacttgccctgacagctatcagtcttggcaccgctcggcctcctccgtccatgtctgctgctggccttgctgcaagaatgtcccaggttccagccccggtgcctctcatgagtctcagaaccgcaccagcagccaaccttgccagcaggattcctgcagcctctgcggcagccatgaacctagccagcgccaggacacctgccattccaacagcagtgaacctggctgactctcgaacgccagctgcagcagcggccatgaacttggccagccccagaacagcggtggcaccttcggctgtgaacctggctgaccctcgcactcccacagccccagctgtgaacctagcaggggccagaaccccagctgccttggcagctctgagtctcacaggctctggcacaccaccaactgctgcaaactatccctccagctccagaacaccacaggctccagcctctgcaaacctggtgggtcctcggtctgcacatgccacagctcctgtgaatattgccggctccagaaccgccgcagccttggccccggcgagcctc

SEQ ID NO: 184815 - DNA, 1009 bp, Homo Sapiens
tccctccccactccccaacccatccccaatacctcccccactgaagatttctaaaagtcaagctccctcacctcttcagtgccacctcaggttgcacaggaaggctagagccctctgagtcactagaactggagccagaggaggaggaggacgacgacgacgatgatgaagaggaggaggagctagaggacgacgacgacgaggaggaactccgccgctcctttgctggctgcagggcggctaatgcagaaggctgctgggccccagtagaggcaggtggctcccccacatcagagtggggcaccccaggggcagggacagagagcatgccattgtgatcaccagcagaggacgtggtcgttgccactgccccagaggaaagggactgagaccctgctacaggggtggtctgggcaatcaaacaacgggattggtctgaaaaagcagaaggcacaggagacctcggctgatcctgtgctggagggagaagagactgtgaaggagcctggcccattctagaggaaggggagggagcccgttcagaggtcatcctagattggcttggggcagacggtggtgttctggacctagctcggtcaaggagcggtggtgaggttctgccactgacacgctcgtaggcagaaaggggcaccctggggctggtgaggtttgcaccagacaatgctggagccatcctagcactggtgaggctcgcgggggccaaggctgcggcggttctggagccggcaatattcacaggagctgtggcatgtgcagaccgaggacccaccaggtttgcagaggctggagcctgtggtgttctggagctggagggatagtttgcagcagttggtggtgtgccagagcctgtgagactcagagctgccaaggcagctggggttctggcccctgctaggttcacagctggggctgtgggagtgcgagggtcagccaggttcacagccgaaggtgccaccgctgttctggggctggtgaggtttgcacccaa

SEQ ID NO: 184816 - DNA, 1867 bp, Homo Sapiens
ttgggtggaaccctcggtcacacgagaagctgcacatcgtcaactgtggtggagggcaccgttcgtgggcattctctgatactgaggcggccatggcctttgcttacctcaaggatggggatgtcatgctgtacagggctctgggtggctgcacccggccacacgtgattctccgggagggtctgcatggccgtgagatcacttgtgtaaagcgtgtgggcaccattaccctggggcctgaatatggagtgcccagcttcatgcagcctgatgacctggagcctggcagtgaggggcccgacttgactgacattgtgatcacatgtagtgaggacactactgtctgtgtcctagcactccctacaaccacaggctcagcccacgcactcacagctgtttgtaaccatatctcctcggtacgtgctgtggctgtgtggggcattggcaccccaggtggccctcaggatcctcagccaggcctgactgcccatgtggtgtctgcgggggggcgggctgagatgcactgcttcagcatcatggttactccggaccccagcaccccaagccgcctcgcctgccatgtcatgcacctttcgtcccaccggctagatgagtattgggaccggcaacgcaatcggcatcggatggttaaggtagacccagagaccaggtaatatatgctcctgggcagggtgtggtatgggtcatgcagatgctcccaggcttgcaggctccacctgacagctgcatgttgtctctgcaggtacatgtcccttgctgtgtgtgaacttgaccagcccggccttggcccccttgtggctgcagcctgtagtgatggggccgtaaggctctttcttttgcaggattctgggcggattctgcagctccttgctgaaaccttccaccataagcgatgtgtcctcaaggtccactcctttacacacgaggcacccaaccagaggcggaggctcctcctgtgcagcgcagctactgatggcagcctggctttctgggatctcaccaccatgctagaccatgactccactgtcctggagcctccagtggatcctgggcttccctaccggcttggcaccccctccctgactctccaggcccacagctgtggtatcaacagcctgcacaccttgcccacccgtgagggccaccatctcgtggccagtggcagtgaagatggatccctccatgtcttcgtgcttgctgtggagatgctacagctagaagaggctgtgggagaggctgggctggtaccccagctgcgtgtgctagaggaatactctgtcccctgtgcacatgctgcccatgtgacaggcctcaagatcctaagcccaagcatcatggtctcagcctccattgatcaacggctgaccttctggcgtctggggcatggtgaacccaccttcatgaatagcactgtgttccatgtgcctgatgtggctgacatggactgctggcctgtgagccctgagtttggccaccgttgtgcccttgggggtcaggggcttgaggtttacaactggtatgactgaggtatcctgcggtggctggcgtgctgggcatggggcctgctcacagacagcatggagcagggatgggctgtctgtgcccatgctcagcatgccttgaggggaggaggtggtggccgtgggttcctgatgtcggtgcaggagctgaaggtgagtggagtgctgccaagaatatgcccgactccccatgacaagacagaactttgtaacaaacagtaccaatttattttggcccgtgggtttttgctttttttccagttgatgactttgtgaacattcccaggtattggagcctctgtggccttaaatgtgggctcagtgga

SEQ ID NO: 184817 - DNA, 1417 bp, Homo Sapiens
ttggctctttttcagtttgctgaggggcacagccttccctgtctggcccagggcatctccaggccaggtggcaggtgccttctgaaccagatgtttgtgtgcgggctgccagtccatatttatactgccgggacatggctctccctgtctggagggcactatggagtgtggatatgggggtggctctctgcagacttgtgtggaggaaactgatggaggcagccatctccaggagatcagtcatggtcctggctgccatcagtttcatctgggtggtcttgggtacatgtggccaatactgaagatgcatttggacaattcatagacacggagctctaggtgcttttgggaaaagccatggatgggtttgggcaagtcatagatacatttggacgagccttgagtgtgttcaggagagccatggatgggttttggcaaagccatctctgcacctgtttgtgttccatggtttccttttcctcctctccaggcagggttaacacagagtatccccatcctgcggcgggaccatcacatccagagggccatcggtctctccccaatgtccttccccaccgccgaccttactctgaagatggagtctgcgcgcaaggcttgggaaaactcccccagtttgccggagcagagctctccaggcggcgctggctcaggcatccagcctccatcctctgtgggtgcctccagcggggtcaactacagctccttcggtggagtgtccatgccacccatgcctgtggcctctgtagcaccttctgcttctatgccaggcagccacctcccgcccctgtacctggatggccatgtgtttgcaagtcagccccggctggttcctcaaacgatacctcagcagcagagttaccaacaggccgccgctgcccagcagatcccgatctcccttcacacatctctgcaggcacaagctcagcttggactgaggggtgggcttcctgtgtcccagtcccaggagatcttcagctccttgcagcccttcagatctcaggtgtacatgcaccccagcctgtcaccgcccagcaccatgatcctctctgggggcacagccttgaagcctccatactcggcgttcccaggcatgcagcccttggagatggtgaagccgcagtctggctcaccctaccagcccatgagcgggaaccaagccctggtctacgagggccagctcagccaggctgctggcctgggtgcctcccagatgttggactcccagctcccacagctgaccatgccactgcctcggtacggctccgggcagcagccactgatcctgccccagtctattcagctgccacctgggcagagcctctccgttggggccccccgaaggattcctccgcccgggtcccagccgccagtcctgaacaccagcagagagccctct

SEQ ID NO: 184818 - DNA, 1427 bp, Homo Sapiens
ttggcagccgccgccgcagagccggagcgggggccgccggcgccgcatccctctctacctgccaacatcctgtattagagaacttgtggccggaggtgtggctgtggagagctggccggggagggacgctgctcagctgctgctctgctcctgtctcctgtcccctcccccggtcatgacagagacccgtgagccagctgagactgggggctacgccagcttggaagaagatgatgaagacctttccccaggccccgagcattcctctgattcagaatacactctctcagagccggactccgaagaggaagaagatgaggaggaggaggaagaggagaccactgacgatcctgaatatgatcctggctacaaggtgaagcagcgccttggcgggggccgtggtggcccatcccgccgggccccccgtgcagcccagcccccggcccagccttgccagctctgtggccgctcaccccttggggaggccccaccgggaaccccaccctgccggctctgctgccctgctacagccccccaggaagcaccagcccctgaaggcagggccctcggggaggaagaggaggaaccacctcgggctggggagggccgcccctgtacctggatggccatgtgtttgcaagtcagccccggctggttcctcaaacgatacctcagcagcagagttaccaacaggccgccgctgcccagcagatcccgatctcccttcacacatctctgcaggcacaagctcagcttggactgaggggtgggcttcctgtgtcccagtcccaggagatcttcagctccttgcagcccttcagatctcaggtgtacatgcaccccagcctgtcaccgcccagcaccatgatcctctctgggggcacagccttgaagcctccatactcggcgttcccaggcatgcagcccttggagatggtgaagccgcagtctggctcaccctaccagcccatgagcgggaaccaagccctggtctacgagggccagctcagccaggctgctggcctgggtgcctcccagatgttggactcccagctcccacagctgaccatgccactgcctcggtacggctccgggcagcagccactgatcctgccccagtctattcagctgccacctgggcagagcctctccgttggggccccccgaaggattcctccgcccgggtcccagccgccagtcctgaacaccagcagagagccctctcagatggagatgaaaggcttccactttgccgacagtaaacagaatgtcccttcagaggccccgtgccatcgccacagacctacaggcctagctctgctagccccagtgggaagccctctggatcagcagttaacatgggctctgtgcagggacactacgtgcacagcaaacaacgagtggatgagaaacccagcctgggagcc

SEQ ID NO: 184819 - DNA, 1503 bp, Homo Sapiens
ttggcacaaagacaatattggctcccagtacctgctcaactggtgtgtgcagatcgcaaagggcatgaactacttggaggaccgtcgcttggtgcaccgcgacctggcagccaggaacgtactggtgaaaacaccgcagcatgtcaagatcacagattttgggctggccaaactgctgggtgcggaagagaaagaataccatgcagaaggaggcaaagtgcctatcaagtggatggcattggaatcaattttacacagaatctatacccaccagagtgatgtctggagctacggggtgaccgtttgggagttgatgacctttggatccaagccatatgacggaatccctgccagcgagatctcctccatcctggagaaaggagaacgcctccctcagccacccatatgtaccatcgatgtctacatgatcatggtcaagtgctggatgatagacgcagatagtcgcccaaagttccgtgagttgatcatcgaattctccaaaatggcccgagacccccagcgctaccttgtcattcagggggatgaaagaatgcatttgccaagtcctacagactccaacttctaccgtgccctgatggatgaagaagacatggacgacgtggtggatgccgacgagtacctcatcccacagcagggcttcttcagcagcccctccacgtcacggactcccctcctgagctctctgagtgcaaccagcaacaattccaccgtggcttgcattgatagaaatgggctgcaaagctgtcccatcaaggaagacagcttcttgcagcgatacagctcagaccccacaggcgccttgactgaggacagcatagacgacaccttcctcccagtgcctgaatacataaaccagtccgttcccaaaaggcccgctggctctgtgcagaatcctgtctatcacaatcagcctctgaaccccgcgcccagcagagacccacactaccaggacccccacagcactgcagtgggcaaccccgagtatctcaacactgtccagcccacctgtgtcaacagcacattcgacagccctgcccactgggcccagaaaggcagccaccaaattagcctggacaaccctgactaccagcaggacttctttcccaaggaagccaagccaaatggcatctttaagggctccacagctgaaaatgcagaatacctaagggtcgcgccacaaagcagtgaatttattggagcatgaccacggaggatagtatgagccctaaaaatccagactctttcgatacccaggaccaagccacagcaggtcctccatcccaacagccatgcccgcattagctcttagacccacagactggttttgcaacgtttacaccgactagccaggaagtacttccacctcgggcacattttgggaagttgcattcctttgtcttcaaactgtgaagcatttacagaaacgcatccagcaagaatattgtccctttgagcagaaatttatctttcaagagtatattt

SEQ ID NO: 184820 - DNA, 960 bp, Homo Sapiens
aactttgtacaaaaaagttggttggcgacagtccactacctttttcgagagtgactcccgttgtcccaaggcttcccagagcgaacctgtgcggctgcaggcaccggcgcgtcgagtttccggcgtccggaaggaccgagctcttctcgcggatccagtgttccgtttccagcccccaatctcagagcggagccgacagagagcagggaaccggcatggccaaagccgcggcgatcggcatcgacctgggcaccacctactcctgcgtgggggtgttccaacacggcaaggtggagatcatcgccaacgaccagggcaaccgcaccacccccagctacgtggccttcacggacaccgagcggctcatcggggatgcggccaagaaccaggtggcgctgaacccgcagaacaccgtgtttgacgcgaagcggctgatcggccgcaagttcggcgacccggtggtgcagtcggacatgaagcactggcctttccaggtgatcaacgacggagacaagcccaaggtgcaggtgagctacaagggggagaccaaggcattctaccccgaggagatctcgtccatggtgctgaccaagatgaaggagatcgccgaggcgtacctgggctacccggtgaccaacgcggtgatcaccgtgccggcctacttcaacgactcgcagcgccaggccaccaaggatgcgggtgtgatcgcggggctcaacgtgctgcggatcatcaacgagcccacggccgccgccatcgcctacggcctggacagaacgggcaagggggagcgcaacgtgctcatctttgacctgggcgggggcaccttcgacgtgtccatcctgacgatcgacgacggcatcttcgaggtgaaggccacggccggggacacccacctgggtggggaggactttgacaacaggctggtgaaccacttcgtggaggagttcaagagaaaac

SEQ ID NO: 184821 - DNA, 924 bp, Homo Sapiens
ttggcttggttcgaggtggccgttagttgactccgcggagttcatctccctggttttcccgtcctaacgtcgctcgcctttcagtcaggatgtctgcccgtggcccggctatcggcatcgacctgggcaccacctattcgtgcgtcggggtcttccaacatggcaaggtggagatcatcgccaacgaccagggcaatcgcaccacccccagctacgtggccttcacggacaccgagcgcctcatcggcgacgccgccaagaaccaggtggccatgaaccccaccaacaccatcttcgacgccaagaggctgattggacggaaattcgaggatgccacagtgcagtcggatatgaaacactggccgttccgggtggtgagcgagggaggcaagcccaaagtgcaagtagagtacaagggggagaccaagaccttcttcccagaggagatatcctccatggtcctcacgaagatgaaggagatcgcggaagcctacctggggggcaaggtgcacagcgcggtcataacggtcccggcctatttcaacgactcgcagcgccaggccaccaaggacgcaggcaccatcacggggctcaatgtgctgcgcatcatcaacgagcccacggcggcggccatcgcctacggcctggacaagaagggctgcgcgggcggcgagaagaacgtgctcatctttgacctgggcggtggcactttcgacgtgtccatcctgaccatcgaggatggcatcttcgaggtgaagtccacggccggcgatacccacctgggcggtgaggacttcgacaaccgcatggtgagccacctggcggaggagttcaagcgcaagcacaagaaggacattgggcccaacaagcgcgccgtgaggcggctgcgcaccgcttgcgagcgcgcaagcgcaccctgagctc

SEQ ID NO: 184822 - DNA, 1613 bp, Homo Sapiens
ttgtacaaaaaagttggccccaatctcagagccgagccgacagagagcagggaaccggcatggccaaagccgcggcgatcggcatcgacctgggcaccacctactcctgcgtgggggtgttccaacacggcaaggtggagatcatcgccaacgaccagggcaaccgcaccacccccagctacgtggccttcacggacaccgagcggctcatcggggatgcggccaagaaccaggtggcgctgaacccgcagaacaccgtgtttgacgcgaagcggctgatcggccgcaagttcggcgacccggtggtgcagtcggacatgaagcactggcctttccaggtgatcaacgacggagacaagcccaaggtgcaggtgagctacaagggggagaccaaggcattctaccccgaggagatctcgtccatggtgctgaccaagatgaaggagatcgccgaggcgtacctgggctacccggtgaccaacgcggtgatcaccgtgccggcctacttcaacgactcgcagcgccaggccaccaaggatgcgggtgtgatcgcggggctcaacgtgctgcggatcatcaacgagcccacggccgccgccatcgcctacggcctggacagaacgggcaagggggagcgcaacgtgctcatctttgacctgggcgggggcaccttcgacgtgtccatcctgacgatcgacgacggcatcttcgaggtgaaggccacggccggggacacccacctgggtggggaggactttgacaacaggctggtgaaccacttcgtggaggagttcaagagaaaacacaagaaggacatcagccagaacaagcgagccgtgaggcggctgcgcaccgcctgcgagagggccaagaggaccctgtcgtccagcacccaggccagcctggagatcgactccctgtttgagggcatcgacttctacacgtccatcaccagggcgaggttcgaggagctgtgctccgacctgttccgaagcaccctggagcccgtggagaaggctctgcgcgacgccaagctggacaaggcccagattcacgacctggtcctggtcgggggctccacccgcatccccaaggtgcagaagctgctgcaagacttcttcaacgggcgcgacctgaacaagagcatcaaccccgacgaggctgtggcctacggggcggcggtgcaggcggccatcctgatgggggacaagtccgagaacgtgcaggacctgctgctgctggacgtggctcccctgtcgctggggctggagacggccggaggcgtgatgactgccctgatcaagcgcaactccaccatccccaccaagcagacgcagatcttcaccacctactccgacaaccaacccggggtgctgatccaggtgtacgagggcgagagggccatgacgaaagacaacaatctgttggggcgcttcgagctgagcggcatccctccggcccccaggggcgtgccccagatcgaggtgaccttcgacatcgatgccaacggcatcctgaacgtcacggccacggacaagagcaccggcaaggccaacaagatcaccattcaccaacgacaagggccgcctgagcaagagggagatcgagcgcat

SEQ ID NO: 184823 - DNA, 2164 bp, Homo Sapiens
  misc_feature (2027)..(2037): n is a, c, g, or t
ttggcaacacattgcctaagaatcctggtgacaaaaagcctgtcaaatccgagacctctccagtagctccaagggcagggtcacaacagaaagctcagtccctgccacagccccagcagcagccaccaccagcacataaaatcaaccagggactacaggttcccgccgtgtccctttatccttcacggaagaaagtgcccgtaaaggatctcccaccttttggcataaactctccacaagctttaaaaaaaattctttctttgtctgaagaaggaagtttggaacgtcacaagaaacaggctgaagatacaatatcaaatgcatcttcgcagctttcttctcctcctacttctccacagagttctccaaggaaaggctatactttggctcccagtggtactgtggataatttttcagattctggtcacagtgaaatttcttcacgatccagtattgttagcaattcgtcttttgactcagtgccagtctcactgcacgatgagaggcgccagaggcattctgtcagcatcgtggaaacaaacctagggatgggcaggatggagaggcggaccatgattgaacctgatcagtatagcttggggtcctatgcaccaatgtccgagggccgaggcttatatgctacagctacagtaatttcttctccaagcacagaggaactttcccaggatcagggggatcgcgcgtcacttgatgctgctgacagtggccgtgggagctggacgtcatgctcaagtggctcccatgataatatacagacgatccagcaccagagaagctgggagactcttccattcgggcatactcactttgattattcaggggatcctgcaggtttatgggcatcaagcagccatatggaccaaattatgttttctgatcatagcacaaagtataacaggcaaaatcaaagtagagagagccttgaacaagcccagtcccgagcaagctgggcgtcttccacaggttactggggagaagactcagaaggtgacacaggcacaataaagcggaggggtggaaaggatgtttccattgaagccgaaagcagtagcctaacgtctgtgactacggaagaaaccaagcctgtccccatgcctgcccacatagctgtggcatcaagtactacaaaggggctcattgcacgaaaggagggcaggtatcgagagcccccgcccacccctcccggctacattggaattcccattactgactttccagaagggcactcccatccagccaggaaaccgccggactacaacgtggcccttcagagatcgcggatggtcgcacgatcctccgacacagctgggccttcatccgtacagcagccacatgggcatcccaccagcagcaggcctgtgaacaaacctcagtggcataaaccgaacgagtctgacccgcgcctcgccccttatcagtcccaagggttttccaccgaggaggatgaagatgaacaagtttctgctgtttgaggcacagacttttctggaagcagagcgagccacctgaaaggagagcacaagaagacgtcctgagcattggagccttggaactcacattctgaggacggtggaccagtttgcctccttccctgccttaaaagcagcatggggcttcttctccccttcttcctttcccctttgcatgtgaaatactgtgaagaaattgccctggcacttttcagactttgttgcttgaaatgcacagtgcagcaatcttcgagctcccactgttgctgcctgccacatcacacagtatcattccaaattccaagatcatcacaacaagatgattcactctggctgcacttctcaatgcctggaaggattttttttaatcttccttttagatttcaatccagtcctagcacttgatctcattgggataatgagaaaagctagccattgaactacttggggcctttaacccaccaaggaagacaaagaaaaacaatgaaatcctttgagtacagtgcttgtccacttgtttacaatgtcctccttttnnnnnnnnnnntgagtttaaagattttgttcagagagtaaatatatatccatttaatgattacagtattattttaaaccttaagtagggttgccagcctggtttctgaaaaaccaaatatgccggacagggtgtggcc

SEQ ID NO: 184824 - DNA, 1964 bp, Homo Sapiens
  misc_feature (1104)..(1112): n is a, c, g, or t
  misc_feature (1609)..(1643): n is a, c, g, or t
ttggcacattcttcttacaccagctgctatggcaatgtctataatcctttaccctctccaagcagacaatacacagaaatcagtcaactggatggtacagatggaaaccagctggaagacaacctggagagtagtgagcagagactcttttggcatgaagattcaaagcctggaacattagtctgaactgcagttggacctcctgaccaagcactgcgttctcacactagtgtgccttgcaaattgtatttgtcttccgagaggatgttcgttttagaaacctaaagacatcaaaggttgaagagaagacttagttgccctggaagtgaatcagtgaatcacacaccaagccccacaaagcccctaaaggaggatttggcctttcaaactctaggcactaacgtaactgtagggtctgcccacatgttgaagtattgccaagagaggactcagtgtgaagccttcatcaatagcaagcactttttaagggagtaaaagttgttaaaggcaaacgtcaaaaacatgaaagggcattcaggatgtcccatggcaataagaacaggggaaatctcagagcacaattcagcaggatgagagaaggggaaccagaagctccggagtcattgctcacttcagagtttgaattcgtgagctgacaaagagtaacatgctctttctacacagacatggacaatttagacagtattggaaaattacttgaagctggattttcatgaagttctgaatgagtgtaaatgttttttagatactataaagagtgatgtttttcataagcaccataaaatgggttctggaaaaactgattaccttagcatcctgtaatataacttatggtagcagattggggaaaatgaagcagcccactgaataattgacaaagtctgcttggagaacattctaaggtacaatatcatggagctcctttttcctttctccactaattgcgtgatgagctattgttctggctggtaattctccaactcggctgtcatttgaagtggcagacttaatatggaaagtttttataattatgagtttgaaaaagcattttaagatgatacagaaagtatccaaaacaacagnnnnnnnnngccacgtcattttagatgaattgcgtgccttaaaatggtgaacgttagaaaattaaacaagtctggattccacaagtagttccaagtcaccaagtgacaaaaacaaggttaacattaaaaaagaaaaacaacaacaacgacaaaaagctccaagctgcagtggatttaattatgaggctaaaactacctcatactttccttggaagaactaattagctatggtttattgtagggttttgtttgtttgttttttaaagcaaatgatttccatattcctgattgatcttttttgtcatctttgcttcaaaattacataaaaggtgctcctttcccccttcttttatacaagtttcttgttcatattgtgaatagaaaagtttctgaacaacttttttggaacattttctatctatattccaaagcatgtaatatatacataaaaacgatttgttaaactggtccttagtcatttgtataattagaaatgaagtttgggnnnnnnnnnnnnnnnnnnnnnnnnnnnnnnnnnnntaacttattccttttttgcatatttgtatagccttctagaatcagaaataacctttttgcatattcttttattgttctgacttttcaagacctattatttttttacataggtcaataaacaaaaggtgtgctactgaaaatgtttacgttttcttccatttatgtcaggggttcatgtgaagcaggtcgcagtgctctacttcaagtaatcatattgggcaaggcttcggatttttatttatagtattaccgtattttattaattccgggatgtacatttttaaatatttacattaaaaacatagttcatctttttattga

SEQ ID NO: 184825 - DNA, 865 bp, Homo Sapiens
ttggcgggcggcagggcctgtgtgtgctgaggcggctgagcggcggacatgcacaccacagagcgtggcgatggaacagtaaccgggcttgtgagagggctctgcagtataaactaggagacaagatccatggattcaccgtaaaccaggtgacatctgttcccgagctgttcctgactgcagtgaagctcacccatgatgacacaggagccaggtatttacacctggccagagaagacacgaataatctgttcagcgtgcagttccgtaccactcccatggacagtactggtgtccctcacattcttgagcataccgtcctttgtgggtctcagaaatatccgtgcagagaccctttcttcaaaatgttgaaccggtccctctccacgttcatgaacgccttcacagctagtgattatactctgtatccattttccacacaaaatcccaaggactttcagaatctcctctcggtgtatttggatgccacctttttcccatgtttacgcgagctggatttctggcaggaaggatggcggctggaacatgagaatccgagcgacccccagacgcccttggtctttaaaggagtcgtctttaatgagatgaagggagcgtttacagacaatgagaggatattctcccagcaccttcagaacagacttcttcccgaccacacgtactcagtggtctccgggggtgacccactgtgcatcccggagcttacatgggagcagcttaagcagtttcatgccactcactatcacccaagcaatgctaggttcttcacgtacggtaattttccattagaacagcatctgaaacaaattcacgaggaagcactgagcaaattctagaaaattga

SEQ ID NO: 184826 - DNA, 1295 bp, Homo Sapiens
aggaataattgctaaccaccgagatgtcagaaagagcaaatccaagttttctttggacttcctctagcttggacctcacaggctcacatctctctatttctataaggtcaccttttgtaatcaaatccatgctatccacatgagtgagcaaagccacatgtaccacaccagcgtttaccaactcccttcgaattcttttgatctttactatcatctgagaggagaagtattgaatagagctggcatcaaatacaaatgccacacaatgaattctgtccttcagcgatggggaatcaatgtagtcatgatgatttaatttgattgattccatgggattaaactggtatctatcacgaatgttaccgttcaagatatagaatatgtcatccctgcacaggccgccttctttctcactcagccccagtgagtcacacagaataaacggcaggtatttgccatctttcccgtctctaatagagtatgtcctatacttctcagatatcccagttgtattagtgcccaccaaagcctgatgcgttacatgcccttggaaaacagacctcactgagttgaaaaagctggacttcccagctccaattggacccagcagcagaattcgtatttgttgaaccagggatccatatggttcataagttctcaaggcagacagtaagctcttcctgagctcaatgaccccttttatctttctttcatccagtgaatcttcgcatcgaaaaacttcataatcctgaatagagatagtacaattttgagcaagtccaagattttccattgtctttaagtccataatcacttttctatttcttccatctatctggaaattagttggggagttatattttgtaacatcacaacaaaacagtgtttctggtgtacatagtcctagtttccattctgaaattttagtatcttgaagtgcaaaaaggatgatggaagcatactttccttcctggtaactctcttctgcatatgctccaataatatgatcttcactataaatcactgttagagtaggcccttgattacaacatctgtcaagcaaaactccattacggaatccatggacactacccttatagagaaggctaagccgcttccctccaaaatgattttgcaggatcttttcgtgcaaccatgtcaaacgagttgtcactgccatacttcttgatctgttgtactgtctgtagtatcagctagagctgagggtagctgctctgtctggatcaatccaacttttttgtacaaagtcccctttatatagtaaagcattgctc

SEQ ID NO: 184827 - DNA, 838 bp, Homo Sapiens
  misc_feature (269)..(278): n is a, c, g, or t
  misc_feature (472)..(497): n is a, c, g, or t
ttggttcttgaagaagtataattgtaaataagccatgtaaaatgcctttttaaaatttaattttctagctggctccaattcaaattgaggatttatgtattaggccacttacttggttggcaagtgcaggaactcagttaaaatgcagttgaagaatgtcatctcccgaattgctgtcactttggcgagggagtggatatagggcatgtcacaaaagaacaaaataacccgacctttattgctgggagctggcttctgtccctttcttnnnnnnnnnnacgagtcttgcccttgacttctgctctggattcactcttccctgtcggccgcgcatgtgctcatcccactctccgctaagcgggaggctgctgttagagcaggctgcttcctgcctaaagcaggcccttcggggctcgctgcacacacatctctggctctccaggcttcgtgttctgtcttttcatcagcatgnnnnnnnnnnnnnnnnnnnnnnnnnntgtgtatgggaatccctccccctcttactttttctcttgtggaacttggccacagtttctgaacaatgtgcctacattaccagctggcttcagtgattcctctgtgtccctttttggtttctggaaagattctttgtcaacattagtaactgatacatagaaccaaggagcactcaaatagggagccaggagccagggagctggtgacacttgtgtgctgtggggcagctgggatccaggtaagaccggattgaagctttgaaattagactaacaaagctccagacagcaagagcccaggtgcactgctcacacccccacctgcattttgaagtcatatta

SEQ ID NO: 184828 - DNA, 2591 bp, Homo Sapiens
actttgtacaaaaaagttgggccaggaggaggaagccggcggtggccccgtcagcagccggctgctgagaggccggtaggcggcggcggtcccgaggggcggcggccgcgctgctccctgagaacgggtcccgcagctgggcaggcgggcggcctgagggcgcggagccatgaagctgtacagcctcagcgtcctctacaaaggcgaggccaaggtggtgctgctcaaagccgcatacgatgtgtcttccttcagctttttccagagatccagcgttcaggaattcatgaccttcacgagtcaactgattgtggagcgctcatcgaaatgcactagagcttctgtcaaagaacaagactatctgtgccacgtctacgtccggaatgatagtcttgcaggtgtggtcattgctgacaatgaatacccatcccgggtggcctttaccttgctggagaaggtagatgaattctccaagcaagtcgacaggatagactggccagtaggatcccctgctacaatccattacccagccctggatggtcacctcagtagataccagaacccacgagaagctgatcccatgactaaagtgcaggccgaactagatgagaccaaaatcattctgcacaacaccatggagtctctgttagagcgaggtgagaagctagatgacttggtgtccaaatccgaggtgctgggaacacagtctaaagccttctataaaactgcccggaaacaaaactcatgctgtgccatcatgtgatgcagcctgccagaggcccaatgctggaatggcaccatcattcacatcagaactgcagcccctggaaaagaagagacagccatagacgaggagccagagtgggggcagactggccatttttattttgaagttcctgcgagaaatggatggtggaagggtggcgaatgttcaaattcatatgtgtggtagtgattcttggaaagaatttgaggtccccaaaggtgtatttttgggcaaatgaaaccataaactccgactggcttctgtagatgccaaagggctctttttcagctaaccctgggaaggctctgtgggagggaggtcggagccagctgtttctcgatctttggtatatctttggatcttatttgtacattaatgatattaacactccagtggggggtggggagtccctgatgctagggctggggtgggtggagtttgaagactcttgggaaagcctctcctggggccactgttgggggtgggagtgagcccaccacagaggccacaggcaggcccccacttcaggcccaaggcctggggcggggggaacagtcactgggtctcagattctgagactgttgtttagcttacctttctgctaggattggcttcccgcagagggcagggcccatcctaagcagcttccaagtcccacaaaggtggcttgtgggaggatttggaaggagctgcattgtgggcggggagtgtgtgggttgggttcgtaccagcaagtagactaggaactgagcccaggaaagggggatgttttcctggtgtttggatggtcagctgggagtgtccatcatcaggggaagatcaaacacaggtgcactcagctgcccagggcctctgggacacttgccttgacttgcaacttgccttgaacatcacgatcaaagcagcaggtgctgtggtctctcaaaattgatttttatttgactctgtggctctaagactgccttgaaccgcctgaggcctatgcatctgaacaagtgggtctctcccttgagcaccaggagtgggtgccagccggccccgaggattcccagcaccccacctatggtcttgccagcataggcttgctagttccttcttggtcagaggtagctgcagaggggggaggccaagggtttggtctaagctgtgccctgccacctggcaggaggcccactcactgcccaagtcatggcaacaggctggagcagcccaggagatgggcctaaaatgttctggatcccttgggtcctagtgttatgttccagtctgcccacctgtgctcaggatgcagccctgggatccagcacccatggaagcttctgctgggatggtgtcacctatgggttttgaaccagtgtggtatggtccttgggagctctgctctgagcttgccacactgctgagagcacccactgtcctgaccagagtctcagtggtcctgacccccaatgtgggcaggggctgggcaggagggtggggtctgctgtgggttcagaggactccacctcctggctggtttacctgctgctgcccattttctctgggtactgctggccagaggactttagcctacccctgaagagcctgtccatgtcattttcctactgccatagataccctaagcccagggccccttgaggcccagactcagcctgcccactggtgccggagacggagtggagtgggcctggatccgagggatgctacctctccctttcccacttgaggaccctggggagagatgggggcgggggaaaatgggaggtatgaatttggggtaagaggaaagtgaaatctcccgcttgtcggtcagcccctgcccttg

SEQ ID NO: 184829 - DNA, 1088 bp, Homo Sapiens
  misc_feature (878)..(914): n is a, c, g, or t
atttaaaatcatattgaccaagacttactacaaattcacttgaatggtggctacaaacatcacaaagaatgaatctgacttccatgtctatgtgtgagaaaaatattctaacaaccaatttaattttaaaagaaattaaaccaaagataaataagaattatccagcaaacaggaatagtaacaactatcctattttaaagtttcagttagataaattatgtttcaaaaatctttacataaaaacctctaatactaccactcataaatcataaaatgtaactggtagtatatttatttttttacccaatcacattttagactcataataaaaatctactacttagagaaaataaatttgacaatttattcaaacattgttacataagaagttttaagaaactgtaaataattcttaatactctcattttgattttccgacttctcaagactattttgtacttctttcaaacacacttcctgatgttgtgctttactgttcattttgcaaacaagttgattttgttcttcatttttctttctaagctcagtttccagatctaatattttaatttgtaaagcactctctctagatgacattttctctatttcttcagcaaccttttgtcttccttcttctaaagcagcttccagttgtctggccaatgctgtatattctgcagatttctctttaaacttaagattgctgtgcttaagacattcttcttggtttgccagcttcttctcaagctctttattttctgcgtccatctgttctaatttttgttgaaggttttcacacttcagctgaataagacagttttcctcttccagagaaagctttgtcagaagattgtgatttccatcaaccttctctacannnnnnnnnnnnnnnnnnnnnnnnnnnnnnnnnnnnngtagcaaattttcacatctgctttttactatttcagctgcttcttgcaacttttgtacctgagttttatacatttcaataagggttttctgttttttttctacttcttgcaattctgagagttcattttcaacagatacaacttcatccttcaaagcagcaagtgtagtcccaa

SEQ ID NO: 184830 - DNA, 2774 bp, Homo Sapiens
  misc_feature (879)..(909): n is a, c, g, or t
  misc_feature (1478)..(1486): n is a, c, g, or t
  misc_feature (1547)..(1575): n is a, c, g, or t
ttggctgcaccttttcctgggctctgctggaggccttgcacctgtaccgggcactcactgaggtgcgcgatgtcaacaccggccccatgcgcttctactacatgctgggctggggcgtgcctgccttcatcacagggctagccgtgggcctggaccccgagggctacgggaaccctgacttctgctggctctccatctatgacacgttcatctggagttttgctggcccggtggcctttgccgtctcgatgagtgtcttcctgtacatcctggcggcccgggcctcctgtgctgcccagcggcagggctttgagaagaaaggtcctgtctcgggcctgcagccctccttcgccgtcctcctgctgctgagcgccacgtggctgctggcactgctctctgtcaacagcgacaccctcctcttccactacctctttgctacctgcaattgcatccagggccccttcatcttcctctcctatgtggtgcttagcaaggaggtccggaaagcactcaagcttgcctgcagccgcaagcccagccctgaccctgctctgaccaccaagtccaccctgacctcgtcctacaactgccccagcccctacgcagatgggcggctgtaccagccctacggagactcggccggctctctgcacagcaccagtcgctcgggcaagagtcagcccagctacatccccttcttgctgagggaggagtccgcactgaaccctggccaagggccccctggcctgggggatccaggcagcctgttcctggaaggtcaagaccagcagcatgatcctgacacggactccgacagtgacctgtccttagaagacgaccagagtggctcctatgcctctacccactcatcagacagtnnnnnnnnnnnnnnnnnnnnnnnnnnnnnnnccgccttccctggagagcagggctgggatagcctgctggggcctggagcagagagactgcccctgcacagtactcccaaggatgggggcccagggcctggcaaggccccctggccaggagactttgggaccacagcaaaagagagtagtggcaacggggcccctgaggagcggctgcgggagaatggagatgccctgtctcgagaggggtccctaggcccccttccaggctcttctgcccagcctcacaaaggcatccttaagaagaagtgtctgcccaccatcagcgagaagagcagcctcctgcggctccccctggagcaatgcacagggtcttcccggggctcctccgctagtgagggcagccggggcggcccccctccccgcccaccgccccggcagagcctccaggagcagctgaacggggtcatgcccatcgccatgagcatcaaggcaggcacggtggatgaggactcgtcaggctccgacagcgacgaaacgtccatctgaggagcctgggccttgccgggaggggtactcaccccacctaaggccatctagtgccaactnnnnnnnnnaccattcccctcactgcactttggacccctggggccaacatctccaagacaaagtttttcnnnnnnnnnnnnnnnnnnnnnnnnnnnnnggatctccactcttcatgacttcagggattcattttttttatacgctggaaattgactcccctttcccttcccaaagaggataggacctcccaggatgcttcccagcctctcctcagtttcccatctgctgtgcctctgggaggagagggactcctggggggcctgcccctcatacgccatcaccaaaaggaaaggacaaagccacacgcagccagggcttcacacccttcgggctgcacccgggcaggcctcagaacggtgaggggccagggcaaagggtgtgcctcgtcctgcccgcactgcctctcccaggaactggaaaagccctgtccggtgagggggcagaaggactcagcgcccctggacccccaaatgctgcatgaacacattttcaggggagcctgtgcccccaggcgggggtcgggcagccccagcccctctccttttcctggactctggccgtgcgcggcagcccaggtgtttgctcagttgctgacccaaaagtgcttcatttttcgtgcccgccccgcgccccgggcaggccagtcatgtgttaagttgcgcttctttgctgtgatgtgggtgggggaggaagagtaaacacagtgctggctcggctgccctgagggtgctcaatcaagcacaggtttcaagtctgggttctggtgtccactcacccaccccaccccccaaaatcagacaaatgctactttgtctaacctgctgtggcctctgagacatgttctatttttaaccccttcttggaattggctctcttcttcaaaggaccaggtcctgttcctctttctccccgactccaccccagctccctgtgaagagagagttaatatatttgttttatttatttgctttttgcgttgggatgggttcgtgtccagtcccgggggtctgatatggccatcacaggctgggtgttcccagcagccctggcttgggggcttgacgcccttccccttgccccaggccatcatctccccacctctcctcccctctcctcagttttgccgactgcttttcatctgagtcaccatttactccaagcatgtattccagacttgtcactgactttccttctggagcaggtggctagaaaaagaagctgtgggcaggaaagaaaggctcctgtttctcatttgtgaagccagcctctggcttttctgccgtggatttctccccc

SEQ ID NO: 184831 - DNA, 2560 bp, Homo Sapiens
  misc_feature (2110)..(2127): n is a, c, g, or t
ttggtgcagtaagtcccgcttggccctggagtccacgcggattttcgaagctggggctggcaagaggccgctggacaccacgctccagtcgtcagcccacttcctagctgaacagcgcgaggcggcggcagcgagccgggtcccaccatggccgcgaattattccagtaccagtacccggagagaacatgtcaaagttaaaaccagctcccagccaggcttcctggaacggctgagcgagacctcgggtgggatgtttgtggggctcatggccttcctgctctccttctacctaattttcaccaatgagggccgcgcattgaagacggcaacctcattggctgaggggctctcgcttgtggtgtctcccgacagcatccacagtgtggctccggagaatgaaggaaggctggtgcacatcattggcgccttacggacatccaagcttttgtctgatccaaactatggggtccatcttccggctgtgaaactgcggaggcacgtggagatgtaccaatgggtagaaactgaggagtccagggagtacaccgaggatgggcaggtgaagaaggagacgaggtattcctacaacactgaatggaggtcagaaatcatcaacagcaaaaacttcgaccgagagattggccacaaaaaccccagtgccatggcagtggagtcattcatggcaacagccccctttgtccaaattggcaggtttttcctctcgtcaggcctcatcgacaaagtcgacaacttcaagtccctgagcctatccaagctggaggaccctcatgtggacatcattcgccgtggagactttttctaccacagcgaaaatcccaagtatccagaggtgggagacttgcgtgtctccttttcctatgctggactgagcggcgatgaccctgacctgggcccagctcacgtggtcactgtgattgcccggcagcggggtgaccagctagtcccattctccaccaagtctggggataccttactgctcctgcaccacggggacttctcagcagaggaggtgtttcatagagaactaaggagcaactccatgaagacctggggcctgcgggcagctggctggatggccatgttcatgggcctcaaccttatgacacggatcctctacaccttggtggactggtttcctgttttccgagacctggtcaacattggcctgaaagcctttgccttctgtgtggccacctcgctgaccctgctgaccgtggcggctggctggctcttctaccgacccctgtgggccctcctcattgccggcctggcccttgtgcccatccttgttgctcggacacgggtgccagccaaaaagttggagtgaaaagaccctggcacccgcccgacacctgcgtgagccctaggatccaggtcctctctcacctctgacccagctccatgccagagcaggagccccggtcaattttggactctgcaccccctctcctcttcaggggccagacttggcagcatgtgcaccaggttggtgttcaccagctcatgtcttccccacatctcttcttgccagtaagcagctttggtgggcagcagcagctcatgaatggcaagctgacagcttctcctgctgtttccttcctctcttggatgagtgggtacggccagccactcagcccattggcagctgacaacgcagacacgctctacggaggcctgctgataaagggctccgccttgccgtgtgctgcttctcatcactgcacacaagtgccatgctttgccaccaccaccaagcacatctgtgatcctgaagggcggccgttagtcattactgctgagtcctgggtcaccagcagacacactgggcatggacccctcaaagcaggcacacccaaaacacaagtctgtggctagaacctgatgtggtgtttaaaagagaagaaacactgaagatgtcctgaggagaaaagctggacatatactgggcttcacacttatcttatggcttggcagaatctttgtagtgtgtgggatctctgaaggccctatttaagtttttcttcgttactttgctgcttcatgtgtactttcctaccccaagaggaagttttctgaaataagatttnnnnnnnnnnnnnnnnnnccacttaatatttcagactgttacaggaaacaccctttagtctgtcagttgaattcagagcactgaaaggtgttaaattggggtatgtggtttgattgataaaaagttacctctcagtattttgtgtcactgagaagctttacaatggatgcttttgaaacaagtatcagcaaaaggatttgttttcactctgggaggagagggtggagaaagcacttgctttcatcctctggcatcggaaactcccctatgcacttgaagatggtttaaaagattaaagaaacgattaagagaaaaggttggaagctttatactaaatgggctccttcatggtgacgctccgtcaaccacaatcaagaactgagtctgaggctggttgtacaatgcccacgcctgcctggctgctttcactgggagtgctttcgatgtgggc

SEQ ID NO: 184832 - DNA, 1248 bp, Homo Sapiens
  misc_feature (125)..(143): n is a, c, g, or t
ttggcttggcagaatctttgtagtgtgtgggatctctgaaggccctatttaagtttttcttcgttactttgctgcttcatgtgtactttcctaccccaagaggaagttttctgaaataagatttnnnnnnnnnnnnnnnnnnncacttaatatttcagactgttacaggaaacaccctttagtctgtcagttgaattcagagcactgaaaggggttaaattggggtatgtggtttgattgataaaaagttacctctcagtattttgtgtcactgagaagctttacaatggatgcttttgaaacaagtatcagcaaaaggatttgttttcactctgggaggagagggtggagaaagcacttgctttcatcctctggcatcggaaactcccctatgcacttgaagatggtttaaaagattaaagaaacgattaagagaaaaggttggaagctttatactaaatgggctccttcatggtgacgccccgtcaaccacaatcaagaactgaggcctgaggctggttgtacaatgcccacgcctgcctggctgctttcacctgggagtgctttcgatgtgggcacctgggcttcctagggctgcttctgagtggttctttcacgtgttgtgtccatagctttagtcttcctaaataagatccacccacacctaagtcacagaatttctaagttccccaactactctcacacccttttaaagataaagtatgttgtaaccaggatgtcttaaatgattctttgtgtaccttttctgtcatattcagaaaccgttttgtgcctgctgggagtaattcctttagcaattaagtatttggtagctgaataaggggtcagaacttctgaaaccagagatctgtaatcatctctattggcctggggtgcctgtgctataaatgagtttcttcacatgaaaaacacagccagcccaagatgacttatctgggtttaggattcaatagtattcactaactgcttattacatgagcaatttcatcaaatctccaaactcttaaaggatgctttcggaaaacacgctgtatacctagatgatgactaaatgcaaaatccttgggctttggtttttttctagtaaggattttaaataactgccgacttcaaaagtgttcttaaaacgaaagataatgttaagaaaaatttgaaagctttggaaaaccaaatttgtaatatcattgtttttttattaaaagttttgtaataaatttctaaattatc

SEQ ID NO: 184833 - DNA, 2577 bp, Homo Sapiens
  misc_feature (1727)..(1735): n is a, c, g, or t
ttggatcgggaagtgtcaagcgggcgctcccccatctccgccgctattaccactgaacccggaccccctacccaggtccagggccagccgccatgacgaacgtgtactccttggatgggattctggtgtttggtttgctctttgtttgcacctgtgcctacttcaagaaagtacctcgtctcaaaacctggctgctatcagagaagaagggtgtttggggtgtgttttacaaagccgctgtgattggaaccaggctgcatgctgctgtggcaattgcttgtgttgtaatggccttttacgtcctgtttataaaatgaattccaaagcacccaagtcatcaactgccaaccaaggggacggggatgaagaacctgttggagacctgaacccagtgtaggagagttcagctgaaatcatcggtccccaggatgacaccacagcatctgcccctgctatatgtggggaaaactcatggtcacgaacattatttatgcttcaggggactacagaaagccagcttcctttgatctatgtgtaaatcagtccttggcagagtgcatataatgtccggataaattacacccctcggtgataagattacatacctccttcataaaaacctgtcatcctgttttgttcttcagctcctcatcaggatcttttcaaactgaggctcattagggaaggaactaggctgtgttcagacttcttttgaagagagagaattttcaagacttcttttcactctttgatttggatctggcaaattggggaggggatgctgggtgggaaacagttatgaaatgccaagaaattctttggctttagaaatttatctttcatgtacccatccgggaacataaaagagaggcatagtgctcattgcaaaaagagaacagatgaagtagctgtgttatgtgctggtatcttgagagttttgccaagaaaatctgggcctacataaaatttgagaattatctgtgtgatgagaccagaaagcagtggcttagacaagaaaaaatctttctgttcaccagtatcctcaaatggagacttcacttgatcagatggtatatgaaaaatgaatcaactattgctatttcgtaaaacctttttatattttctaaatttacttagtgctaaatactgttactcagttttaaatgccacgactaggggaaaaagaaactattgaagaaataattgtttagtatatttgcagttggggtagaagaaagaaatctagtatattgattcatatactagtaaattcatctagtataagaacttgtgatgttagattgaagttttgtcatcttataaaagacaacaaacttattttctgtttaagtctgagtgttatggcaatttttagttgattacttatttttcttagccaaattttaattttcttcatattgcattgctctttagttgtctctggaaattctatttactttaaggacatgagaaattcaaatgagagaagttgctgatattcatcagtgtgtttggacagttcatagggtccacaaatcaaatgaggttgtttcctgaagtagaagaaaacagaactttgcaattgatactgaagtactttgccatggagttagtaactcctgagcagaccattttagatggctcagcatttggcaggaagacttctccattccctgcttatatctatggaaggatcagctgttggatgtctagaacttctctatttnnnnnnnnngagtaggtctaaaattaaattattataagcaagcatagacatgggtcttccagttgaattgtccattaccgtaaaacttaatggtggacaagttagctgtggttgattcctgtgtggcagtaaattgtcttctgtctgcttactccaaataataaaagctgctaggaagtttagattttgaaataggcagtttaatgctttgagggtttctagaaatacagaaagtcatcaagtaaacactgcatgtctaatcatctcagagttgtggctgttatctcttcaggaattggtccacagggtaaatttcaacaattcatacgttttccattgtcatttctgaggacctttgagatgagagaaaggaaatctagtggaacaggaaagagagttacaccttgtgggtgtgagtttgggacctgttggcagaagggaatgtcactccctggaaacaggttcagcatgtttgcacttgttattttgtagctttaatgatttttgttttctaatagggcaaatgtctctaagcttggtgtttagagctgcttcatattttaaactagttccattccacagttctagttcaaaccagtttttacagcctcctgggtgggtcgtcttgacccaaactcttgtgttgttacattttgagaggttttcataccagaatgtaccaaaaagtgcacaaagtaaaggtaatttacagccagaaacaaatatacatttgtttcattttcttgactttccctaagcagataagcagaaacttgtttactcattactttgtttgatgtggtctacataatttttgactaaagttatagaatgttattcctctgggggaa

SEQ ID NO: 184834 - DNA, 1330 bp, Homo Sapiens
ttggataaaggattcctcatgtccataacatgttggatgaggctctgcagctcacccccactctcagagtggtcagtctccattaattggaccccgtgatttccaatctctgctgtgttggacgtcatgagcattgcaatccctctgggagtcaccacatcagatacatcctactcagatatggctgctggatcagaggtatcctgtcttggtagtgaatggaagagggcctggtccctggggcagtgcagaaggcactttgatcatctcactcactgcaaatgtcatgtgaggtttcatggaagtattaagagatccaattaagaagaatagttctgagtctaaaccagcccagagtggcttctctaggggaaactccccgctcagctgccctgaatctgtggaggctagtccagcagttaatgagaagagcgtgtattccactcataattatgggaccactcagaggcatgggtgtcgaggactgccttatgctgatcataattacggagcccctcctcctccgacacctcctgcttctccccctgtccagacgatcatccctcgttctgacctgaatggcctgccgtcgcctgtagaggaacgctgtggagacagcccgaactctgaaggagaaactgtacctacctggtgtccttgtggtctttctcaggatggcttccttctcaactgtgacaagtgcaggggaatgagcagggggaaggttattagacttcatcggcggaagcaggacaacatatcaggtggggatagcagtgcaacagaaagctgggatgaggagctttctccttccactgtgttgtatacagcaacacagcacacacctacaagcatcaccttaactgttagaagaaccaaacccaagaagcggaaaaagagtccagaaaagggtcgtgcagcaccaaagacgaagaaaatcaaggcatttcgagagggatcccggaagtccttgcggatgaagaattctccctctgaagcacagaatttagatgagaatacaactgagggctgggaaaatcggataagactatggactgaccagtatgaagaagctttcactaatcagtacagtgcagatgtacagaacgcgcttgaacaacacctacattctagcaaggaatttgtgggcaaacctactattttagacactattaataagactgaattggcctgtaataacacagttattggttcccaaatgcagttacagctgggaagagtcactcgtgttcaaaagcaccggaagatcctgagggctgcaagagatttggctttggacactcttataatagagtatcgtgggaaagtc

SEQ ID NO: 184835 - DNA, 997 bp, Homo Sapiens
ttggcacaagaaaactggaaacacagaaatgtgctgccctacggattcagttcttccttcagatggctgtgtatcggagaagatttgttcagcagaaaagagctgctatcactttacagcattattttaggacgtggcaaaccagaaaacagtttttactatatagaaaagcagcagtggttttacaaaatcactacagagcatttctgtctgcaaaacatcaaagacaagtctatttacagatcagaagcagtgttatcattattcaagctagaagtaaaggatttatacagaaacggaagtttcaggaaattaaaaatagcaccataaaaattcaggctatgtggaggagatatagagccaagaaatatttatgtaaagtgaaagctgcctgcaagattcaagcctggtatagatgttggagagcacgcaaagaatatctagctatattaaaagctgttaaaattattcaaggttgcttctataccaaactagagagaacacggtttttgaatgtgagagcatcagcaattatcattcagagaaaatggagagctatacttcctgcaaagatagctcatgaacacttcttaatgataaaaagacatcgagctgcttgtttgatccaagcacattatagaggatataaaggaaggcaggtctttcttcggcagaaatctgctgctttgatcatacaaaaatatatacgagccagggaggctggaaagcatgaaaggataaaatatattgaatttaaaaaatctacagttatcctacaagcactggtgcgtggttggctagtacgaaaaagatttttagaacagagagccaaaattcgacttcttcacttcactgcagctgcatattatcacctgaatgctgttagaattcaaagagcctataaactttacctgggctgtgaagaatgctaacaagcagttaattcagtcatctgtattcagagatggtttcgagcaggattacagaaagagattta

SEQ ID NO: 184836 - DNA, 2179 bp, Homo Sapiens
  misc_feature (1908)..(1969): n is a, c, g, or t
ttggcttcgcgggagtcgccggcggaggcgaggaggagctctgcgcggcgcggcgggcgatccgagccgggacgggctgcaggcgggggtgctgcagaggacacgaggcggcgggctggagacatggaccgcggcgagcaaggtctgctgagaacagacccagtccctgaggaaggagaagatgttgctgccacgatcagtgccacagagaccctctcggaagaggagcaggaagagctaagaagagaacttgcaaaggtagaagaagaaatccagactctgtctcaagtgttagcagcaaaagagaagcatctagcagagatcaagcggaaacttggaatcaattctctacaggaactaaaacagaacattgccaaagggtggcaagacgtgacagcaacatctgcttacaagaagacatctgaaaccttatcccaggctggacagaaggcctcagctgctttttcgtctgttggctcagtcatcaccaaaaagctggaagatgtaaaaaactccccaacttttaaatcatttgaagaaaaggtcgaaaacttaaagtctaaagtagggggaaccaagcctgctggtggtgattttggagaagtcttgaattcggctgcaaatgctagtgccaccaccacggagcctcttccagaaaagacacaggagagcctgtgagattcctacctttgttctgctacccactgccagatgctgcaagcgaggtccaagcacatcttgtcaacatgcattgccatgaatttctaccagatgtgcttttatttagctttacatattcctttgaccaaatagtttgtgggttaaacaaaatgaaaatatcttcacctctattcttgggaaacaccctttagtgtacatttatgttcctttatttaggaaacaccattataaaaacacttatagtaaatggggacattcactataatgatctaagaagctacagattgtcatagttgttttcctgctttacaaaattgctccagatctggaatgccagtttgacctttgtcttctataatatttcctttttttcccctctttgaatctctgtatatttgattcttaactaaaattgttctcttaaatattctgaatcctggtaattaaaagtttgggtgtattttctttacctccaaggaaagaactactagctacaaaaaatattttggaataagcattgttttggtataaggtacatattttggttgaagacaccagactgaagtaaacagctgtgcatccaatttattatagttttgtaagtaacaatatgtaatcaaacttctaggtgacttgagagtggaacctcctatatcattatttagcaccgtttgtgacagtaaccatttcagtgtattgtttattataccacttatatcaacttatttttcaccaggttaaaattttaatttctacaaaataacattctgaatcaagcacactgtatgttcagtaggttgaactatgaacactgtcatcaatgttcagttcaaaagcctgaaagtttagatctagaagctggtaaaaatgacaatatcaatcacattaggggaaccattgttgtcttcacttaatccatttagcactatttaaaataagcacaccaagttatatgactaatataacttgaaaattttttatactgaggggttggtgataactcttgaggatgtaatgcattaataaaaatcaactcatcattttctacttgttttcaatgtgttggaaactgtaaaatgatactgtagaacctgtctcctactttgaaaactgaatgtcagggctgagtgaatcaaagtgtctagacatatttgcatagaggccaaggtattctattctaataactgcttactcaacactaccaccttttccttatactgtatatgnnnnnnnnnnnnnnnnnnnnnnnnnnnnnnnnnnnnnnnnnnnnnnnnnnnnnnnnnnnnnngccaaatgttaactgccaagcttggagtgacctaaagcattttttaaaaagcatggctagatttacttcagtataaattatcttatgaaaaccaaattttaaaagccacaggtgttgattgttataaaataacatgctgccattcttgattgctagagtttttgttactactttggatgccattaaaactatgtgctatcacatgtgaaa

SEQ ID NO: 184837 - DNA, 2095 bp, Homo Sapiens
  misc_feature (693)..(945): n is a, c, g, or t
  misc_feature (2064)..(2072): n is a, c, g, or t
agagatacccccttttatagatgttcatcacagtgtggtaaggttgcaaattcaaaacatgtcacccaagctctgttcatgtttttgtgaattctaggctggtgctgcactgaaatagagcagtaagcttgtgataaaggccaattccaggtagctcttgaaggtgatagccatctactttccagtggctgccaaccacagggagtgccagttaacactggaaggattaaggcaaggtcccttctcttgagactcccctctgagatctgaaaaatgaagtggcttaggaacatcagcagtgaagaactgccaagagttggtgaaggttgtctcttccgagggccttctgaagacagggctcttgaacagacaagtggaagggctgtaccagggataaaggaaagaagtgcctgtccagcagggagcttgaatttaagttccatgtatgaagtcattggctctatctgcatttttctgtcattctcttcatttgttttaaggtggaaaattttcttacagttgatgcaaagtatcaactactttaccctaccttctccccttttagatgggttcttcctgagttttggagtcttgtatgattatcagtattcccctgtcaaaatcaaatctattcaggtttcttcactgttgagaacacctaaatgtttttatttttgagaagtggggacagannnnnnnnnnnnnnnnnnnnnnnnnnnnnnnnnnnnnnnnnnnnnnnnnnnnnnnnnnnnnnnnnnnnnnnnnnnnnnnnnnnnnnnnnnnnnnnnnnnnnnnnnnnnnnnnnnnnnnnnnnnnnnnnnnnnnnnnnnnnnnnnnnnnnnnnnnnnnnnnnnnnnnnnnnnnnnnnnnnnnnnnnnnnnnnnnnnnnnnnnnnnnnnnnnnnnnnnnnnnnnnnnnnnnnnnnnnnnnnnnnnnnnnnnnnnnatgagccaccacgcttggctaagaacacctaaatttttatgtttcttggctcaaaaaccagttccatttctaatgttgtcctcacaagaaggctaattggtggtgagacagcaggggaggaggaagagctgtggtttgtaacttgttcaactcaggcaataagcgattttagctttatttaaagtcttctgtccagctttaagcactttgtaagacatggctgaaagtagcttttctatcagaattgcagatagtcatgttgggctaacagtcaattggatatattcctttacctcacatgaccccagcaactgtggtggtatctagaggtgaaacaggcaagtgaaatggacacctctgctgtgaatgttttagagaaggaaattcaaaaaatgttgtaactgaaagcactgttgaatatgggtatcggctttctttttcactttgactcttaacattatcagtcaacttccacattaatgaaagttgaccatagttatttccaaataaaaagaaaccaactcttaccaggtcttggactgtgatgtcatattattcagttttatgcttgttcctgagcagaactcataagagtgacatagtcagctgctgacggcacctcagccacgccactcttactcagttcagtgggtgtgcttgcgtggtaggatgtggtgcagccctctctacgctcttctatttttggtatatttcctatctaaccttcaaatagcttccaattctttttttcttggactggcttcattctgaatttgtgctaaaataatctttcataaagagacctcagtttatagcgtaacagactacacaatgcactgatgttttcataatgtttaagggacccactgcaagaaggttgctgcctccttttaattgtattcatttagattttgattttccatgttaagaaggtgaggtccatgttggtgcccttcagagtagagaaccatgtaaacattaggaatgaacagaggccttaggaatgaatagagagtttgccttatacaatttcctgttacaaagctctccctctcatgcaaagtagggaacaccttttgagcatctttgaatttgacaaatggtgctgttgcaaacacnnnnnnnnngagatgaagtctcgcggttgtca

SEQ ID NO: 184838 - DNA, 1100 bp, Homo Sapiens
ttgggtgtgtatgtggccaagcgtctgcaggtgagggtggcacatggaacttcacgggtcactgggggcccactcttccagggtcatcgatgcatcctgggctgtgctgaggcagtgctgtctcgctcagtctttccagaccagcggggcagcacctgggaggcctgtctgaagcatgcagttctgtggtgctgctcggggatggactccatgcacagtccacttcttgacacattctcacactgtggctggagacccattttttccatcccatgtggaatgagaatcttgagttgcccacagacagacttgacctttgtgccagaactgtccagagctgtgagttttgttactgaattgcctgtccctgagcttggcctgctggagcatgatgctggaggctgtgtgcgggcaggcttgtgctccccttggagaagggctgctacttaacaaggaagtcctggccacaggagtcccctactggctgcagaggacgaagcaggaagcatgccgtggatcccacatgcactggggcagggcagccaggttccagagcagcaggcatgtgcattatgggtgccaggtggccagtgagggcccgaggaccacgcagcagagtcccccacgggcctgagcctgagagctcagaggattcctgccaggcctcagaactgtgtgtgcgggacagggtggctggcacgagatgtgtgggactgggacgcttcctttggggaccagaggaacattaggggccggtcagacacgtagggggcagtgaggaaacggggtaaagtggaccatgcaggctgcagagggtgggccttgggctggccggggttgctgggtggccccttccccatgggcctccacaagcactcaggccactggcacgttgggccaggcagaagtccacatggcagggctgcctggaacaccgctgccactgtggctccaggaggcccttgggagcatgaggagagctggactcgctcatctgttcttgcaccaccatccagaagccccctttgcaaggcctgctgcagtccccagtctgaccagcaagtcccggggtcacccttgctgaccttgtgctccagggg

SEQ ID NO: 184839 - DNA, 903 bp, Homo Sapiens
ttggaacaaaaaacgacagagaaggccaaacaaaacacatctgtgggctggatgccgccatgcccaccggtttgcgacctttgtgttggactcttctgttcaccagacaccctgccctgcgagaatgtatctcatcctttgctggagcaggtttgcagcacagtggagagaggagagaagaaatgaagggacacttatgcagaaccatgagtggccagagaggaggagaaggagggtgagaggagcaaagaagccatgacaacttcataattctgagtggactgggcagtggccagaaattctggtggtggatatgctgcctttccaacaggtgaatatgaaagaataagtcaaaccctgttcaggacgctgttaattccaaatgtgaactttttgagtcattcttttcatgtggaattcaaaggagaatgtaaacaaattttcaggagggacgtgcaatatccctgaaagataacaaagttcgtaacacttatttacatacaacattctctagttattgattaaacagatctctacagacttgcatgaggcaacatttcttaggcttgtttgctacaatatctttaaaaatacttgattacacatcactttagcttatttagatggacttttcaccaagctctgaactgggatttcattttgttgcattcatcctgctcacgagacacaggacagcctttcctgcctcagggaagaagagagagacagactacagtgatggagacccactagatgtgcacaagaggctgccatccagtactggagaggaccgagccgtgatgctggggtttgccatgatgggcttctcagtcctaatgttcttcttgctcggaacaaccattctaaagccttttatgctcagcattcagagagaagaatcga

SEQ ID NO: 184840 - DNA, 1239 bp, Homo Sapiens
ttggatttcttctttgtggtcttgtctattttttgattcgttgaaattcctcttgagatgtggtagtttgtaaatattccatttcttgtgctattataacttggcaaatttgcctgttatcatgaacatatcagtgggaagatgaggttaataatagctggtagtagtttgttgtcatcttaaacaagaaccttttacaaccattagacttttctttctactttaaaagagcaggaagtatgtatgacagggatagggacattaagagataggtagggtggcttgaaatttttactaatactttaccaatttatttacataagatgtcctgtgaagtcaacgagtgccgaaaaattgagagtcttgaaaacttgtatttggattttgatgatgatgtcacagaacttgaaacttttggagtaaccaccaccaaagtatcaaaatcaccaagtccagcaagtacttccacagtacctaacatgacagatgctcctacagcccccaaagcaggaactacaactgtggcaccaagtgcaccagacatttctgctaattctagaagtttatctcagattctgatggaacaattgcaaaaggagaaacagctggtcactggtatggatggtggccctgaggaatgcaaaaataaagatgatcagggatttgaatcatgtgaaaaggtatcaaattctgacaagcctttgatacaagatagtgacttgaaaacatctgatgccttacagttagaaaattctcaggaaattgaaacttctaataaaaatgatatgactatagatatattacatgctgatggtgaaagacctaatgttctagaaaacctagacaactcaaaggaaaagactgttggatcagaagcagcaaaaactgaagatacagttctctgcagcagtgatacagatgaggagtgtttaatcattgatacagaatgtaaaaataatagtgatggaaagacagctgttgtgggttctaacttaagttccagaccagctagtccaaattcttcctcaggacaggcttctgtaggaaaccagactaatactgcttgtagtcctgaagagtcatgtgttttaaaaaaacctatcaaacgagtatataaaaaatttgatccagttggagagattttaaaaatgcacatgagctcttaaagccaatttccagaaaagtaccagaattgcccttaatgaatttagaaaattctaaacagccttctgtttctga

SEQ ID NO: 184841 - DNA, 1723 bp, Homo Sapiens
ttggcacagccagacccaactggatgagagcgagggctggcgggagcagctggccctgattgcgggcacggcagtcgtgggtgtggtcctggtcctggtggtcattgtggtcgcagttctctgcctcaggaagcagagcaatgggagagaagcagaatattcggacaaacacggacagtatctcatcgggcatggtactaaggtctacatcgaccccttcacttatgaagaccctaatgaggctgtgagggaatttgcaaaagagatcgatgtctcctacgtcaagattgaagaggtgattggtgcaggtgagtttggcgaggtgtgtcgggggcggctcaaggccccagggaagaaggagagctgtgtggcaatcaagaccctgaagggtggctacacggagcggcagcggcgtgagtttctgagcgaggcctccatcatgggccagttcgagcaccccaatatcatccgcctggagggcgtggtcaccaacagcatgcccgtcatgattctcacagagttcatggagaacggcgccctggactccttcctgcggctaaacgacggacagttcacagtcatccagctcgtgggcatgctgcggggcatcgcctcgggcatgcggtaccttgccgagatgagctacgtccaccgagacctggctgctcgcaacatcctagtcaacagcaacctcgtctgcaaagtgtctgactttggcctttcccgattcctggaggagaactcttccgatcccacctacacgagctccctgggaggaaagattcccatccgatggactgccccggaggccattgccttccggaagttcacttccgccagtgatgcctggagttacgggattgtgatgtgggaggtgatgtcatttggggagaggccgtactgggacatgagcaatcaggacgtgatcaatgccattgaacaggactaccggctgcccccgcccccagactgtcccacctccctccaccagctcatgctggactgttggcagaaagaccggaatgcccggccccgcttcccccaggtggtcagcgccctggacaagatgatccggaaccccgccagcctcaaaatcgtggcccgggagaatggcggggcctcacaccctctcctggaccagcggcagcctcactactcagcttttggctctgtgggcgagtggcttcgggccatcaaaatgggaagatacgaagaaagtttcgcagccgctggctttggctccttcgagctggtcagccagatctctgctgaggacctgctccgaatcggagtcactctggcgggacaccagaagaaaatcttggccagtgtccagcacatgaagtcccaggccaagccgggaaccccgggtgggacaggaggaccggccccgcagtactgacctgcaggaactccccaccccagggacaccgcctccccattttccggggcagagtggggactcacagaggcccccagccctgtgccccgctggattgcactttgagcccgtggggtgaggagttggcaatttggagagacaggatttgggggttctgccataataggaggggaaaatcaccccccagccacctcggggaactccagaccaagggtgagggcgcctttctctcaggactgggtgtgacccagaggagaaagaagtgcccaacatctcccagcctctcccaggtgcccccctcacctttgatgggtgcgttcc

SEQ ID NO: 184842 - DNA, 906 bp, Homo Sapiens
tttgtacaaaaaagttggctttgaagtgattcagtttcctctacggatgagagactggctcaagaatatcctcatgcagctttatgaagccaactctgaacacgctggttatctaaatgagaagcagagaaataaagtcaagaaaatttacctggatgaaaagaggcttttggctggggaccatcccattgaccttctcttaagggactttaagaaaaactaccacatgtatgtgtatcctgtgcactggcagtttagtgaacttgaccaacaccctatggatagagtcttgacacattctgaacttgctcctctgcgagcatctctggtgcccatggaacactgcataacccgtttctttgaggagtgtgaccccaacaaggataagcacatcaccctgaaggagtggggccactgctttggaattaaagaagaggacatagatgaaaatctcttgttttgaacgaagattttaaagaactcaactttccagcatcctcctctgttctaaccacttcagaaatatatgcagctgtgatacttgtagatttatatttagcaaaatgttagcatgtatgacaagacaatgagagtaattgcttgacaacaacctatgcaccaggtatttaacattaactttggaaacaaaaatgtacaattaagtaaagtcaacatatgcaaaatactgtacattgtgaacagaagtttaattcatagtaatttcactctctgcattgacttatgagataattaatgattaaactattaatgataaaaataatgcatttgtattgttcataatatcatgtgcacttccagaaaatggaatgctactcttttgtggtttacgtgtattattttcaatatcttaataccctaataaagagtccataaaaatccaaatgc

SEQ ID NO: 184843 - DNA, 1715 bp, Homo Sapiens
  misc_feature (1409)..(1440): n is a, c, g, or t
ttggctgttaaccccatccacgccaccagaattagctctttcccttttggtttgcaagcactgcctgtaaagccctcgcatgagaggccagcctgctagggaaatccaggaatctgcaacaaaaacgatgacagtctgaaatactctctggtgccaacctccaaattctcgtctgtcacttcagacccccactagttgacagagcagcagaatttcaactccagtagacttgaatatgcctctgggcaaagaagcagagctaacgaggaaagggatttaaagagtttttcttgggtgtttgtcaaacttttattccctgtctgtgtgcagaggggattcaacttcaatttttctgcagtggctctgggtccagccccttacttaaagatctggaaagcatgaagactgggctttttttcctatgtctcttgggaactgcagctgcaatcccgacaaatgcaagattattatctgatcattccaaaccaactgctgaaacggtagcacccgacaacactgcaatccccagtttaagggctgaagctgaagaaaatgaaaaagaaacagcagtatccacagaagacgattcccaccataaggctgaaaaatcatcagtactaaagtcaaaagaggaaagccatgaacagtcagcagaacagggcaagagttctagccaagagctgggattgaaggatcaagaggacagtgatggtcacttaagtgtgaatttggagtatgcaccaactgaaggtacattggacataaaagaagatatgagtgagcctcaggagaaaaaactctcagagaacactgattttttggctcctggtgttagttccttcacagattctaaccaacaagaaagtatcacaaagagagaggaaaaccaagaacaacctagaaattattcacatcatcagttgaacaggagcagtaaacatagccaaggcctaagggatcaaggaaaccaagagcaggatccaaatatttccaatggagaagaggaagaagaaaaagagccaggtgaagttggtacccacaatgataaccaagaaagaaagacagaattgcccagggagcatgctaacagcaagcaggaggaagacaatacccaatctgatgatattttggaagagtctgatcaaccaactcaagtaagcaagatgcaggaggatgaatttgatcagggtaaccaagaacaagaagataactccaatgcagaaatggaagaggaaaatgcatcgaacgtcaataagcacattcaagaaactgaatggcagagtcaagagggtaaaactggcctagaagctatcagcaaccacaaagagacagaagaaaagactgtttctgaggctctgctcatggaacctactgatgatggtaataccacgcccagaaatcatggagtnnnnnnnnnnnnnnnnnnnnnnnnnnnnnnnngcggcactgatggccccaggcacagtgcaagtgatgactacttcatcccaagccaggcctttctggaggccgagagagctcaatccattgcctatcacctcaaaattgaggagcaaagagaaaaagtacatgaaaatgaaaatataggtaccactgagcctggagagcaccaagaggctaagaaagcagagaactcatcaaatgaggaggaaacgtcaagtgaagcaacatgagggtgcatgctgtggattcttgcatgagcttccagtgtaaaa

SEQ ID NO: 184844 - DNA, 1341 bp, Homo Sapiens
  misc_feature (114)..(145): n is a, c, g, or t
ttgggcctagaagctatcagcaaccacaaagagacagaagaaaagactgtttctgaggctctgctcatggaacctactgatgatggtaataccacgcccagaaatcatggagtnnnnnnnnnnnnnnnnnnnnnnnnnnnnnnnngcggcactgatggccccaggcacagtgcaagtgatgactacttcatcccaagtcaggcctttctggaggccgagagagctcaatccattgcctatcacctcaaaattgaggagcaaagagaaaaagtacatgaaaatgaaaatataggtaccactgagcctggagagcaccaagaggccaagaaagcagagaactcatcaaatgaggaggaagcgtcaagtgaaggcaacatgagggtgcatgctgtggattcttgcatgagcttccagtgtaaaagaggccacatctgtaaggcagaccaacagggaaaacctcactgtgtctgccaggatccagtgacttgtcctccaacaaaaccccttgatcaagtttgtggcactgacaatcagacctatgctagttcctgtcatctattcgctactaaatgcagactggaggggaccaaaaaggggcatcaactccagctggattattttggagcctgcaaatctattcctacttgtacggactttgaagtgattcagtttcctctacggatgagagactggctcaagaatatcctcatgcagctttatgaagccaactctgaacacgctggttatctaaatgagaagcagagaaataaagtcaagaaaatttacctggatgaaaagaggcttttggctggggaccatcccattgaccttctcttaagggactttaagaaaaactaccacatgtatgtgtatcctgtgcactggcagtttagtgaacttgaccaacaccctatggatagagtcttgacacattctgaacttgctcctctgcgagcatctctggtgcccatggaacactgcataacccgtttctttgaggagtgtgaccccaacaaggataagcacatcaccctgaaggagtggggccactgctttggaattaaagaagaggacatagatgaaaatctcttgttttgaacgaagattttaaagaactcaactttccagcatcctcctctgttctaaccacttcagaaatatatgcagctgtgatacttgtagatttatatttagcaaaatgttagcatgtatgacaagacaatgagagtaattgcttgacaacaacctatgcaccaggtatttaacattaactttggaaacaaaaatgtacaattaagtaaagtcaacatatgcaaaatactgtacattgtgacagaagtt

SEQ ID NO: 184845 - DNA, 1659 bp, Homo Sapiens
  misc_feature (1373)..(1417): n is a, c, g, or t
ctttgtacaaaaaagttggcaagcactgcctgtaaagccctcgcatgagaggccagcctgctagggaaatccaggaatctgcaacaaaaacgatgacagtctgaaatactctctggtgccaacctccaaattctcgtctgtcacttcagacccccactagttgacagagcagcagaatttcaactccagtagacttgaatatgcctctgggcaaagaagcagagctaacgaggaaagggatttaaagagtttttcttgggtgtttgtcaaacttttattccctgtctgtgtgcagaggggattcaacttcaatttttctgcagtggctctgggtccagccccttacttaaagatctggaaagcatgaagactgggctttttttcctatgtctcttgggaactgcagctgcaatcccgacaaatgcaagattattatctgatcattccaaaccaactgctgaaacggtagcacctgacaacactgcaatccccagtttaagggctgaagctgaagaaaatgaaaaagaaacagcagtatccacagaagacgattcccaccataaggctgaaaaatcatcagtactaaagtcaaaagaggaaagccatgaacagtcagcagaacagggcaagagttctagccaagagctgggattgaaggatcaagaggacagtgatggtcacttaagtgtgaatttggagtatgcaccaactgaaggtacattggacataaaagaagatatgagtgagcctcacgagaaaaaactctcagagaacactgattttttggctcctggtgttagttccttcacagattctaaccaacaagaaagtatcacaaagagagaggaaaaccaagaacaacctagaaattattcacatcatcagttgaacaggagcagtaaacatagccaaggcctaagggatcaaggaaaccaagagcaggatccaaatatttccaatggagaagaggaagaagaaaaagagccaggtgaagttggtacccacaatgataaccaagaaagaaagacagaattgcccagggagcatgctaacagcaagcaggaggaagacaatacccaatctgatgatattttggaagagtctgatcaaccaactcaagtaagcaagatgcaggaggatgaatttgatcagggtaaccaagaacaagaagataactccaatgcagaaatggaagaggaaaatgcatcgaacgtcaataagcacattcaagaaactgaatggcagagtcaagagggtaaaactggcctagaagctatcagcaaccacaaagagacagaagaaaagactgtttctgaggctctgctcatggaacctactgatgatggtaataccacgcccagaaatcatggagnnnnnnnnnnnnnnnnnnnnnnnnnnnnnnnnnnnnnnnnnnnnngccccaggcacagtgcaagtgatgactacttcatcccaagccaggcctttctggaggccgagagagctcaatccattgcctatcacctcaaaattgaggagcaaagagaaaaagtacatgaaaatgaaaatatagtaccactgagcctggagagcaccaagaggccaagaaagcagagaactcatcaaatgaggaggaaacgtcaagtgaagcaacatgagggtgcatgctgtggattcttg

SEQ ID NO: 184846 - DNA, 922 bp, Homo Sapiens
actttgtacaaaaaagttgggttaaccccatccacgccaccagaattagctctttcccttttggtttgcaagcactgcctgtaaagccctcgcatgagaggccagcctgctagggaaatccaggaatctgcaacaaaaacgatgacagtctgaaatactctctggtgccaacctccaaattctcgtctgtcacttcagacccccactagttgacagagcagcagaatttcaactccagtagacttgaatatgcctctgggcaaagaagcagagctaacgaggaaagggatttaaagagtttttcttgggtgtttgtcaaacttttattccctgtctgtgtgcagaggggattcaacttcaatttttctgcagtggctctgggtccagccccttacttaaagatctggaaagcatgaagactgggctttttttcctatgtctcttgggaactgcagctgcaatcccgacaaatgcaagattattatctgatcattccaaaccaactgctgaaacggtagcacctgacaacactgcaatccccagtttaagggctgaagctgaagaaaatgaaaaagaaacagcagtatccacagaagacgattcccaccataaggctgaaaaatcatcagtactaaagtcaaaagaggaaagccatgaacagtcagcagaacagggcaagagttctagccaagagctgggattgaaggatcaagaggacagtgatggtcacttaagtgtgaatttggagtatgcaccaactgaaggtacattggacataaaagaagatatgagtgagcctcagagaaaaaactctcagagaacactgattttttggctcctggtgttagttccttcacagattctaaccaacagaaagtatcacaaagagagaggaaaaccaagaacaacctagaaattattc

SEQ ID NO: 184847 - DNA, 953 bp, Homo Sapiens
gcctaatattgggagaatgtttgtgtaaggattggaaatctgtttatttttaaataagatagcactgatgtgaatcttatttggaaattacagatactgccattaagcgatgcttttatcttcattaattcattttggtaagcgcctatgcatttctgatggttaggtgccctaggtagtgttaagtatgtccgtgtcctcccttactcccctctcgctccctctaccctctatcccctagggttcttttattaatggaatttctccagttatagagaaaaaaatgacatttgaaaactaaagctcatttatattaatactaaggtcctgtgggcctagtgcgttactcttcccagtgatacctagattttaagagtagagaacagaggaaacatgggatgagaggagagaggttttttagacaacatttgtagacacctcaaattatatcactgttctctagcgccaatattcccaggtaaattgaccattaaagcaatactcactgacctactagtttattttggtcagctgagtaccatcaggatatttaaccctttaagtgctgttttgggagtagaaaactaaagcaacaatacttcctcttgacagctttgattggaatggggttattagatcattcaccttggtcctacactttttaggatgcttggtgaacataacaccacttataatgaacatccctggttcctatattttgggctatgtgggtaggaattgttacttgttgctgcagcagcagccctagaaagtaagcccagggcttcagatctaagttagtccaaaagctaaatgatttaaagtcaagttgtaatgctaggcataagcactctataatacattaaattataggccgagcaattaagggaatgtttctgaaccattaaacttgtatttatgtcactaaaattctaacacaaacttaaaaaatg

SEQ ID NO: 184848 - DNA, 2239 bp, Homo Sapiens
ttggaacctctcctggcagcatgagctgcatcagctcaggatggagaagagttcctgggaaatacatgagaggagaatgaaggaacagtaccttatggctatctcagataaagatcagcagctcagtcatctgcagaatcttataagggaattgaggtcttcttcctcccagactcagcctctcaaagtgcaataccaaagacaggcatccccagagacatcagcttccccagatgggtcacaaaatctggtttatgagacagaacttctcaggacccagctcaatgacagcttaaaggaaattcaccaaaaggagttaagaattcagcaactgaacagcaacttctctcagctactggaagagaaaaacaccctttccattcagctctgcgataccagtcagagtcttcgtgagaaccagcagcactatggtgaccttttaaatcactgtgcagtcttggagaagcaggttcaagagctgcaggcggggccactaaatatagatgttgctccaggagctccccaggaaaagaatggagttcacagaaagagtgaccctgaggaactaagggaaccgcagcaaagcttttctgaagctcagcagcagctatgcaacaccagacaggaagtgaatgaattaaggaagctgctggaagaagaacgagaccaaagagtggctgctgagaatgctctctctgtggccgaggagcagatcagacggttagagcacagtgaatgggactcttcccggactcctatcattggctcctgtggcactcaggagcaggcactgttaatagatcttacaagcaacagttgtcgaaggacccggagtggcgttggatggaagcgagtcctgcgttcactctgtcattcacggacccgagtgccacttctagcagccatctactttctaatgattcatgtcctgctcattctgtgttttacgggccatctatagacttagttgttactctttggaccactcccctcaaaacttggaattctctcacctctaacatcagaacatcaattccagtggaacagtcttcccatttacaggtcttctctccaactcttcacggaaagtgcctgcaaaaacagaggtggatacgaggacaggttggagctgcagggactggcgagtctgctttcttctactgccctgagcctgaacgcttctgcttaatctgagaatcacatttggtttgttgagcctaatatttgttgagattttgcaggaccctgatcttttgtggtcctgtaaaagatactgaggaatgtctttcagccaagccaagaggatggtttcaataaacctaataatctgaagttcagtatcattttgattgataactttctttgccttgtttgcctgtattttctcctgtttcagggggaaggtggctctgccataaacagagttcagggaaatgaacatgtcacctcataggacatctgatttaggtctcttgcagaatagggtggtgaaagctgaaggaactccctaggggttttagctgttagatcacatgggaggacagcatcttcttccctgccaatttcagatataattggagggagaatttcaggtcttagactataaggatagaatccctttgcttttgcccttgatcacatgtatactaaggtattaagtggcccaagtctttcctttcaccaaagggcagggagaagtgtctatggacagcagggttccaattcttgtcattccaggaatatctgaatattcctggaatgtggaccctgagacagtgctcaggggccactgggagccaatattaggcattgactctcagccaggagtctgactggtctaacaccacactgcaactcctgacctcttgaagtactaagctactttgctgttagtgacagttattacagtttctcagccccattgtctctgccctctgtggcaatggaaggagaatatagagaagacaaaattaaatatagatagacctgagaaggacagccaggatagaattccatttgtgcctattccctgcctcccctcccctcccccatcctaccagttggttattttctcattgcatacgtgatgtgttcactgcctagcctctccctaaagaagagagaagacagtgggctgactgatctgctctaaatctactgtggtgattaaatcttgggtacaacatcctgggaagtttcctgaacaactgtaaaataataaaattattttcagaatgaa

SEQ ID NO: 184849 - DNA, 5761 bp, Homo Sapiens
ttggagcatgatgagaggataaagcagctacaggtggaactttgtgaaatgaagcaaaaaccagaagagattggagaagaaagtagagcaaagcaacaaatacaaaggaaactgcaagctgcccttatttcccgaaaagaagcactaaaagaaaacaaaagtctccaagaggaattgtctttggccagaggtaccattgaacgtctcaccaagtctctggcagatgtggaaagccaagtttctgctcaaaataaagaaaaagatacggtcttaggaaggttagctcttcttcaagaagaaagagacaaactcattacagaaatggacaggtctttattggaaaatcagagtctcagcagctcctgtgaaagtctaaaactagctctagagggtcttactgaagacaaggaaaagttagtgaaggaaattgaatctttgaaatcttctaagattgcagaaagtactgagtggcaagagaaacacaaggagctacaaaaagagtatgaaattcttctgcagtcctatgagaatgttagtaatgaagcagaaaggattcagcatgtggtggaagctgtgaggcaagagaaacaagaactgtatggcaagttaagaagcacagaggcaaacaagaaggagacagaaaagcagttgcaggaagctgagcaagaaatggaggaaatgaaagaaaagatgagaaagtttgctaaatctaaacagcagaaaatcctagagctggaagaagagaatgaccggcttagggcagaggtgcaccctgcaggagatacagctaaagagtgtatggaaacacttctttcttccaatgccagcatgaaggaagaacttgaaagggtcaaaatggagtatgaaaccctttctaagaagtttcagtctttaatgtctgagaaagactctctaagtgaagaggttcaagatttaaagcatcagatagaaggtaatgtatctaaacaagctaacctagaggccaccgagaaacatgataaccaaacgaatgtcactgaagagggaacacagtctataccaggtgagactgaagagcaagactctctgagtatgagcacaagacctacatgttcagaatcggttccatcagcgaagagtgccaaccctgctgtaagtaaggatttcagctcacatgatgaaattaataactacctacagcagattgatcagctcaaagaaagaattgctggattagaggaggagaagcagaaaaacaaggaatttagccagactttagaaaatgagaaaaataccttactgagtcagatatcaacaaaggatggtgaactaaaaatgcttcaggaggaagtaaccaaaatgaacctgttaaatcagcaaatccaagaagaactctccagagttaccaaactaaaggagacagcagaagaagagaaagatgatttggaagagaggcttatgaatcaattagcagaacttaatggaagcattgggaattactgtcaggatgttacagatgcccaaataaaaaatgagctattggaatctgaaatgaagaaccttaaaaagtgtgtgagtgaattggaagaagaaaagcagcagttagtcaaggaaaaaactaaggtggaatcagaaatacgaaaggaatatttggagaaaatacaaggtgctcagaaagaacccggaaataaaagccatgcaaaggaacttcaggaactgttaaaagaaaaacaacaagaagtaaagcagctacagaaggactgcatcaggtatcaagagaaaattagtgctctggagagaactgttaaagctctagaatttgttcaaactgaatctcaaaaagatttggaaataaccaaagaaaatctggctcaagcagttgaacaccgcaaaaaggcacaagcagaattagctagcttcaaagtcctgctagatgacactcaaagtgaagcagcaagggtcctagcagacaatctcaagttgaaaaaggaacttcagtcaaataaagaatcagttaaaagccagatgaaacaaaaggatgaagatcttgagcgaagactggaacaggcagaagagaagcacctgaaagagaagaagaatatgcaagagaaactggatgctttgcgcagagaaaaagtccacttggaagagacaattggagagattcaggttactttgaacaagaaagacaaggaagttcagcaacttcaggaaaacttggacagtactgtgacccagcttgcagcctttactaagagcatgtcttccctccaggatgatcgtgacagggtgatagatgaagctaagaaatgggagaggaagtttagtgatgcgattcaaagcaaagaagaagaaattagactcaaagaagataattgcagtgttctaaaggatcaacttagacagatgtccatccatatggaagaattaaagattaacatttccaggcttgaacatgacaagcagatttgggagtccaaggcccagacagaggtccagcttcagcagaaggtctgtgatactctacagggggaaaacaaagaacttttgtcccagctagaagagacacgccacctataccacagttctcagaatgaattagctaagttggaatcagaacttaagagtctcaaagaccagttgactgatttaagtaactctttagaaaaatgtaaggaacaaaaaggaaacttggaagggatcataaggcagcaagaggctgatattcaaaattctaagttcagttatgaacaactggagactgatcttcaggcctccagagaactgaccagtaggctgcatgaagaaataaatatgaaagagcaaaagattataagcctgctttctggcaaggaagaggcaatccaagtagctattgctgaactgcgtcagcaacatgataaagaaattaaagagctggaaaacctgctgtcccaggaggaagaggagaatattgttttagaagaggagaacaaaaaggctgttgataaaaccaatcagcttatggaaacactgaaaaccatcaaaaaggaaaacattcagcaaaaggcacagttggattcctttgttaaatccatgtcttctctccaaaatgatcgagaccgcatagtgggtgactatcaacagctggaagagcgacatctctctataatcttggaaaaagaccaactcatccaagaggctgctgcagagaataataagcttaaagaagaaatacgaggcttgagaagtcatatggatgatctcaattctgagaatgccaagctagatgcagaactgatccaatatagagaagacctgaaccaagtgataacaataaaggacagccaacaaaagcagcttcttgaagttcaacttcagcaaaataaggagctggaaaataaatatgctaaattagaagaaaagctgaaggaatctgaggaagcaaatgaggatctgcggaggtcctttaatgccctacaagaagagaaacaagatttatctaaagagattgagagtttgaaagtatctatatcccagctaacaagacaagtaacagccttgcaagaagaaggtactttaggactctatcatgcccagttaaaagtaaaagaagaagaggtacacaggttaagtgctttgttttcctcctctcaaaagagaattgcagaactggaagaagaattggtttgtgttcaaaaggaagctgccaagaaggtaggtgaaattgaagataaactgaagaaagaattaaagcatcttcatcatgatgcagggataatgagaaatgaaactgaaacagcagaagagagagtggcagagctagcaagagatttggtggagatggaacagaaattactcatggtcaccaaagaaaataaaggtctcacagcacaaattcagtcttttggaaggtctatgagttccttgcaaaatagtagagatcatgccaatgaggaacttgatgaactgaaaaggaaatatgatgccagtctgaaggaattggcacagttgaaagaacagggactcttaaacagagagagagatgctcttctttctgaaaccgccttttcaatgaactccactgaggagaatagcttgtctcaccttgagaaacttaaccaacagctcctatccaaagatgagcaattgcttcacttgtcctcacaactagaagattcttataaccaagtgcagtccttttccaaggctatggccagtctgcagaatgagagagatcacctgtggaatgagctggagaaatttcgaaagtcagaggaagggaagcagaggtctgcagctcagccttccaccagcccagctgaagtacagagtttaaaaaaagctatgtcttcactccaaaatgacagagacagactactgaaggaattgaagaatctgcagcagcaatacttacagattaatcaagagatcactgagttacatccactgaaggctcaacttcaggagtatcaagataagacaaaagcatttcagattatgcaagaagagctcaggcaggaaaacctctcctggcagcatgagctgcatcagctcaggatggagaagagttcctgggaaatacatgagaggagaatgaaggaacagtaccttatggctatctcagataaagatcagcagctcagtcatctgcagaatcttataagggaattgaggtcttcttcctcccagactcagcctctcaaagtgcaataccaaagacaggcatccccagagacatcagcttccccagatgggtcacaaaatctggtttatgagacagaacttctcaggacccagctcaatgacagcttaaaggaaattcaccaaaaggagttaagaattcagcaactgaacagcaacttctctcagctactggaagagaaaaacaccctttccattcagctctgcgataccagtcagagtcttcgtgagaaccagcagcactatggtgaccttttaaatcactgtgcagtcttggagaagcaggttcaagagctgcaggcggtgagtaaagagaaggggccactaaatatagatgttgctccaggagctccccaggaaaagaatggagttcacagaaagagtgaccctgaggaactaagggaaccgcagcaaagcttttctgaagctcagcagcagctatgcaacaccagacaggaagtgaatgaattaaggaagctgctggaagaagaacgagaccaaagagtggctgctgagaatgctctctctgtggccgaggagcagatcagacggttagagcacagtgaatgggactcttcccggactcctatcattggctcctgtggcactcaggagcaggcactgttaatagatcttacaagcaacagttgtcgaaggacccggagtggcgttggatggaagcgagtcctgcgttcactctgtcattcacggacccgagtgccacttctagcagccatctactttctaatgattcatgtcctgctcattctgtgttttacgggccatctatagacttagttgttactctttggaccactcccctcaaaacttggaattctctcacctctaacatcagaacatcaattccagtggaacagtcttcccatttacaggtcttctctccaactcttcacggaaagtgcctgcaaaaacagaggtgatacgaggacaggttggagctgcagggactggcgagtctgctttcttctactgccctgagcctgaacgcttctgcttaatctgagaatcacatttggtttgttgagcctaatatttgttgagattttgcaggaccctgatcttttgtggtcctgtaaaa

SEQ ID NO: 184850 - DNA, 2297 bp, Homo Sapiens
tggaggggagggtatgagagggagaaaagccggagagaaaaactaggtaagggagaaagaggcccttccccggggacagaaatagcagaaagggaaaaaaacaaatgtactgggaaagacagattccggaaaggttacttcctaatcaaatgaatgcttccatttctggagaaatggattgtactgaccctaggggaaaaaacaagtggaattctgctgcttatttatcgagtgccttttctgtgccccccactgggaatacagaggtaggtaagtcttgccttcaaggagcttgtgggcaaggcaaacagagaaacataccaaattaaactttctctttaggtatgtgagcgaatcccaaccataagccccccgctcaaaatcctgtccacagtgaaggccaccatgctgggccggaccaacatcagtgatgaggagtctgagcacgccacagagatgctggttcacaacgcccagaacctcatgcagtctgtgaaggagactgtgcgggaagctgaagccgcttcaatcaaaattcgaacagatgctggattcacactgcgctgggttagaaagactccctggtaccagtaggcacctggctgagcctggctggcacagacacctctactaaaaagaaggaaaatgatctgagtcccaggagctgcccagagtcgctgggagctgaaaaatcacatcctggcctggcacatcagaaaggaatgggggcctcttcaaattagaagacatttatactcttttttcatggacactttgaaatgtgtttctgtataaagcctgtattctcaaacacagttacacttgtgcaccctctatcccaataggcagactgggtttctagcccatggacttcacataagctcagaatccaagtgaacactagccagacactctgctctgcccttgttccctaggggacacttccctctgtttctctttccttggctcccattcactcttccagaatcccaagacccagggcccaggcaaatcagttactaagaagaaaattgctgtgcctcccaaaattgttttgagctttccatgttgctgccaaccataccttccttccctgggctgtgctacctgggtccttttcagaagtgagctttgctgctacaggggaaggtggcctctgtggagccccagcatatgggggcctggattcatttcctgcccttcctcagtttaatccttctagtttcccacaatataaaactgtacttcactgtcaggaagaaatcacagaatcatatgattctgcttttaccatgcccctgagcaatgtctgtgctagggaaacttcccgtcccatatcctgcctcagcccgccaaggtagccatcccatgaacacactgtgtcctggtgctctctgccactggaagggcagagtagccagggtgtggccctgccatcttcccagcagggccactcccggcactccatgcttagtcactgcctgcagaggtctgtgctgaggccttatcattcattcttagctcttaattgttcattttgagctgaaatgctgcattttaattttaaccaaaacatgtctcctatcctggtttttgtagccttcctccacatcctttctaaacaagattttaaagacatgtaggtgtttgttcatctgtaactctaaaagatcctttttaaattcagtcctaagaaagaggagtgcttgtcccctaagagtgtttaatggcaaggcagccctgtctgaaggacacttcctgcctaagggagagtggtatttgcagactagaattctagtgctgctgaagatgaatcaatgggaaatactactcctgtaattcctacctccctgcaaccaactacaaccaagctctctgcatctactcccaagtatggggttcaagagagtaatgggtttcatatttcttatcaccacagtaagttcctactaggcaaaatgagagggcagtgtttcctttttggtacttattactgctaagtatttcccagcacatgaaaccttattttttcccaaagccagaaccagatgagtaaaggagtaagaaccttgcctgaacatccttccttcccacccatcgctgtgtgttagttcccaacatcgaatgtgtacaacttaagttggtcctttacactcaggctttcactatttcctttaaaatgaggatgattattttcaaggccctcagcatatttgtatagttgcttgcctgatataaatgcaatattaatgcctttaaagtatgaatctaagccaaagatcacttgttgttttact

SEQ ID NO: 184851 - DNA, 1267 bp, Homo Sapiens
  misc_feature (370)..(410): n is a, c, g, or t
ctttgtacaaaaaagttggaatgtattctccttcaaaaaaggccccgcccatgctgagggaaggggagcagttgccaatatttgcaccatcttcacatgcacatgttgcaacaagagcttctgggaaggtaagcggcatcggagctagatcacgtttcacaattagtggttgttcttttccgtgtttattttgcactttaaaaaagagagaacgcatgcaaatgaacttgcttgtgtgtatttgatggctctaagggctataaattacaaacaaaacacatcccagacattaggagttcataagtatatttaatgaaattggtggttttaggaagtcaactttagttttgctttgtttgcatgtccactnnnnnnnnnnnnnnnnnnnnnnnnnnnnnnnnnnnnnnnnnacagtagtcattgaaagttatgtttctttgtttacttcattttttcctctaattattcaagactggcacaaaagtataaatattatttatttcaggtagaatttttttcgtgtagttttttaatatatacttgaaggaaatgtttcaccttatttttggtctttgtttattcatttagaccctgcaagttgattctcattaattgtcagattccactacactttcttcctcataggtagtaattaccagtgtaactaagcatttgtgttctgatatctgaggccagtaactattaatgtctagttctcagagcatttggaaaggttatcttaaatggctacctaaattgaaatccttttcagaaaaaatataattgcaaataggtaggagtggcctaaattatctaatgtaataaagtcagacaaaatgcatactttatagtttcaagattttcagtacataaaatctgtcctttcctacctggacatgtcccattaaaaagtgggagattttaaataatttctttacagatgttttatttaagcaggtagcacaatctactaatgttgtttgatctgtgtttgttatactggttgtaattaatttttttaattcatgaactagcggaaaatttattaaattaactattaaccacattcaccttgtaaatgactgtataaaacttgttgacaatgcactgactttagaaagatgttaatgtgcataaatagagtgtaaataaaatagtgttgatgtactgaaatatgaactgtataaaaagtattggtaattgtatatggggtgtacctatttatctgtaactattatccaaacaaattaaatactgtggatgcctc

SEQ ID NO: 184852 - DNA, 2369 bp, Homo Sapiens
ttggctcagaagaatgttgccccattaaagcttcggtggaccatagcaaaatatgctcccaggtttaatgggtttcagcaacaggactcccaagaacttctggcttttctcttggatggtcttcatgaagatcttaatcgagtccatgaaaagccatatgtggaactgaaggacagtgatgggcgaccagactgggaagtagctgcagaggcctgggacaaccatctaagaagaaatagatcaattgttgtggatttgttccatgggcagctaagatctcaagtaaaatgcaagacatgtgggcatataagtgtccgatttgaccctttcaattttttgtctttgccactaccaatggacagttatatgcacttagaaataacagtgattaagttagatggtactacccctgtacggtatggactaagactgaatatggatgaaaagtacacaggtttaaaaaaacagctgagtgatctctgtggacttaattcagaacaaatccttctagcagaagtacatggttccaacataaagaactttcctcaggacaaccaaaaagtacgactctcagtgagtggatttttgtgtgcatttgaaattcctgtccctgtgtctccaatttcagcttctagtccaacacagacagatttctcctcttcgccatctacaaatgaaatgttcaccctaactaccaatggggacctaccccgaccaatattcatccccaatggaatgccaaacactgttgtgccatgtggaactgagaagaacttcacaaatggaatggttaatggtcacatgccatctcttcctgacagcccctttacaggttacatcattgcagtccaccgaaaaatgatgaggacagaactgtatttcctgtcatctcagaagaatcgccccagcctctttggaatgccattgattgttccatgtactgtgcatacccggaagaaagacctatatgatgcagtttggattcaagtatcccggttagcgagcccactcccacctcaggaagctagtaatcatgcccaggattgtgacgacagtatgggctatcaatatccattcactctacgagttgtgcagaaagatgggaactcctgtgcttggtgcccatggtatagattttgcagaggctgtaaaattgattgtggggaagacagagctttcattggaaatgcctatatcgctgtggattgggatcccacagcccttcaccttcgctatcaaacatcccaggaaagggttgtagatgagcatgagagtgtggagcagagtcggcgagcgcaagccgagcccatcaacctggacagctgtctccgtgctttcaccagtgaggaagagctaggggaaaatgagatgtactactgttccaagtgtaagacccactgcttagcaacaaagaagctggatctctggaggcttccacccatcctgattattcaccttaagcgatttcaatttgtaaatggtcggtggataaaatcacagaaaattgtcaaatttcctcgggaaagttttgatccaagtgcttttttggtaccaagagacccggctctctgccagcataaaccactcacaccccagggggatgagctctccaagcccaggattctggcaagagaggtgaagaaagtggatgtgcagagtttggctggggaagaggacatgctcctgagcaaaagcccatcctcactcagcgctaacatcagcagcagcccaaaagtgccattcaggaattctgagtgggggccattacgtcacttatgccaaaaacccaaactgcaagtggtactgctacaatggcagcatctgtgaggaacatcaccctgatgaaattgacaccgactctgcctacattcttttctatgagcagcagaggatagactacgcacaatttctgccaaagattgatggcaaaaagatggcagacacaagcagtatggatgaagactttgagtctgattacgaaaagtactgtgtgttacagtaaagctaccactctggctgctagatagcttggtggggagggagatgactccttgtagctgatacttggcaaaagtgtcactgagaggcaagctaaatgtagttattttatcctgttagaatacaaattctaattaaaatagttaactttaagagtagtagtaattttattttgaagtctcatgcaagttgtctgatagagaactttcaggcagatcccaccattagcctgtaaacaaaaagtttggcaccagccacctgggaccaaataagaattcaattgtgcttgtccagatatgaacaaatatgtagtgagtatagagtttatcaataatcataacaaatattaaagatttccttggagtcaaagt

SEQ ID NO: 184853 - DNA, 2304 bp, Homo Sapiens
  misc_feature (1953)..(2009): n is a, c, g, or t
ttgggacagcttgatgtaagtcaggtgaacaaatagaagctgagggtgaaggacctacagctgtcaccttcatctcttctcaacactgccaactgtccccttggatttcccagacagacaacaagggacatctctggtttctcggtgccccctagaaacctcgggtcatttcaaggcattatgcaaatgagaagctttccttctcttcacctcatctcctgatctgcacaaaagtgactgtaggacccagtgttgtagatgagcatgagagtgtggagcagagttggcgagtgcaagtcgagcccatcaacctggacagctgtctccgtgctttcaccagtgaggaagagctaggggaagatgagatgtactactgttccaagtgtaagacccactgcttagcaacaaagaagctggatctctggaggcttccacccttcctgattattcaccttaagtgatttcaatttgtaaatgatcagtggataaaatcacagaaaattgtcaaatttcctcgggaaagttttgatccgagtgcttttttggtaccacgagacccagctctctgccagcatcaaccactcacaccccagggggatggctctctgagcccaggattctggcaagggaggtgaagaaagtggatgcgcagagttcggctggggaagaggacgtgctcctgagcaaaagcccatcctcactcagcgctaacatcatcagcagcccgaaaggttctccttcttcatcaagaaaaagtggaaccagctgtccctccagcaaaaacagcagccctaatagcagcccacggactttggggaggagcaaagggaggctccggctgccccagattggcagcaaaaataaactgtcaagtagtaaagagaacttggatgccagcaaagaaaatggggctgggcagatatgtgagctggctgacgccttgagtcgagggcatgtgctggggggcagccaaccagagttggtcactcctcaggaccatgaggtagctttggccaatggattcctttatgagcatgaagcatgtggcaatggctacagcaatggtcagcttggaaaccacagtgaagaagacagcactgatgaccaaagagaagatactcgtattaagcctatttataatctatatgcaatttcgtgccattcaggaattctgggtgggggccattacgtcacttatgccaaaaacccaaactgcaagtggtactgttacaatgacagcagctgtaaggaacttcacccggatgaaattgacaccgactctgcctacattcttttctatgagcagcaggggatagactatgcacaatttctgccaaagactgatggcaaaaagatggcagacacaagcagtatggatgaagacttttgagtctgattacaaaaagtactgtgtgttacagtaaagctaccactctggctgctagacagcttggcggtgagggagatgactccttgtagctgacatttggcaaaagcgtcactgaaaggcaagctaaatgtagttattttatcctgtggccctgaagcacaaaataaaaattctaattaaaatagttaactttaagagtagtaatcattttattttgaagtctcatacaagctctccgatagagaactttcaggcagatcccaccattagcctgtaaacaaaaggtttggcaccagccacctgggaccaaataagaattcaattgtgcttgtccagatatgaacaaatatgtagtgagtatagagtttaccataatcataacaaatattaaagatttccttggagtcagagtaaaaaacaaacaattataatgttgtctagggacgacatgatatgctacctcctttttcctgaagttttattccattatattgacaagatggagaaagcaagatcacgaaggtgtgcaaatgattcttaaggcatggacgaggatttttcannnnnnnnnnnnnnnnnnnnnnnnnnnnnnnnnnnnnnnnnnnnnnnnnnnnnnnnngccgttgtatttatgtttgagacacaaccagtcattggtggcaggggcatatagtggtcagtctgaaagggaggctctcttaagagctgtgtgctcttctactcagagccttgtgggagacccagtagaaagaaacagcatcctgggaaatccagctaccatggctctcccagtggaggcatcttacatttagggatacttcaagtatcctcagaaatgtattctgcactccccgggcctcacccatgctgagggaaggggagcagttgccaatatttgcaccatcttcacatgc

SEQ ID NO: 184854 - DNA, 1270 bp, Homo Sapiens
gccccacccaccaggatcacgtgctcaatctcatccagactcatttcggcactctggagagttgctgtacaggcccaggcacccgctcaaacaagtctgcacacaactcctcaaattccacacgagtcacttttgccttgaagtccacatcatccatcaggccttcaatctgtgccatgtggtcagcgttggcactgaggacggttttgagccgattagcctcacgcagcagcttggccatggcacgcgggttctcccgcacatcctttgctctctgacccttgcgctgctcattgaaaagcccagccaggcgttctcgaagccggagctccatctccaggccccccagggtacggtcaaatcctactccccggatctgcagctgtggctgcatcccagcttccttagtcttcaccatctggtaggtcacaatggtgcatacggtgctgcctgagcccatgtcatagaacatgatattctgggcagtggtgttaatatctttccggcggaagacaccatagctgagggcagtggcggtgttgtcattgatgagctgcagcactttgaggccagccatacgagcagcctgcagcacagctcggcgctcggcctggttgaagaagactggcacggtgatcactgcatccttgatgggctgctctgcaaaatcttcagctagagaacgagaataattgagaaccatgcccaacacttcctcaggtgagaactgcagctgcgagctgatctgaaagtgcacagtctgcctctgtgggtcgaaagtcagctcgtgctccgggaagcgggcctggtaaagagctacatgggggttatctgcctgcttccccaggaggtgctggaagtaacgtagcgtagcctttggattcttaatcgccatgcttgctgcactgtctccaaagaatctttcattttctttcagggtcacgatcaccggtgttttcctccgagattccttattcaagacaatttccatgggcactccaggtttgacaatggccaccttcatggactcactgcccaggtccacagacatcactgccagtgtatcactcagtgccaacaggtctgccaagagcacagccaccaaggcccaacagactcgcctcctcggcctctgcctcctaactttgtctgccatagtgcccctcttgcctccgctcctgcggccccagctctgggacagacgcggcacgaacgtacccacgaggccggcagcgccccccacccgcgcccttcacaactcctctcccaa

SEQ ID NO: 184855 - DNA, 1644 bp, Homo Sapiens
ttgggaagggcgcgggtggggggcgctgccggcctcgtgggtacgttcgtgccgcgtctgtcccagagctggggccgcaggagcggaggcaagaggggcactatggcagacaaagttaggaggcagaggccgaggaggcgagtctgttgggccttggtggctgtgctcttggcagacctgttggcactgagtgatacactggcagtgatgtctgtggacctgggcagtgagtccatgaaggtggccattgtcaaacctggagtgcccatggaaattgtcttgaataaggaatctcggaggaaaacaccggtgatcgtgaccctgaaagaaaatgaaagattctttggagttaggaggtcctggagcagaacctgaacagaaagaacaatcgacaggacagaagcggcctttgaagaacgacgaactataacccccacctctgttttccccattcatctccacccccttcccccaccacttctatttatttaacatcgagggttgggggaggggttggtcctgccctcggctggagttcctttctcacccctgtgatttggaggtgtggagaaggggaagggagggacagctcactggttccttctgcagtacctctgtggttaaaaatggaaactgttctcctccccagccccactccctgttccctacccatataggccctaaatttgggaaaaatcactattaatttctgaatcctttgcctgtgggtaggaagagaatggctgccagtggctgatgggtcccggtgatgggaagggtatcaggttgctggggagtttccactcttctctggtgattgttccttccctcccttcctctcccaccatgcgatgagcatcctttcaggccagtgtctgcagagcctcagttaccaggtttggtttctgagtgcctatctgtgctctttcctccctctgcgggcttctcttgctctgagcctcccttccccattcccatgcagctcctttccccctgggtttccttggcttcctgcagcaaattgggcagttctctgccccttgcctaaaagcctgtacctctggattggcggaagtaaatctggaaggattctcactcgtatttcccacccctagtggccagaggagggaggggcacagtgaagaagggagcccaccacctctccgaagaggaaagccacgtagagtggttggcatggggtgccagcatcgtgcaagctctgtcataatctgcatcttcccagcagcctggtaccccaggttcctgtaactccctgcctcctcctctcttctgctgttctgctcctcccagacagagcctttccctcaccccctgaccccctgggctgaccaaaatgtgctttctactgtgagtccctatcccaagatcctggggaaaggagagaccatggtgtgaatgtagagatgccacctccctctctctgaagcaggcctgtggatgaaggaggagggtcagggctggccttcctctgtgcatcactctgctaggttgggggcccccgacccaccataccctacgcctagggagcccagtcctccagtattcgtcctgtatcaggagctagggctgctgcctcagctccacaacaaaatgaactggctgtgtcaatcatttgtcctttcc

SEQ ID NO: 184856 - DNA, 1809 bp, Homo Sapiens
ttggcaaagtcatcacctttaaccgctacagccatgatttcaatttccacatcaactacggcgacctgggcttcctggggcctgaagatcttcgggtatttggctcccagaatctgaccacagtgaagctaaaaggggtgggtgacagcttcaagaagtatcctgactacgagtccaagggcatcaaggctcacttcaacctggatgagagtggcgtgctcagtctagacagggtggagtctgtatttgagacactggtagaggacagcgcagaagaggaatctactctcaccaaacttggcaacaccatttccagcctgtttggaggcggtaccacaccagatgccaaggagaatggtactgatactgtccaggaggaagaggagagccctgcagaggggagcaaggacgagcctggggagcaggtggagctcaaggaggaagctgaggccccagtggaggatggctctcagcccccaccccctgaacctaagggagatgcaacccctgagggagaaaaggccacagaaaaagaaaatggggacaagtctgaggcccagaaaccaagtgagaaggcagaggcagggcctgagggcgtcgctccagccccagagggagagaagaagcagaagcccgccaggaagcggcgaatggtagaggagatcggggtggagctggttgttctggacctgcctgacttgccagaggataagctggctcagtcggtgcagaaacttcaggacttgacactccgagacctggagaagcaggaacgggaaaaagctgccaacagcttggaagcgttcatatttgagacccacgacaagctgtaccagcccgagtaccaggaagtgtccacagaggagcagcgtgaggagatctctgggaagctcagcgccgcatccacctggctggaggatgagggtgttggagccaccacagtgatgttgaaggagaagctggctgagctgaggaagctgtgccaagggctgttttttcgggtagaggagcgcaagaagtggcccgaacggctgtctgccctcgataatctcctcaaccattccagcatgttcctcaagggggcccggctcatcccagagatggaccagatcttcactgaggtggagatgacaacgttagagaaagtcatcaatgagacctgggcctggaagaatgcaactctggccgagcaggctaagctgcccgccacagagaagcctgtgttgctctcaaaagacattgaagctaagatgatggccctggaccgagaggtgcagtatctgctcaataaggccaagtttaccaagccccggccccggcctaaggacaagaatgggacccgggcagagccacccctcaatgccagtgccagtgaccagggggagaaggtcatccctccagcaggccagactgaagatgcagagcccatttcagaacctgagaaagtagagactgcaggatccgagccaggagacactgagcctttggagttaggaggtcctggagcagaacctgaacagaaagaacaatcgacaggacagaagcggcctttgaagaacgacgaactataacccccacctctgttttccccattcatctccacccccttcccccaccacttctatttatttaacatcgagggttgggggaggggttggtcctgccctcggctggagttcctttctcacccctgtgatttggaggtgtggagaaagggaagggagggacagctcactggttccttctgcagtacctctggtggttaaaaatggaaacctgttctcctccccagccccactccctgttccc

SEQ ID NO: 184857 - DNA, 1809 bp, Homo Sapiens
  misc_feature (1413)..(1463): n is a, c, g, or t
ttggctttaaagctagagcacgaggtggtggccaggagccgaccaaccccacaagactatgagatgcgagtatccccctctgatactacccctctggtttcccggagtgttccaccagtcaaactggaggatgaggatgattcggactctgagctggacttgagcaagctgtcaccatcttcttcttcttcctcatcctcatccagctccagctccagcactgatgagagtgaggatgagaaggaagagaagctaactgaccagtcccgctcaaagctctatgatgaagagagtctcctgtccctcactatgtcccaagatggattcccaaatgaagatggagaacaaatgacccctgagcttctgctactgcaggaaagacaaagagcctctgagtggcccaaggatcgtgtcctgataaaccgtattgacctcgtctgccaggctgtactctcagggaagtggccttctagccgtaggagccaggaaatggtaacaggaggaattttggggccaggcaaccacttgctagacagtccctcattgactcctggagaatatggtgactctccagtccccacaccacgaagtagtagtgcagcttccatggcagaggaggaagcatctgcagtcagcacagcggcagcccagttcaccaaacttcgccgaggcatggatgaaaaggagtttacagttcaaatcaaagatgaggaaggattgaagttaacattccagaagcacaagttgatggcgaatggagtaatgggagatggacatccactgtttcataagaagaaggggaacagaaagaagctagtagagctggaggtggagtgcatggaagaactaatcaccttgatgtggacctggagacccggatccctgtcatcaataaggtggatggtactttgctggtgggtgaggatgcccctcgccgggctgaactggagatgtggttacagggtcatccagagtttgctgttgatccccgatttctagcgtatatggaggatcgcagaaaacagaagtggcaaagatgtaaaaaaaataataaggcagaattgaactgtttgggaatggaaccagtacagacagctaactctagaaatgggaaaaagggtcatcacactgaaacggtgttcaaccgggttttgccagggcctattgcaccagagagcagcaagaagcgggcccgtaggatgcgaccagacctttctaagatgatggccctcatgcagggtggaagcactgggtctctatctctgcataacacgttccaacacagcagtagtggcctacagtctgtgtcatctttgggtcacagcagtgccacttctgcatctttgccttttatgccatttgtgatgggtggtgcaccatcatcccctcatgtagactccagcaccatgcttnnnnnnnnnnnnnnnnnnnnnnnnnnnnnnnnnnnnnnnnnnnnnnnnnnnggcttgagagcccctggctacccctcttcaccagtgactaccgcctctggtactaccttgcggttgccaccactgcaacctgaggaggatgacgatgaggatgaagaagatgatgatgacttatctcagggctatgatagctcagaaagggacttctcactcattgatgatcctatgatgccagctaactcagactccagtgaagatgctgatgactgaagccccagcatgggccccattgcttgggcggctgctgtattttcatttactctggcccttggactatggaaacgtgggaggggcaggggagatgtggggaagtccaggactccaggaggtgaaaagg

SEQ ID NO: 184858 - DNA, 879 bp, Homo Sapiens
  misc_feature (185)..(245): n is a, c, g, or t
  misc_feature (592)..(606): n is a, c, g, or t
ttgggatggccctcatgcagggtggaagcactgggtctctatctctgcataacacgttccaacacagcagtagtggcctacagtctgtgtcatctttgggtcacagcagtgccacttctgcatctttgccttttatgccatttgtgatgggtggtgcaccatcatcccctcatgtagactccagnnnnnnnnnnnnnnnnnnnnnnnnnnnnnnnnnnnnnnnnnnnnnnnnnnnnnnnnnnnnnggcttgagagcccctggctacccctcttcaccagtgactaccgcctctggtactaccttgcggttgccaccactgcaacctgaggaggatgacgatgaggatgaagaagatgatgatgacttatctcagggctatgatagctcagaaagggacttctcactcattgatgatcctatgatgccagctaactcagactccagtgaagatgctgatgactgaagccccagcatgggccccattgcttgggcggctgctgtattttcatttactctggcccttggactatggaaacgtgggaggggcaggggagatgtggggaagtccaggactccaggaggtgaaaaggnnnnnnnnnnnnnnntgtacctgattgcccccaattatgagaggattgggtgggcaggggaactcctaaaataatacatgaccacttcctcatttctggggaaggaaaggagactagagcagctggtgtgctcacccctccctagtcacctccattaaccacagactatgtagcgctggccctagcctctggcagagcctgttcctggccgaactgtggatacagctggagggtcaggaactgttaccttctttccccttggcattaataaatttaagttaatccttt

SEQ ID NO: 184859 - DNA, 1216 bp, Homo Sapiens
  misc_feature (347)..(397): n is a, c, g, or t
  misc_feature (762)..(770): n is a, c, g, or t
ccttttcacctcctggagtcctggacttccccacatctcccctgcccctcccacgtttccatagtccaagggccagagtaaatgaaaatacagcagccgcccaagcaatggggcccatgctggggcttcagtcatcagcatcttcactggagtctgagttagctggcatcataggatcatcaatgagtgagaagtccctttctgagctatcatagccctgagataagtcatcatcatcttcttcatcctcatcgtcatcctcctcaggttgcagtggtggcaaccgcaaggtagtaccagaggcggtagtcactggtgaagaggggtagccaggggctctcaagccnnnnnnnnnnnnnnnnnnnnnnnnnnnnnnnnnnnnnnnnnnnnnnnnnnnaagcatggtgctggagtctacatgaggggatgatggtgcaccacccatcacaaatggcataaaaggcaaagatgcagaagtggcactgctgtgacccaaagatgacacagactgtaggccactactgctgtgttggaacgtgttatgcagagatagagacccagtgcttccaccctgcatgagggccatcatcttagaaaggtctggtcgcatcctacgggcccgcttcttgctgctctctggtgcaataggccctggcaaaacccggttgaacaccgtttcagtgtgatgaccctttttcccatttctagagttagctgtctgtactggttccattcccaaacagttcaattctgccttattannnnnnnnnacatctttgccacttctgttttctgcgatcctccatatacgctagaaatcggggatcaacagcaaactctggatgaccctgtaaccacatctccagttcagcccggcgaggggcatcctcacccaccagcaaagtaccatccaccttattgatgacagggatccgggtctccaggtccacatcaaggtgattaggctcttccatgcactccacctccagctctactagcttctttctgttccccttcttcttatgaaacagtggatgtccatctcccattactccattcgccatcaacttgtgcttctggaatgttaacttcaatccttcctcatctttgatttgaactgtaaactccttttcatccatgcctcggcgaagtttggtgaactgggctgccgctgtgctgactgcagatgcttcctcccaacttttttgtacaaagt

SEQ ID NO: 184860 - DNA, 2353 bp, Homo Sapiens
  misc_feature (1981)..(1994): n is a, c, g, or t
acaaaaaagttggcaaatgcccgatatcatgagactgatcaccaaagatctgtccgaaccctactccatttatacctatagatattttatccacaactggccacagctgtgcttcttggccatggtaggggaggagtgtgtaggtgccatcgtttgcaagttggatatgcacaaaaagatgttccgcagaggttatatagccatgttagccgtggattccaaatacaggagaaatggcattggtactaacttggttaagaaagctatatatgccatggttgagggagactgtgatgaggttgttttggaaaccgaaataacaaataagtccgctttgaaactttatgaaaatcttggttttgttcgagataagaggctgttcagatactatttaaatggagttgatgcactgcgacttaaactgtggctgcgttgagaaactgacatcaaggaacaactatcatccacacagaatcgacctttgcatgcaatgcaatttgtacagaattgctttgcaggtggatttagtaatttccatgcagctcttacctgtcagtgtctcattgagtgtcgcacaatatttgttgcactttggcatggcacatttgttctgaattaaaagattgttttaaacttcaggagttcttttggtaccaacaagatgtgccagttgatagccaagatttatgtgttcatttgcaaagtctgctgacaatgttatttacacagtgatcattttatcacagaaccagtaagtggaacataatttttgttccctaaaaaagccaatgtggattgtaaaagtctttaagtatactaacatttcacacaaaacctgccctagttttctgaagtgggtgagggagacgcttcagttttaggttttattttttcaatattaaattttccattcttgaatattggtacctcagtgattagtgaatgaaaaaaatgtagggtgggtatgtcttacaatgagtaaaggtaacaattaaattttgtctgccagtgcctgtgtagataagtatatttgtcttcatctccagtttttgaatgcatgctatcttttccttttctttaaggcctttgcaagcaaacttttgtttttatttaaattctaaatttgataaattatttcagatttttataatttggatacttttttcaggtgaatgaaagaatggtttactttagaagtccctttttccttacagtaacaagttgaatctacttggaaaattgagaaatggctcaaaagagataagaaaagttgatggagccgggaattgctggggtttagatgcactttttcttttgagagtaagggaagttttggaaaagaatagaaaattagtgtaagttgatatgattttatttaatcaaaattactgctacgctgcgaagaacagcttttacaaagtagctgaatttgtttttcccacttgatttggattcacattgctttcatttcttaaaatgcttcacttcaggttcttggtcttggaaataaatttcaaggtgcattgtatccattttaagctgctttattttattttcacttgtatgagcaaattcttgggggagctttgcttttcttctgccagaaaaacaaaagggggaaatgaaaatcttttttggaatgagttctgtgggttttcttaacagccaccatgtttattagttacattgtgttttggccaatcagtgcaatgtaacaaattttacagttaattgctttcaattgagtcagtaaacctgtgatagataatttatttaactggaaaacctaggtacccataagaaaaaagattcattctctgtgaaaactgtaggaatctgttgttgttttcatttgaatatgctctacttctgctctagtatttggtttggaatatattttgtggctctaattactgtatttttaaaaaccctacctccattaacagttggtaaaggccccttttcaggaaagtttgttgcnnnnnnnnnnnnnnaaaggaaagctgctctttgctcagtatagtgttttgaaagtgaacatagtaacaaatactttaaaaataaagatacacaatttatatttgaaaataaaaactttctgctggtgggattatttatagttctttatttttaaagaaaatgttttcctttttatattgctcttgaaagtttaatgagcagaatacaatactggttataataaaaatatggtaaccacacagtactcagccctttcaatatgtttttggtcaaacttcatttaggcactagcatttagaagaataccaatcacagtgatgcttttgttatttaatatgaggaaatggaactaaacatttatgtcatccaattt

SEQ ID NO: 184861 - DNA, 1340 bp, Homo Sapiens
  misc_feature (423)..(432): n is a, c, g, or t
ttggctgttttataacaaattagcaatatactttaaaaaaaatccagtttctcctataacatgatgtaaattaaatattcaggaatatttcaggtctgaaatctgctgctgaacttgttagacatttttgaaaggaaaattaggttagcgtacaatttatcataaatatatgaggtaaaatttgcaaaactttccacagtactttcttgaattataatactgaatgttttctgttccgatagagaaaagtgaagcaaatatgtgaggaatgaagtgatctagtgcaagttggtaattccagctaatgggagagaatgtaaatgtgcaaaggtacatattaagcttagggatttttgaatttttacgtcagtttatattttaattcttactgtacttggcatgcgcaataaagcagcacatgtnnnnnnnnnntacacagtgcaaggactttattataaaggttggatgtagttttccttagaaatttaggtgagagattttggccttttttattggataaattgggccagaaaggcagggtagatttcgaagcactggttctgttgaagttaagtttattaagcctgggaacattaaaagctaatttataaaagcaatactttttaatatgaaaacttactgcaaagtttgtttatacttttgcctaaaaaggaaattggatgggatactgtggcaaatcataaaaaaccagataattgaactttgaagttatagaaaatcagagaggggtaagtttatagggcattttgttctgatggttcaacccagaggtctgggaaatagcactgttggcccaaacagaacaggcttttagaagataaaagcgacaagaaggaatctggtgaatttagtcatcccagctttttagtcttaaccacagttctcactctcttaaatggtacctcaaaaagctggagcctctctgccatgattatgcttctacaaatttcgtttagaaagagactcggggctaatgatagcttagaagaaaagttaatgccttctcattggaaatgaataagcaaataagtagttaagggcttttggtaataaagatattctgaaactctgaagtgcgagaaaaaaatttggaatggagtatatgccagaaaaggttttggattcagaaagaaaaaggatggttagtttaatcagtgattctttttaaactcttcaaatatctggaacaaaatactaaattgtacctatggatttgtatttctttacaatttgtcccaactttctgtttaatgactagatgacatttgtgaatgttattaactaaagatttatatttatagagataaagagagagaaaa

SEQ ID NO: 184862 - DNA, 2683 bp, Homo Sapiens
ttggagtgacccctgctctgaagctcaccaaaaccatccaggttccacagcagaaagccatggcaccacttcatccccatcctgccggaatgagaatcaatgttgtcaataaccaccaggccaaacagaatttatatgacctggatgaagatgatgatggtatagcttccgttcctactaaacagatgaagtttgcagcctcaggcggctttctccaccacatggctgggctaagcagttccaagctttccatgtccaaggccctccctctcaccaaagtggttcagaatgatgcatacacagctcctgctctcccttcctctattcgaacaaaagccttgaccaacatgtcccggacactggtgaacaaggaagaaccccccaaagagctgccagctgctgagcctgttctcagcccattggaaggcaccaagatgactgtgaataatctgcaccctcgagtcactgaggaggacattgttgagcttttctgtgtgtgtggggccctcaagcgagctcgactggtccatcctggggtagcggaggtggtgtttgtgaaaaaggacgatgccatcaccgcatataagaagtacaacaaccggtgtctggacgggcagccgatgaagtgcaaccttcacatgaatgggaatgttatcacctcagaccagcccatcctgctgcggctgagtgacagcccatcaatgaaaaaggagagcgagctgcctcgcagggtgaactctgcctcctcctccaacccccctgccgaagtggaccctgacaccatcctgaaggcactcttcaagtcctcaggggcctctgtgaccacgcagcccacagaattcaaaatcaagctttgagcaggggagtgaggcagccagaagtgggggcagaggagggtggctctgtttccccaaggcaaagcttatgaccaatgggccatcggactggagacccctgattgtgggaagggttgccagggataaagagcttcctcactggatgggacccgcctttctgtgttgtgttctgccctgtgctcttctctctacgttaacgtttcctgtagtatgtttcttcatctcatcgccaaggtaggcttgtgtttttcagtgtgtgcctccccgagcctcagccccaagctgatttcttatctggaaatggtacactgaattctctgggtggctttcttgtggccccatgggatgcagcgtgggggctgtctgaaggaccctgctttttccaggggccgaggggctgcctttcctttgtgtgtattaagcttttcaaacaatggaggggatggagagccctggtgtcctgacgggagccaggtcggcctgagagctgtgccgctcctctgtcttgtcagtggaggtgcctgggtggggagcaggtctcaggcctcttgtcctctccccagtggctccaggcctcactagtggcaagggcaggatgaggctgcaccgctgggaagagtctatctaagttcttggcttggagtcccgtgtcgtctccgcccagaggaagttctccagagttcacctttcccttttccttgagttgtgctgaatgccccaccccagctctctttcccttctgggtgtctttgctgggagggggctgtgttgtgagccctcccggttctcacctcgcctggcacttaaccacaccctggttttgtgtagccgccagctctcttctggttgggcctttgaaaggctcagcctcccattgtgcagtgcttgggtttggagcttatttgaatggaagaggtcagtttgttcctggctctccatttctggcctcagttgtctacaggacagtggtcagggatgcctggaggcatatatccagctgccaccaaggggcactgtttgttcccacttatgtgagtgaccccatccatccatgaccagaggattattttcctgccttggcagaggaggaggagtcaagggagcagggcagctctaccaggcaaggtgtttccccagcataggcgcagacagttgggacgaaacttcagagcccaggcagtccctgaatgaccaggccagtgttgtcactgagtggtcccctgctggttgggagtgaagagaatccaggctggcagagctggagccagttggggagcacggttctgggagctctgcaaaatcagtagcaagtgctggaaaaggcacatgccgaagatactcaagagctcccaagatttgcttgaggctagcccagtgaagaaaaaccagagactcatgtttccaggggtcagtctgtcaggcaggaaggacccaggatttgaacccagcttcagtgtgcaggctctgaggctgcccaggacgggaaagtccaaggaaggggcctggtggtgctccacttgcagttctttaaagaatgctgctttttattctcctaaccctttcaagtgggtgcagacttctcgttagcagctggaagacattcctcccacacttttctcttcctggcccaagagagcatccagaaggcagtaggacctggtttttcaggtactgggagccgggggctcactgcttgcactgtgcttagggtagggatggtaaatatcctccctgcatggctttatcctccctctcatcccaaagcagtatcttctggttgtcacagagtttcattgagtccagctgcagccacgtggccatctgga

SEQ ID NO: 184863 - DNA, 2449 bp, Homo Sapiens
ttggttgtgatcgcggccgcagtttttccttttttcttctgccgtcgccttctctgcctcttctcatcctttctcgctctgctgctctgcagtgtgacgagtccgaatcctcttcccacccagcccgcgcctttcttcttttgcctgcgctgttctatttctccttcggccgccgccgccactgctgcacacagctggtgtcggtgccgcgcttttacccccaagtcgttcccgcagcctatggcccaggccgccttgggtatttctgctcaaggtaaccacatccctctttaaaaattccgccgaaaaagagaagacgctttacccgactctttgggccgttatctcacggcgaactttctgaccaagtatacaactacccagagggcctaggagaagtgctgtatagagagcagttcgacttcaacgctgagccaccttgggaacctagctgatgataggggggttccatctcccaacttgtccatggaggtcttcacttcagaaatccaagactcatattcatccagcttggtgtcaagtgggctgttgctgccagaattatcttgtgattatttgagagatgtatcagtttcttctgaagtacaatcaactgtagaagcctttgtagcagtttgttgcatattctaaggacccagacataggcttggtggcccgtctcttgtctttcctggtttatgactttcggctttgtggaatacggctgagatgaaaggatttattgatgatgcaaactactccgttggcctgttggatgaaggaacaaaccttggaaatgttattgataactatgtttatgaacataccctgacagggaaaaatgcattttttgtgggagatcttggaaagattgtgaagaaacacagtcaatggcagaatgtagtggctcagataaagccattctacacagtgaagtgcaactctgctccagctgtacttgagattttggcagctcttggaaccggatttgcttgttccagtaaaaatgaaatggctttagtgcaagagttgggtgtacctccagaaaacattatttacataagtccttgcaagcaagtgtctcagataaagtatgcagcaaaagttggagtgaatatcctgacatgtgacaatgaaattgaattgaagaaaattgcacgtaatcacccaaatgccaaggtcttactacatattgcaacagaagataatattggaggtgaagagggtaacatgaagtttggcactaccctgaagaactgtaggcatctcttggaatgtgctaaggaacttgatgtccaaataattggggttaaatttcatgtttcgagtgcttgcaaagaatctcaagtatatgtacatgctctatctgatgctcgatgtgtgtttgacatggctggagaaattggctttacgatgaacatgttagacattggtggaggattcacgggaactgaatttcaattggaagaggttaatcatgttatcagccctctgttggatatctactttcctgaaggatctggtgttaagataatttcagaacccggaagctactatgtgtcttctgcatttacactcgcagttaatatcatagcaaagaaagttgttgaaaatgataaatttccctctggagtagaaaaaaccggaagtgatgaaccagccttcatgtattatatgaatgatggtgtttatggttcttttgcaagtaaactgtctgaggacttaaataccattccagaggttcacaagaaatacaaggaagatgagcctctgtttacaagcagcctttggggtccatcctgtgatgagcttgatcaaattgtggaaagctgtcttcttcctgagctgaatgtgggagattggcttatctttgataacatgggagcagattctttccatgaaccatctgcttttaatgattttcagaggccagccatttattacatgatgtcattcagtgattggtatgagatgcaagatgctggaattacttcagactcaatgatgaagaacttcttctttgtgccttcttgcattcagctgagccaagaagacagcttttccgctgaagcttaaacaggcattaacgcttctttagatctgaagttgcaggttaagcttgtctggtcaacattccagtgtggaaaaataatttaaacaatcttattctcttaattctttggcaacaaaactattagtaatagctatttgggaccagacaaaatcagctttcatctataattcattggggataatgggagatttagataatgtatccagatttaaacctaccagtttgtcctaccccttaagcgtttaaaataaaatatgcaacaaaatggatgacttagtggagatggaagcccattaattgggttctctattaaatcgtttacatacaagaacacagtttttatactaagatttgtgtttaaagtcttgtaaagtt

SEQ ID NO: 184864 - DNA, 1920 bp, Homo Sapiens
gccaactttgtacaaaaaagttggatggttctttttgcaagtaaactgtctgaggacttaaataccattccagaggggcacaagaaatacaaggaagatgagcctctgtttacaagcagcctttggggtccatcctgtgatgagcttgatcaaattgtggaaagctgtcttcttcctgagctgaatgtgggagattggcttatctttgataacatgggagcagattctttccatgaaccatctgcttttaatgattttcagaggccagccatttattacatgatgtcattcagtgattggtatgagatgcaagatgctggaattacttcagactcaatgatgaagaacttcttctttgtgccttcttgcattcagctgagccaagaagacagcttttccgctgaagcttaaacaggcattaacgcttctttagatctgaagttgcaggttaagcttgtctggtcaacattccagtgtggaaaaataatttaaacaatcttattctcttaattcttttggcaacaaaaactattagtaatagctatttgggaccagacaaaatcagctttcatctataattcattggggataatgggagatttagataatgtatccagatttaaacctaccagtttgtcctaccccttaagcgtttaaaataaaatatgcaacaaaatggatgacttagtggagatggaagcccattaattgggttccccattaaatcgtttacatacaagaacacagtttttatactaaggatttgtgtttaaagtcttgtaaagttcatgtctttcacccagatatatcaaatgttagaagaccagtgtgacttcattagataacgtttagtgtatttagaatgtgtaaatttgtgctttgaactgtagtttaataaatgtaaaattgcatcatagtatttgttgacctaatgtaacccttgtatgattgcaataaaattttgtgtagattttactgttttttcaggctaaaactttgggaaaggggctagctagcaaaggtagttttgaaatagatgtgtatatggactgttttgaagggtttttttctttatagcccagttaagttttgtttggctcggtgcatttttcatttatttaattagtaatttaagtaaagtgtttggtaaatcattgtgaagttcagattcattatggagagttgatgtgcagtaagcatgatgtttaacaattttaacaccaaaaatgttaatcctgcataaatcaactgtaataataaataggtgtttctgtatagatagaatgcatagagtaccttagtaaatctttgaatcacaatcttttggctgaaatggaagattctgttaaatactttgaataaacttggggggagggaaataaaattgcagaaaactgcagagcactaaaacttaaagaagggctacatctttatccagaaacctgttgctcttttgcacggaatgtttaaattcagagttgggatgggggttggggtgaagcacacttattatcttcagttgcagtgatttcaaatttaggattttttgttgttggtttgaactgtccccttagtttcttgttatttccaatttgttctgcttagtcattacttttaattcttttcttactaaaattttatggtggttgggggaagggagttagcatcactaacctgacagttgttgccaggaatttgctttgtttactgctagtatattagaaatcctagatctcagaatcacaatagtaataaacaacaggggtcattttttcctaacttactctgtgttcaggtgtggaatttctgtctcccaagagaaatgtgacttcactttggtgccatggacagaaaattctacctgtgctacataggagaagtttggaatgcacttaatagctggtttttacaccttgattt

SEQ ID NO: 184865 - DNA, 1338 bp, Homo Sapiens
ttgggtccagctccgacaacaggaattttctccgagagcgggccgggctcagttcagctgctgtccagacccggatcggcaacagtgccgcctccagacgttctcctgccgctcgcccgcccgtcccagcgcccccagccctcccgcgagggcgccccgggacggaaggatccaccagtctgtcggcgcccgccgttctcgtggtcgccgtcgccgtcgtcgtggtggtagtctccgccgtcgcctgggccatggccaattacatccacgtccctcccggctccccggaggtgcccaagctgaacgtcaccgttcaggatcaggaggagcatcgctgccgggagggggccctgagcctcctgcaacacctgcggcctcactgggacccccaggaggtgaccctgcagctcttcacagatggaatcacaaataaacttattggctgttacgtgggaaacaccatggaggatgtagtcctggtgagaatttatggcaataagactgagttattagtcgatcgagatgaggaagtaaagagttttcgagtgttgcaggctcatgggtgtgcaccacaactctactgtaccttcaataatggactatgctatgaatttatacaaggagaagcactggatccaaagcatgtctgcaacccagccattttcaggctaatagctcgtcagcttgctaaaatccatgctattcatgcacacaatggctggatccccaaatctaatctttggctaaagatgggaaagtatttctctctcattcccacaggatttgcagatgaagacattaataaaaggttcctaagtgatatcccaagctctcagattctccaggaagagatgacttggatgaaggagattctttccaacctgggctcacctgttgtgctttgccataatgacctattgtgtaagaatataatctacaatgagaaacaaggtgatgtacagttcattgattatgaatattctggatacaactacctggcatatgatattggaaatcatttcaatgaatttgcaggtgtgagtgatgtagactatagtctgtatccagatagagaactacagagtcagtggctgcgtgcttaccttgaagcctacaaagaatttaagggctttgggactgaagttactgaaaaggaggtagaaatactcttcattcaagtcaatcagtttgcattggcttctcatttcttttggggattgtgggctttgattcaagccaaatactccactattgagtttgatttccttgggtatgcaattgttcgttttaaccagtactttaaaatgaagcctgagttactgcattaaaagtgcctga

SEQ ID NO: 184866 - DNA, 1175 bp, Homo Sapiens
caactttgtacaaaaaagttgggagactgtccggtgtttgcctgttctcagacaatttagatttgacccgcaatttgcactgacaaacatcgctgtcctaaaacataacttgaacagtctgattaaacgctccaactctaccgctgctaccaatgaggttcctgaggtcacagtgttttccaagtctcccgtgacactgggtcagcccaacatcctcatctgtcttgtggacaacatctttcctcctgtggtcaacatcacatggctgagcaatgggcactcagtcacagaaggtgtttctgagaccagcttcctctccaagagtgatcattccttcttcaagatcagttacctcaccctcctcccttctgctgaggagagttatgactgcaaggtggagcactggggcctggacaagcctcttctgaaacactgggagcctgagattccagcccctatgtcagagctcacagagactgtggtctgcgccctgggattgtctgtgggcctcgtgggcattgtggtgggcactgtcttcatcatccgaggcctgcgttcagttggtgcttccagacaccaagggcccttgtgaatcccatcctggaatggaaggtgcatcgccatctacaggagcagaagagtggacttgctacatgacctagcattattttctggccccatttatcatatcccttttctcctccaaatgtttctcctctcacctcttctgtgggacttaaattgctatatctgctcagagctcacaaatgcctttgaattatttccctgacttcctgatttttttcttcttaagtgttacctactaagagttgcctggagtaagccacccagctacctaattcctcagtaacctccatctataatctccatggaagcaacaaattccctttatgagatatatgtcaaatttttccatctttcatccagggctgactgaaaccgtggctaagaattgggagactctcttgtttcaagccaatttaacatcatttaccagatcatttgtcatgtccagtaacacagaagcaaccaactacagtatagcctgataacatgatttcttagctgacattaatatttctttcttccttgtgttcccaccattggcagtgccacccacccctcaattaaagcgacaatggagttaatggata

SEQ ID NO: 184867 - DNA, 1468 bp, Homo Sapiens
  misc_feature (378)..(392): n is a, c, g, or t
  misc_feature (494)..(517): n is a, c, g, or t
  misc_feature (864)..(884): n is a, c, g, or t
  misc_feature (929)..(938): n is a, c, g, or t
ttgggatataattttttaaaaataagtttatttctttcaaggtttacaaataacaaaggtgcaccttgtatttaaaattgccattatagatgagagcgtgcatgcacagtcatttttgtttaagagtaatatttttaatgtaatagattgtaagacgtggtgagggagggatctgacagagatgaatgtgccaagcaaaaccacaactgtgtatattttaaagcacatcatggctttaagtaccatgttgttaaggattctcatgaagtgccatagactgtacatcaaattagagtattatttcttcagtgttattgttttcagagccacattttgttgcatatttgctagtactaatcagtcaaagggcaccattcnnnnnnnnnnnnnnngaaaccaaagctgtctcagaaatggccaatttaactttacagtaacaatagacagcacaacacaaactctctcaatacagataaactcacacataccggagnnnnnnnnnnnnnnnnnnnnnnnnaaattattttaatgcattgtagtgtaatatttatgcatactatactgtataacatgttattcaaaagggattgccatttctgagacacagtaacaaaaaaatgaggaaattattttgcttctatttatagcctctgtcaaaagtcaaaagactataaatgctttgcaaaaatggtttcacgtttgcttaaatgcttcatcacagtcacattcaaaatagtgactctaaacaaagaagaaagcagcactgtcatcagatgcatgataaaccaaaatatgaaaatgggaaatgtttaattaacctagtaattgggtgggttaagtacatgggtgaattttatatgtgannnnnnnnnnnnnnnnnnnnnttcagattaactgcttatagccttagaaagccttttacaaaattnnnnnnnnnntagatgtgcattcagtttttaagaatggaatcatccaaaggaattcctttttttgaggtttggatgttgcagctagtaaaggatatttttgctctgttcagcagttctaaaaattgctgaagtaggggccaggtcactggtagttatagtatggaatgggagaagtgaaagttcagttatagaactttccatacttccaagtttactgcaagtttttatgcttgagagagatgctttctaatataagactgatgtgttgattttactgattgtactgtacatctattaaagccttagattattacattacgggttggaacccataccaatgtaatttcaatcgtgttaagaaagtaatggtgacttcacatgttattgtagttagttacattatagaatattacttatttttcttgttaatgtagtttttcatttcctacatttattagattttcattttctattaacaattgaataccatttcagtttatagacttgctttattagattttaccaatgaagttttcaaa

SEQ ID NO: 184868 - DNA, 1794 bp, Homo Sapiens
  misc_feature (1485)..(1498): n is a, c, g, or t
  misc_feature (1600)..(1623): n is a, c, g, or t
ttggctgcagctgctgcagctgctgcacagaaattaatgcgaacagacagacttgaggtatgtcgagagtaccaacgtggcaattgcaaccgaggagaaaatgattgtcggtttgctcatcctgctgacagcacaatgattgacaccaatgacaacacagtcactgtgtgtatggattacatcaaagggagatgctctcgggaaaagtgcaaatactttcatccccctgcacatttgcaagccaagatcaaggctgcccaataccaggtcaaccaggctgcagctgcacaggctgcagccaccgcagctgccatgactcagtcggctgtcaaatcactgaagcgacccctcgaggcaacctttgacctgggaattcctcaagctgtacttcccccattaccaaagaggcctgctcttgaaaaaaccaacggtgccaccgcagtctttaacactggtattttccaataccaacaggctctagccaacatgcagttacaacagcatacagcatttctcccaccaggctcaatattgtgcatgacacccgctacaagtgttgttcccatggtgcacggtgctacgccagccactgtgtccgcagcaacaacatctgccacaagtgttcccttcgctgcaacagccacagccaaccagatacccataatatctgccgaacatctgactagccacaagtatgttacccagatgtagaattttcatcactaaacaatcatgctaaagaggaaaggacagtgtgcttggttagagtaaaggacgaggtcattagccatattgtatatatcgtcaagcaacacacacaaaagttcctcagccacaagacatctacatattgcatgttaaccagaagaaaagacaacattttccggaaatccactgcacactgttgcctatacactttgtacatttaattgatatttgtgctgaggtgatattcctgtctaaaagaacaacattgtctttcttttctagcacagagttatgcattcaaagatgcatacctagttagtttcctatatattcatgccatcttgaaaagacagactatggtgtaaccatgattctattatgtattggtacgtctgtagaccaagatataattttttaaaaataagtttatttctttcaaggtttacaaataacaaaggtgcaccttgtatttaaaattgccattatagatgagagcgtgcatgcacagtcatttttgtttaagagtaatatttttaatgtaatagattgtaagacgtggtgagggagggatctgacagagatgaatgtgccaagcaaaaccacaactgtgtatattttaaagcacatcatggctttaagtaccatgttgttaaggattctcatgaagtgccatagactgtacatcaaattagagtattatttcttcagtgttattgttttcagagccacattttgttgcatatttgctagtactaatcagtcaaagggcaccattcnnnnnnnnnnnnnngaaaccaaagctgtctcagaaatggccaatttaactttacagtaacaatagacagcacaacacaaactctctcaatacagataaactcacacataccggagnnnnnnnnnnnnnnnnnnnnnnnnaaattattttaatgcattgtagtgtaatatttatgcatactatactgtataacatgttattcaaaacggattgccatttctgagacacagtaacaaaaaaatgaggaaattattttgcttctatttatagcctctgtcaaaagtcaaaagactataaatgctttgcaaaaa

SEQ ID NO: 184869 - DNA, 1349 bp, Homo Sapiens
cccataccagcaaagtcaactactgcagtaattaataaaataagcataaaacaaattgcagcccaagacaaaatacataattttaagcaactccaagcagaaagtaagttgtgattacataatagtaaaaccaagcacatttgtcctttcagcagatgaaagtggtagggttgctgataagtgcaacatttttaaccagctggagtgaaggctggatacactaattcttttaaacaagtgcccattatcacattttgcatttttgagtgcttctgagttgaaaattaaaaccatgaaatttgaactgcgttttatttttcacctgctgaaagaacaggatcctacagcaattaaaaaacaatcacataacaactatagctacagtgtgctgtttggtttgcctgtttatgatttaaattttgtgaaagtcaatacttgttttgaagatttttttgtgaacaataaaccactgaaattggcagaaactgatctgaataatatatgttcttagtatagttctttctctctttttttgttgaagttttaaacatgcagtagttttgaaaaatgtaaggaatatctgatccatgatttcaccttaatggtagaagtacctgctatttttggtaatgatcttcaggcagatttggccccatggagtttttgtcagtcatgagggtttgaaaggatggcgtatctttccagctgaaaaaatcctggcaaactacaagctgtccacaagaaagcaaagcaacatgtttgaaggggtatggagtgctaactctgtgccacttttgcaagcaattttgctcagtctgtcattgtattagccttaacaaaactccttgtaattatagacgtttttattcaaaataagatcttactattatacaggtttctctcttttgactatatacagaagtgcaaaaagtcaaccttctccctagacgttccaacatgctaaattgcagcataatcaaccctcaagagtttgcacacacgctataattttcattacgtaaactttgagtatttggattatcaacaaaaagtcccttgttctatttattgattatgcagcttatttataacaaggcctgatactcagggatttcaaaaatattaaacaatattttaacatttgaaatggatacagtagaaaataaattttattctaatatctaggatctagatcttcttataataactaattacaaacaaaataaatcatcaaaatattactcaattgtctgccaggattgttgcgatagcaacaacttaacttcttacttagcaatgattatatatttataagatatccatataaaagccaacttttttgtacaaag

SEQ ID NO: 184870 - DNA, 1604 bp, Homo Sapiens
  misc_feature (113)..(133): n is a, c, g, or t
  misc_feature (178)..(187): n is a, c, g, or t
aagaaagcagcactgtcatcagatgcatgataaaccaaaatatgaaaatgggaaatgtttaattaacctagtaattgggtgggttaagtacatgggtgaattttatatgtgannnnnnnnnnnnnnnnnnnnnttcagattaactgcttatagccttagaaagccttttacaaaattnnnnnnnnnntagatgtgcattcagtttttaagaatggaatcatccaaaggaattcctttttttgaggtttggatgttgcagctagtaaaggatatttttgctctgttcagcagttctaaaaattgctgaagtaggggccaggtcactggtagttatagtatggaatgggagaagtgaaagttcagttatagaactttccatacttccaagtttactgcaagtttttatgcttgagagagatgctttctaatataagactgatgtgttgattttactgattgtactgtacatctattaaagccttagattattacattacgggttggaacccataccaatgtaatttcaatcgtgttaagaaagtaatggtgacttcacatgttattgtagttagttacattatagaatattacttatttttcttgttaaaatgtagtttttcatttcctacatttattagattttcattttctattaacaattgaataccatttcagtttatagacttgttttattagattttaccaatgaatttttcaaaatacaaaaaaaagtagtttttccttcataacatactcagttttgaattacatgtagtgtcacatgaatattcgtattgttaactaaatgatttatattttactgatttaatattacagtgtaagaatgtcagtcattgttagttcttgtctagttttcattaaaagaacaaagatcttttatatggatatcttataaatatataatcattgctaagtaagaagttaagttgttgctatcgcaacaatcctggcagacaattgagtaatattttgatgatttattttgtttgtaattagttattataagaagatctagatcctagatattagaataaaatttattttctactgtatccatttcaaatgttaaaatattgtttaatatttttgaaatccctgagtatcaggccttgttataaataagctgcataatcaataaatagaacaagggactttttgttgataatccaaatactcaaagtttacgtaatgaaaattatagcgtgtgtgcaaactcttgagggttgattatgctgcaatttagcatgttggaacgtctagggagaaggttgactttttgcacttctgtatatagtcaaaagagagaaacctgtataatagtaagatcttattttgaataaaaacgtctataattacaaggagttttgttaaggctaatacaatgacagactgagcaaaattgcttgcaaaagtggcacagagttagcactccataccccttcaaacatgttgctttgctttcttgtggacagcttgtagtttgccaggattttttcagctggaaagatacgccatcctttcaaaccctcatgactgacaaaaactccatgggggccaaatctgcctgaagatcattaccaaaa

SEQ ID NO: 184871 - DNA, 1682 bp, Homo Sapiens
  misc_feature (172)..(192): n is a, c, g, or t
  misc_feature (237)..(246): n is a, c, g, or t
ttggcgtttgcttaaatgcttcatcacagtcacattcaaaatagtgactctaaacaaagaagaaagcagcactgtcatcagatgcatgataaaccaaaatatgaaaatgggaaatgtttaattaacctagtaattgggtgggttaagtacatgggtgaattttatatgtgannnnnnnnnnnnnnnnnnnnnttcagattaactgcttatagccttagaaagccttttacaaaattnnnnnnnnnntagatgtgcattcagtttttaagaatggaatcatccaaaggaattcctttttttgaggtttggatgttgcagctagtaaaggatatttttgctctgttcagcagttctaaaaattgctgaagtaggggccaggtcactggtagttatagtatggaatgggagaagtgaaagttcagttatagaactttccatacttccaagtttactgcaagtttttatgcttgagagagatgctttctaatataagactgatgtgttgattttactgattgtactgtacatctattaaagccttagattattacattacgggttggaacccataccaatgtaatttcaatcgtgttaagaaagtaatggtgacttcacatgttattgtagttagttacattatagaatattacttatttttcttgttaaaatgtagtttttcatttcctacatttattagattttcattttctattaacaattgaataccatttcagtttatagacttgttttattagattttaccaatgaatttttcaaaatacaaaaaaaagtagtttttccttcataacatactcagttttgaattacatgtagtgtcacatgaatattcgtattgttaactaaatgatttatattttactgatttaatattacagtgtaagaatgtcagtcattgttagttcttgtctagttttcattaaaagaacaaagatcttttatatggatatcttataaatatataatcattgctaagtaagaagttaagttgttgctatcgcaacaatcctggcagacaattgagtaatattttgatgacttattttgtttgtaattagttattataagaagatctagatcctagatattagaataaaatttattttctactgtatccatttcaaatgttaaaatattgtttaatatttttgaaatccctgagtatcaggccttgttataaataagctgcataatcaataaatagaacaagggactttttgttgataatccaaatactcaaagtttacgtaatgaaaattatagcgtgtgtgcaaactcttgagggttgattatgctgcaatttagcatgttggaacgtctagggagaaggttgactttttgcacttctgtatatagtcaaaagagagaaacctgtataatagtaagatcttattttgaataaaaacgtctataattacaaggagttttgttaaggctaaaagccagggattgtgggttcgggtcccacccggggtacctacaatgacagactgagcaaaattgcttgcaaaagtggcacagagttagcactccataccccttcaaacatgttgctttgctttcttgtggacagcttgtagtttgccaggattttttcagctggaaagatacgccatcctttcaaaccctcatgactgacaaaaactccatggggccaaatctgc

SEQ ID NO: 184872 - DNA, 2179 bp, Homo Sapiens
  misc_feature (196)..(213): n is a, c, g, or t
  misc_feature (1340)..(1355): n is a, c, g, or t
  misc_feature (1457)..(1480): n is a, c, g, or t
  misc_feature (1827)..(1847): n is a, c, g, or t
  misc_feature (1892)..(1902): n is a, c, g, or t
ttggaacttaggctcttacctagttcttttgaattactgctttataattcttacctggtatttttaatttggaaaaaaaagttagacaccctaatttgaacgaaaatgttagaaatttggttgcacaaaaataggcaagacatttccttatctgatttctggatgattactaagtaactgaaaccacgggggtgcnnnnnnnnnnnnnnnnnnaggccaacaaaaagggcttctttcaattactgctctgcatgaatttttgatagttttacttatttcctaaaagctggtaacatttatagaatagtatttaacatgaagattttaaagttagttgctactttggcatttaagtttacattaacttactgttatgttgaccagataaggactatcacctcacagctgaatttcacttttctttaaaaatttaatattaaaatgttttcatctcttaattgttggcttgcttgcatggatcattcattaaataattttttatttgctagatacccataatatctgccgaacatctgactagccacaagtatgttacccagatgtagaattttcatcactaaacaatcatgctaaagaggaaaggacagtgtgcttggttagagtaaaggacgaggtcattagccatattgtatatatcgtcaagcaacacacacaaaagttcctcagccacaagacatccacatattgcatgttaaccagaagaaaagacaacattttccggaaatccactgcacactgttgcctatacactttgtacatttaattgatatttgtgctgaggtgatattcctgtctaaaagaacaacattgtctttcttttctagcacagagttatgcattcaaagatgcatacctagttagtttcctatatattcatgccatcttgaaaagacagactatggtgtaaccatgattctattatgtattggtacgtctgtagaccaagatataattttttaaaaataagtttatttctttcaaggtttacaaataacaaaggtgcaccttgtatttaaaattgccattatagatgagagcgtgcatgcacagtcatttttgtttaagagtaatatttttaatgtaatagattgtaagacgtggtgagggagggatctgacagagatgaatgtgccaagcaaaaccacaactgtgtatattttaaagcacatcatggctttaagtaccatgttgttaaggattctcatgaagtgccatagactgtacatcaaattagagtattatttcttcagtgttattgttttcagagccacattttgttgcatatttgctagtactaatcagtcaaagggcaccattcnnnnnnnnnnnnnnnngaaaccaaagctgtctcagaaatggccaatttaactttacagtaacaatagacagcacaacacaaactctctcaatacagataaactcacacataccggagnnnnnnnnnnnnnnnnnnnnnnnnaaattattttaatgcattgtagtgtaatatttatgcatactatactgtataacatgttattcaaaagggattgccatttctgagacacagtaacaaaaaaatgaggaaattattttgcttctatttatagcctctgtcaaaagtcaaaagactataaatgctttgcaaaaatggtttcacgtttgcttaaatgcttcatcacagtcacattcaaaatagtgactctaaacaaagaagaaagcagcactgtcatcagatgcatgataaaccaaaatatgaaaatgggaaatgtttaattaacctagtaattgggtgggttaagtacatgggtgaattttatatgtgannnnnnnnnnnnnnnnnnnnnttcagattaactgcttatagccttagaaagccttttacaaaattnnnnnnnnnnntagatgtgcattcagtttttaagaatggaatcatccaaaggaattcctttttttgaggtttggatgttgcagctagtaaaggatatttttgctctgttcagcagttctaaaaattgctgaagtaggggccaggtcactggtagttatagtatggaatgggagaagtgaaagttcagttatagaactttccatacttccaagtttactgcaagtttttatgcttgagagagatgctttctaatataagactgatgtgttgattttactgattgtactg

SEQ ID NO: 184873 - DNA, 1538 bp, Homo Sapiens
gataaaagcagatgcacacccccgtccttccagctctgcctgtccgcccggatcgatgaatgtaggactctacatcctttggtggagagctttgtataaccaaatcaacctcagggatgtctaacccacgtgcagcaacattggttgccaccaaaactccaaaactaccatttctaaaacctttcagggtgatttccctttgcttctgtggaatgtctccatgcaaggactgagcatcctgctttatagctgaattctgggacagctcctgggcttctttcttggtttcacaaaagatgatagtgcgtccttgatgaccactatatactcggatgacatccccaataactgctgccctctgagtccagtggcacttaatagccagatgctccacagttattgccgttttctgagtctttttaccaatcaggtccacctgttcatatgtagatttcatgtatttcttggcaacattaaatacccaatgagggcaagttgcagaaaaaagcaatgtttggggattgtcttcagaatctttcttgtatgccacacttaaaatctcttccacttgatcagcaaatcccatatccaacatctggtccacttcatccaggacaacatgcttaagtttggtgagatctagtttgccattctgtatgtggtctttgatacgacctggtgttccaaccaggatatcaatcccattcctcatgcgttcaaattgacctccatagggagttccaccataaaaacaagccactgacagcttttttgtgatgtcactgaagtctttgcttacttgatttgccaactctcttgtaggtgcaagaaccagtacctgaggggcacggcctctcttcctgtcttgcagttccccatgaagtttctcaatcaaagggatggcaaaggagaatgtcttcccagttcctgtccgtgcctgtgcaattaagtccttcccgctgtaaacatgatggaatgtctttgcttgtataggaaataggaaggtcactcctcggcctttgagaagtttaatagtttcttcagatatgggaaaattagagaaagcgccttctttttgttccacaggtatttcctgctctatctcactgttactttcttcactggcagcttcactggggttacagtccggttcaggatgaggaaatccattcttcagtttggggcttttctctctagtttctccattcatttccttttctttcttcatcttcttgggcttaggagcatctatttcttcctcagaaggctcctcattttttgtcacttttttggttttagaagaaaccactttcttttcaatgggctcctttttctttctcaaacttttggttttaggagaaatgtcattttgagatggctcctctttcttttttgcctttttggatttaggagaattcatgtcaacttcagaaggctctgctttctttttaacttgtttagctttggggaaaacagtttcttcctcttctgctatctcttcagtcttatcagattttggcttctcttttttctcccaa

SEQ ID NO: 184874 - DNA, 3327 bp, Homo Sapiens
  misc_feature (2023)..(2040): n is a, c, g, or t
ttggagatatattgagttaaaatacattaagcttcttaaagaaatcttttcagtctgtctactggaagactgaaaattggaattacatatatgcctctaatggacaagcactatttagacaatgctctttgtaaatttgcctgcaggacagggaccattgttctagaagctttaaaaattgccagaggtctttaaattgaagtgctaagggaccttctccctcatgtccccaggtttataaccacaattgctagtgttcactgacctgcataggctactcaggtgtttgtctctcttttttggtttagtgttactcatgtattttacttcaataggatgtagagtcctacattcatcgatccgggcggacaggcagagctggaaggacgggggtgtgcatctgcttttatcagcacaaggaagaatatcagttagtacaagtggagcaaaaagcgggaattaagttcaaacgaataggtgttccttctgcaacagaaataataaaagcttccagcaaagatgccatcaggcttttggattccgtgcctcccactgccattagtcacttcaaacaatcagctgagaagctgatagaggagaagggagctgtggaagctctggcagcagcactggcccatatttcaggtgccacgtccgtagaccagcgctccttgatcaactcaaatgtgggttttgtgaccatgatcttgcagtgctcaattgaaatgccaaatattagttatgcttggaaagaacttaaagagcagctgggcgaggagattgattccaaagtgaagggaatggtttttctcaaaggaaagctgggtgtttgctttgatgtacctaccgcatcagtaacagaaatacaggagaaatggcatgattcacgacgctggcagctctctgtggccacagagcaaccagaactggaaggaccacgggaaggatatggaggcttcaggggacagcgggaaggcagtcgaggcttcaggggacagcgggacggaaacagaagattcagaggacagcgggaaggcagtagaggcccgagaggacagcgatcaggaggtggcaacaaaagtaacagatcccaaaacaaaggccagaagcggagtttcagtaaagcatttggtcaataattagaaatagaagatttatatagcaaaaagagaatgatgtttggcaatatagaactgaacattatttttcatgcaaagttaaaagcacattgtgcctccttttgaccacttgccaagtccctgtctctttcagacacagacaagcttcatttaaattatttcatctgatcattatcatttataactttattgttacttcatcagtttttccttttgaaaggtgtatgaattcattacatttttattctaatgtattatctgtagattagaagataaaatcaagcatgtatctgcctatactttgtgagttcacctgtctttatactcaaaagtgtcccttaatagtgtccttccctgaaataaatacctaagggagtgtaacagtctctggaggaccactttgagcctttggaagttaaggtttcctcagccacctgccgaacagtttctcatgtggtcctattatttgtctactgagacttaatactgagcaatgttttgaaacaagatttcaaactaatctgggttgtaatacagtttataccagtgtatgctctagacttggaagatgtagtatgtttgatgtggattacctatacttatgttcgttttgatacatttttagcttctcattataaggtgattcatgctttagtgaattcttcatagatagtatatataaaagtacattttaatagaaagccagggttttaaggaatttcacatgtataaggtggctccatagctttatttgtaagtaggctggataaatggtgcttaaatggtaatgtactccacttcttcctattggaagattaacattatttaccaagaaggacttaagggagtagggggcgcagattagcattgctcaagagtatgtnnnnnnnnnnnnnnnnnngaaccaaaccactggaaataatcaaatgcaaaaaggtaacaaattcataactggaaagcaaagagaagaacaagtatgatttggatgataaagcattgttttaatggtgaaaacttcacagatcactaatgtttctagaggttaacttcaagtgggcaagctggggtttttaggtagtcagtggcctagttcctaaagccacagtataggatctgttaaactgaatgtctgttgaaagtttgttttagctgcttggaggcttccttttaagacaaactgtatgtgattaagttgttttgagggaactgaagaacctgatgtagcccctggccagataactgcctgatttctcagatattatttctctgggaaacattctacatagcacaggagcttaagagtggcattatcttctcgccttaatttccagagattatttctgtactgagaatcctggaactactatgctaggaaatttaaagctgcatggtctgtcttgttttcatttaattattgtgaatacctagaatctttcttggtcctgatttctcttgcttaatccagtctttatctctaactgccccttatttgatcaccatgtactaggagctctgatagccagctcagctcctaatccttgaggcaacattctttttctatttgaacttcagttctgtccttgaatcccgactagatatttcttgccctctggtctcagaattctcttggcttttattccttgatccacttgccagttttatcactttacccttgttcctcatggcttcccatcaagccatgggtattaggtgacagtgtaatttattagattctggttttgcccaaatactgggcatgctttaataataactgaaccatttcattatttggataggcatgggtaccttatcaagcagattaaaaggatatggtacccgtcctttagaaaagaacagctaaaaccttgttgtggattatggatttagcctaaagaaaaataatctggcataaattaagagtaagagagaagattaatagaaatttcacttcacataacttaaaacatggctatttcaataaaggactaaagtttctcctggatcccagaattcaacctgtatttataaatgtataatgtatttagctactttttggtttaaatgaacttgttgggttagcttggtaaatgttataatttttactattttctacaaagaaatattttctaatttaagttggagctatctgtgcagcagtttctctacagtgtgcataaatgtttttact

SEQ ID NO: 184875 - DNA, 2527 bp, Homo Sapiens
  misc_feature (55)..(88): n is a, c, g, or t
  misc_feature (1600)..(1648): n is a, c, g, or t
  misc_feature (2103)..(2117): n is a, c, g, or t
tcagaaaacccccacctaatccacagaaagtaatgtctttcccctccccttggannnnnnnnnnnnnnnnnnnnnnnnnnnnnnnnnnaaaagttgccttattgtggagcgggaatctgaaatacccaaatgcctgttttcctcggtggagtcaacccgaagagctcccaccttctctggatgtgcctgggcttggactggctagaatctttctctggactgttgcatgtacagtgcctccatcctggaggcaagagagttgggagtggctcgaatcagagccgtgcccaagatatccctgctgttgcatcgtttgaagctgacgtcctgtgtctgtacactgctgccactgttgtgtcctcgctctgcttgctgttgcctcacgccaggccccgtcctgccgtgacacccttcatcctacccttggaaccccaaggccaagttggttcaaactgttggagaacagagttggcctgcatctggaacacacttgtcctcagcttaccatctcctcacaccccagagtggaaaggtgaacacctgcagctgaggcttggaaacgtttcttgtgttgccctgaaaaatctttgagacctcagggaggctctgtctctcttaaaaggtggagaaagatgccattctctccctaaggtctggtggagtctccccatcttgcatacccttctgcaagccatctatctctgctcactctccaattgacccgcctgggaacaagggatgaggaggagttgggggctggggggaatcctgccagttggtgaagccctgtggcaggaaggtatatgtggacatagagtatacctgattctctttcttcagccactgactgcttgggttgggctgtgaatgataatggaatggctggagtctgctgttgtcagaaggcagggagggtgatgaaggactgacccacatggactgggatgtgtgtcggttatgggcatgactgcacgttcactctcagtgggatctgggcaacatggagttcattgtcctgttgcttacttactgcaatgtctttggccctccttttcaactggttcctctgttgggcccaaaggttgggagtaggagacagtatcccaggctgacaagggcttgccctttaccttgggcaccttgttaatttttagcctgtgcccttccccacctttgccctcccagtggttggtatgtgggaagcccatctcagttcctgtgacttcatgtctcaaaccaaggatgagcgtctggtctctgctatgatggtggtatccgaggcctttccctgcccagtctggtgcctgccccacattgtaccggacactggattcctggacccccttctcctttcctttctttccttcaggtcacgcagccctgtactgtatccagcaccacagaaacctcagtgtttttcctctgctggtttggggcacaaggaagccttagggtatggggaaaggctgttattacctagagtttactcccaggccagggggctgccatcttcttcacagacatccctgaaaggaagcccctttggggcagggaggtgaggacttcatctcaacatcggctggtggttggtaggggagcnnnnnnnnnnnnnnnnnnnnnnnnnnnnnnnnnnnnnnnnnnnnnnnnnggtaacatgttaggagttaatgttgcaaagagtagtttacatcttcactttctgaagacacttgaatttaggaccgatgtatctgtgacaagcatgccagaagtggcaggggccatcagggctaaccacttcacacctaccatcgtcccatggggatccaagacctgagataaagcaacagcctgcccagatccctctgttcatcctatcccttccaaggttggtccatgccaacataacctctgggcatcagacatcagcaggtctgtgtgcctcagccctgttaaggggcaggtttctctttagccctcttcctgcacttgggagcaaaggcactaccagtagagaagggccatccagccgtgccccagcctggacccctggggctcagatagaggtgctgagcccctgtgtcaaagttgttaaatgtttttgttttgttccattgtagctcnnnnnnnnnnnnnnncccctttcctggtgattgattttacaaaagaaagtaagctgcttagaaggccctggaagggaagtgaggaggagggacaaggaagatgactagttacggagggtgagggttgttttttgccaaaaagcctgggtagagtgatctgaattatctggcaccctcctgaatggaaccccagagtacctcctgtgtggaagggtccctggattttccctaacacccaccctctcccccttcagccatgctgatggcagagaaaataaaaaacttgggagcccatttctcactggagaggaaaacttgtcatctggctttgcggagaaagttccaccttacgctcgtagtacattatctttactatgtgctaggatatcatatttaaaaggacaaaaaaatgtaaaatacttgaa

SEQ ID NO: 184876 - DNA, 2402 bp, Homo Sapiens
  misc_feature (363)..(396): n is a, c, g, or t
  misc_feature (934)..(943): n is a, c, g, or t
  misc_feature (1100)..(1146): n is a, c, g, or t
  misc_feature (1368)..(1379): n is a, c, g, or t
  misc_feature (1515)..(1542): n is a, c, g, or t
  misc_feature (2181)..(2215): n is a, c, g, or t
tctgtctcctgttttttaggtggaaagaatctgatgagccttttaggcctgttcaggccaaatttgagtttcatcatggtgactatgaaaaacagtttctgcatgtactgagccgcaaggacaagactggaatcgttgtcaacaatcctaaccagtcagtgtttctcttcattgacagacagcacttgcagactccaaaaaacaaagctacaattttcaagttatgcagcatttgcctctacctgccacaggaacagctcacccactgggcagttggcaccatagaggatcacctccgtccttatatgccagagtagagtactgaccagcaaaatggagaagatcagagaatgcagcagcagnnnnnnnnnnnnnnnnnnnnnnnnnnnnnnnnnncagagtttaaagaaaatggactcatgcacagaacactatgcattttgaaacttgttcatcctggatttttttaaatcatttttatttcagaacttaaacaaaaattagatgtcgtgcacggactgtgtgaaagaagatgctttgcatatttggtgcactgcatcagtattttactaaaaatgtgaaatgaaaggactattgtacactgaaatgcttaaatgtatttgaaagcacaaggtgataatcatttttatggttttcccatttgtgctggtttttgcctttttgacatctgtcatcagtatttagagggtgagaagtgaatgtaacaggtataaataacatttttaaaaacaataactttgctataatcacagttgttccagagcactgtcagatacattctaatgaccagaactggtttaaaaaaagaaaatacaaccatgggaaagaaatcttaaatgaaaaacgcatctcattgtaggcatttttgcctcatattttactgggccatgtttgtttcctggtactcatgtannnnnnnnnnccagatctctttccccaagttgctattgtaagagtattctgctgcgtgtggatgcagttatacacattaaagcagatctggagtctgaagtagctataaagcagctataaaacagaaatacatgcatagctgcagaaaccatgataggtagaggacnnnnnnnnnnnnnnnnnnnnnnnnnnnnnnnnnnnnnnnnnnnnnnnacagagaagagatttttattacaaagaaaaaaattccagtgaattgtgcagaaatgctggtttttacaccatcctaaagaaaaactttacaagggtgttttggagtagaaaaaaggttataaagttggaatcttaaattgtaaaattaaccattgagtgtcaaagttctaaaagcagaactcattttgtgcaatgaacataaggaaagactactgtataggnnnnnnnnnnnnctccttttaaatgaagaaaagctttgcttaagggttgcatacttttattggagtaaatctgaatgatcctactcctttggagtaaaactagtgcttaccagtttccaattgtatttagcttctggttggaatttgnnnnnnnnnnnnnnnnnnnnnnnnnnnncctaaataaaataggtgaaagttccctgactattcaggtgaatacacaaagtttgaagtgttaactttttctttccatttcactgatgttactggtcaccttagagaattatttcatagtctgtggctaaatagtaaattcagaagaaaaatacctggcaattgagtgtgtaacttcaacaagaacaggaatcaagaacatactgtcagctttcaacagttagcaacctggccttatgccttgcttcatgggaaagggccattcttaaatttcaaaatgctttcatgtgtcctcttatttaaaaattagaatctatttgaaataacattttgaatgtttattataaccaggtactcttctaagctcttgtcttaacctctcaacctttggtggaaatagatgcagaggttaagtaacttgctcaagctcagatcataagtagtggaggatttaaaaccaggctggctggctcttaaggcctatgctcttaatttaccatgttgaattaatttaccatattgaattacacttatgttcaccaagttaggcattttggcagccattgtttacgtttttattttggaataatttagaaaagttgccagagtaatatgaaagctgttgtgtaatctttacccnnnnnnnnnnnnnnnnnnnnnnnnnnnnnnnnnnnctctgtacacttatacctgtgagctatttgagtttgttgcacactttgtgcttccttaccccttccttagtacttcggcatatgttccaagtacaagaatatttcatataactagagtaaaattaccaaactcaggaatgttgatactctttatcatccatattcgttttgttgtcccagtatcctt

SEQ ID NO: 184877 - DNA, 2550 bp, Homo Sapiens
  misc_feature (118)..(151): n is a, c, g, or t
  misc_feature (155)..(171): n is a, c, g, or t
  misc_feature (1965)..(1974): n is a, c, g, or t
  misc_feature (2131)..(2177): n is a, c, g, or t
  misc_feature (2399)..(2411): n is a, c, g, or t
ttggcactgacaatacatagcaatagtgaaatctgaaataactaagaattaggtactacagccatggagctggctgggtaaaatctaattggatatttcagtttcattcacctacccnnnnnnnnnnnnnnnnnnnnnnnnnnnnnnnnnngagnnnnnnnnnnnnnnnnnggaaagcaaggatcacacttccccctccctgttccttaatcccttttctaaaaaggggggaaaatccggatggattttagggattggtctggtgtcagctgtgttttattgcacacctaaatcctgattataggcttttcatttctccgcaaagcctttattttggcagttaagccaaatgtgttttccagaaagttagttattttctcctctttctttcctttctttcctccctttttcccgtctgaccccaaacgttattgtccaaacatgactggacagcagcttttgtttcttgaccctgtaatatgacagtctgctaatattgacagaaggtgcagtttttgggttatagtcgtgattttcgctaatcaatcatattagcaggaaaaaaaatgacttgtttctgttgtacttgagtcttaagaaaaagtgcccatagtttagtgacaatttccaaaggctttagtaccacctgtatttcaaaatgggggacccaaactcccggaagaaacaagctctgaacagactacgtgctcagcttagaaagaaaaaagaatctctagctgaccagtttgacttcaagatgtatattgcctttgtattcaaggagaagaagaaaaagtcagcactttttgaagtgtctgaggttataccagtcatgacaaataattatgaagaaaatatcctgaaaggtgtgcgagattccagctattccttggaaagttccctagagcttttacagaaggatgtggtacagctccatgctcctcgatatcagtctatgagaagggatgtaattggctgtactcaggagatggatttcattctttggcctcggaatgatattgaaaaaatcgtctgtctcctgttttctaggtggaaagaatctgatgagccttttaggcctgttcaggccaaatttgagtttcatcatggtgactatgaaaaacagtttctgcatgtactgagccgcaaggacaagactggaatcgttgtcaacaatcctaaccagtcagtgtttctcttcattgacagacagcacttgcagactccaaaaaacaaagctacaatcttcaagttatgcagcatctgcctctacctgccacaggaacagctcacccactgggcagttggcaccatagaggatcacctccgtccttatatgccagagtagagtactgaccagcaaaatggagaagatcagagaatgcagcagcagttttttttcttgttttcttaccactttattctttcagagtttaaagaaaatggactcatgcacagaacactatgcattttgaaacttgttcatcctggatttttttaaatcatttttatctcagaacttaaacaaaaattagatgtcgtgcacggactgtgtgaaagaagatgctttgcatatttgctgcactgcatcagtatcttactaaaaatgtgaaatgaaaggactattgtacactgaaatgcttaaatgtatctgaaagcacaaggtgatactcatttttatggtcttcccatttgtgctggtttttgcctctttgacatctgtcatcagtatttagagggtgagaagtgaatgtaacaggtataaataacatttttaaaaacaataactttgctataatcacagttgttccagagcactgtcagatacattctaatgaccagaactggtttaaaaaaagaaaatacaaccatgggaaagaaatcttaaatgaaaaacgcatctcattgtaggcatttttgcctcatattttactgggccatgtttgtttcctggtactcatgtannnnnnnnnnccagatctctttccccaagttgctattgtaagagtattctgctgcgtgtggatgcagttatacacattaaagcagatctggagtctgaagtagctataaagcagctataaaacagaaatacatgcatagctgcagaaaccatgataggtagaggacnnnnnnnnnnnnnnnnnnnnnnnnnnnnnnnnnnnnnnnnnnnnnnnacagagaagagatttttattacaaagaaaaaaattccagtgaattgtgcagaaatgctggtttttacaccatcctaaagaaaaactttacaagggtgttttggagtagaaaaaaggttataaagttggaatcttaaattgtaaaattaaccattgagtgtcaaagttctaaaagcagatctcattttgtgcaatgaacataaggaaagactactgtataggnnnnnnnnnnnnnctccttttaaatgaagaaaagctttgcttaagggttgcatacttttattggagtaaatctgaatgatcctactcctttgggagtaaactagggcttaccagtttccaattgtatttagcctctgggtgggattttgaaa

SEQ ID NO: 184878 - DNA, 691 bp, Homo Sapiens
  misc_feature (172)..(181): n is a, c, g, or t
  misc_feature (338)..(384): n is a, c, g, or t
  misc_feature (606)..(619): n is a, c, g, or t
ttggatcacagttgttccagagcactgtcagatacattctaatgaccagaactggtttaaaaaaagaaaatacaaccatgggaaagaaatcttaaatgaaaaacgcatctcattgtaggcatttttgcctcatattttactgggccatgtttgtttcctggtactcatgtannnnnnnnnnccagatctctttccccaagttgctattgtaagagtattctgctgcgtgtggatgcagttatacacattaaagcagatctggagtctgaagtagctataaagcagctataaaacagaaatacatgcatagctgcagaaaccatgataggtagaggacnnnnnnnnnnnnnnnnnnnnnnnnnnnnnnnnnnnnnnnnnnnnnnnacagagaagagatttttattacaaagaaaaaaattccagtgaattgtgcagaaatgctggtttttacaccatcctaaagaaaaactttacaagggtgttttggagtagaaaaaaggttataaagttggaatcttaaattgtaaaattaaccattgagtgtcaaagttctaaaagcagaactcattttgtgcaatgaacataaggaaagactactgtataggnnnnnnnnnnnnnnctccttttaaatgaaaaaaagctttgcttacgggttgcatacttttattggagtaaatctgaatgatcctac

SEQ ID NO: 184879 - DNA, 1996 bp, Homo Sapiens
gagcaatgcttttccttataatagccaactttgtacaaaaaagttggcaacttgtgaccagaccttccagaaccaccaagaacagagggaacattataagcttgactggcatcggtttaacctaaagcaacgtctcaaggacaagcctctcctgtctgccctggactttgaaaagcagagctccacaggagatctttccagcatctcgggatcagaagactcagactcagccagtgaggaggacttgcagacactggatcgggagagggctacatttgagaagttgagccgacccccaggcttttaccctcatcgagttcttttccagaatgcccagggccagtttctttatgcctaccgctgtgtcctaggccctcatcaggatcccccagaagaggcagaactgctgctacagaacctgcaaagtagaggtcccagagactgcgtggtgctcatggctgcagctgggcactttgctggtgctatatttcaaggaagagaagtggtgacacacaaaacttttcaccgctatacggttcgggccaagcggggcacagcccaggggcttcgggatgcccgaggtgggccatcacactctgctggagccaacctgaggcgctacaatgaagccacactatataaggatgttcgtgacctgctggcagggccaagctgggctaaggcgctggaggaggctggtacaatactgttgcgtgctccccgctctggccggtctttgttctttggaggcaagggagcacccctgcaaaggggggatccccgactttgggatatccccctcgccacccgcagacccaccttccaagagctacagcgtgtgctccataagctgaccactttgcatgtctatgaagaagaccctcgggaagcagtcagactgcactcacctcagacacactggaaaacagtaagagaggagagaaagaagcctactgaggaagaaataagaaagatctgcagggatgaaaaggaagcgctggggcagaatgaggaatctcccaaacagggtttgattactatctggcaactgtcagatctgagtttctgtcctaaaaatgcactggcaaattccctactctcataactgacccatttccttatttaaacacacacccacagtgtctatcttagcaattactgagacatgtttagtgacctttccaaatctattatctcttttgttatggatgtttccccagagctaagaaaatctttgtgtggagcagatgcgtggatgtgttgcatggatctcacatagtttatctttgattggatgctgtggtttgaggctgagggctgcttccatgctttcctctattgtgcggcaccctaaggctactcatacggagagtccagggacttgttcttgtctgggctgagagcctcatttctgcatgtgatataatggactcagctcttgatgtgctacttttatctgggtgacaaaataaaaacaatttcatttcaggctttcattcttatgcatctgcttctaccctctgagtactccctagatggatttcacatgtcaggtttttccctaggttcagggtcggagggagaagatggctttcaggtagagttggagctagtggagttgactgtggggactctggatctttgtgagtctgaagtattgcccaagcggaggaggagaaaaaggaataagaaggagaaaagccgagaccaggaggctggggcacatcggactcttctccagcaaactcaagaagaggagccttccacacagtcatcccaggcagttgctgcccccttgggccctttgctggatgaggccaaagcccctggtcagccagagctctggaatgcactgcttgctgcttgccgagctggagatgttggagtgctaaagctgcagctagctcccagccctgcagaccctagagttctgtctctgctcagtgcccccttgggctccggtggctttactctcctgcatgcagcagctgcagct

SEQ ID NO: 184880 - DNA, 1382 bp, Homo Sapiens
  misc_feature (934)..(988): n is a, c, g, or t
ttggttttttgcgtttgaaaatgtgttttttgaggtggaatacccaactgacccctcatctctcctctctctctgctgccctgcagtgctacagttgaaactccagcagcgccggacccgggaagaactggtgagccaagggatcatgccgcctttgaaaagtccagccgcatttcatgagcagagaaggagcttggagcgggccaggacagaggactatctcaaacggaagattcgttcccggccggagagatcggagctggtcaggatgcacattttggaagagacctcggctgagccatccctccaggccaagcagctgaagctgaagagagccagactagccgatgacctcaatgagaagattgcacagaggcctggccccatggagctggtggagaagaacatccttcctgttgagtccagcctgaaggaagccatcattgtgggccaggtgaactatcccaaagtagcagacagctcttccttcgatgaggacagcagcgatgccttatcccccgagcagcctgccagccatgagtcccagggttctgtgccgtcacccctggaggcccgagtcagcgaaccactgctcagtgccacctctgcatcccccacccaggttgtgtctcaacttccgatgggccgggattccagagaaatgcttttcctggcagagcagcctcctctgcctcccccacctctgctgcctcccagcctcaccaatggaaccactatccccactgccaagtccacccccacactcattaagcaaagccaacccaagtctgccagtgagaagtcacagcgcagcaagaaggccaaggagctgaagccaaaggtgaagaagctcaagtaccaccagtacatccccccggaccagaagcaggacaggggggcaccccccatggactcatcctacgccaagatcctnnnnnnnnnnnnnnnnnnnnnnnnnnnnnnnnnnnnnnnnnnnnnnnnnnnnnnncaccacaactaccaggccatcctgcctgccccgccaaagtcagcaggcgaggccctgggaagcagcgggacccccccagtacgcagcctctccactaccaatagcagctccagctcgggcgcccctgggccctgtgggctggcacgtcagaacagcacctcactgactggcaagccgggagccctgccggccaacctggacgacatgaaggtggcagagctgaagcaggagctgaagttgcgatcactgcctgtctcgggcaccaaaactgagctgattgagcgccttcgagcctatcaagaccaaatcagccctgtgccaggagcccccaaggcccctgccgccacctctatcctgcacaagctggcgagggtggtggtagccttcccagcgg

SEQ ID NO: 184881 - DNA, 1370 bp, Homo Sapiens
ttggcgagtactgcatcctgatcctgggcctggacaatgctgggaagacgaccttcctggagcagtcgaaaacccgatttaacaagaactacaaggggatgagtctatccaaaatcaccaccaccgtgggcctaaacatcggcactgtggatgtgggaaaggctcggctcatgttctgggacttaggagggcaggaagagctgcagtctttgtgggacaagtattatgcggagtgtcacggcgtcatctacgtcattgactccaccgacgaggagaggctggctgagtccaagcaggcgtttgagaaggtggtgaccagcgaggcgctgtgcggtgtccccgtcttggtgctggccaacaagcaggatgtggagacgtgcctctcaatccctgacatcaagacggccttcagcgactgcaccagcaagatcggcaggcgagattgcctgacccaggcctgctcggccctcacaggcaaaggggtgcgcgagggcatcgagtggatggtgaagtgtgtcgtgcggaatgtgcaccggccgccgcggcagagggacatcacgtaggcgcagccgcgctgccgtcgggacggctggtcccctggtgctggaggagtggcctcctgttggctcccatgctgctgatctggggggtgggtttgctttgctttggggttcttctatttgttttctcgaagacaaactttcctctatgtctggaaaagcgtaggcatccggaggctttggaggggagtctggcagcccggctggcccaggccctgcagcggcagcctttccacagggcgcagcggcggcctttcgaggccctttctggggggtctgagggagacctggttgggaattggggctccagtgctcaggctggcttgggctgcatgaggacagccctgtgggaccctcgggagaccccgtggctgtctccgccccatcgaggaggaggcccgtcagccatggctgccatctggcttctgccctgtgaccccgtgaccccgtgaccccggaagtggtctggggctgatcttgccttgaggaagacccaggccatgttcccaaaggccagcgggggccctggattgtgatgcagcctcgggacagggctgaggcctgcgggggaagacctataccccacgcctgggcctggcttcacctcaccctaatcccccgggagggagctgactgatgcaaaaagcttatggggcctgctgggagtggctgtttttatgccccagccccgcaagttggggagtgtttgtgggggtccagagccctcccccagccaggagagaacctcccggaggggttctctgtggggccctgtgtcccctgctcaggagtaaggctggtcctggggtc

SEQ ID NO: 184882 - DNA, 1497 bp, Homo Sapiens
  misc_feature (353)..(369): n is a, c, g, or t
  misc_feature (432)..(449): n is a, c, g, or t
  misc_feature (1140)..(1149): n is a, c, g, or t
ttggcagattttagccagtctttgcttttatacttttgtgaaatttaatttctctctatagcaccttcctttttcgttttcagttatcaaaagtgactttgacctcataaaagagttgagaacatctctcgtgtcacatactgcaggtgcatcagttacttttgcacagattctagggggacatttttctgaataggaagacaggacaaagttaacagcttaagggctcttaattctgtgagttgaggacttaaaagtattgtagcatttgtttggatccatgaaaaatgtattcagtgggctttaaaatttccatttgcagaatttggtctctcaggctgtttgggagctcnnnnnnnnnnnnnnnnnctcctttgacacctattttattggtgtttaaagtaaaggttaacatctgtagcttttccaggnnnnnnnnnnnnnnnnnngatatgaaattgtctttctccattgcagaaataagctagggaaacactaacccaaaaactttctgtagagctgttcctttggaggcagcatcacttattggcagtaaagactcagtataaaagcaccggcatccctacttgggtgatggggattaattttatagcattccattttcctagtgccacatgtgaaattggattttgatgatcttaatctatattctacccttataataaaagatcaaaagatatatctcctatgaacagattggagataggagatgaaaagttgggaggatgtctttattctaatgtgagggtagggaaaatgtggataacattactggggtgagggaggcattgttctttagttggagttctcattcttattctccagtactgacttgtggggaaagcatactttttcactgccaggtactgaatgcagaggctcagtgaagtatatatgtgggaagtgcatgcatttcgtttattagcaaacatagctggattaagacaaagttgttggtttggaaaggggttaaagccttaagtgaacaaatctagctaacagtgaatgaactaggtaatataacttgcatatttttaatttcctttggttaaaggtcccccatacttctctgttcggagacatgagaagtatgattacttcagtgttagttttcttaannnnnnnnnncccctatttgtcccttgtcactttgttgcaagctagaaatctgtgggttatacatagggcagctctttgtgaaagtggtttattccactggagaaaggggattgaaaatcagttagaaccaatgtatttcttgccccacggaacactattcctataagatagctgaaagaagctgctgtgaggagctcagctccaaacccaggatcagcaccttgtataggaattcccatgaattatgacctctcattctgttttatcacagtgcatatatgtcctacttcaggaaaagtaaaacagtccttttacgaaagaaagtcaatcttgtatcctaaccttttaataaaagtt

SEQ ID NO: 184883 - DNA, 1331 bp, Homo Sapiens
ctttgtacaaaaaagttggtgacatctctctgaacaacgagaaggtgctggtggagaccagttaccccagccaaaccactcgactgccccccatcacctatactggccgcttttccctggagcctgcacccaacagtggcaacaccttgtggcccgagcccctcttcagcttggtcagtggcctagtgagcatgaccaacccaccggcctcctcgtcctcagcaccatctccagcggcctcctccgcctccgcctcccagagcccacccctgagctgcgcagtgccatccaacgacagcagtcccatttactcagcggcacccaccttccccacgccgaacactgacattttccctgagccacaaagccaggccttcccgggctcggcagggacagcgctccagtacccgcctcctgcctaccctgccgccaagggtggcttccaggttcccatgatccccgactacctgtttccacagcagcagggggatctgggcctgggcaccccagaccagaagcccttccagggcctggagagccgcacccagcagccttcgctaacccctctgtctactattaaggcctttgccactcagtcgggctcccaggacctgaaggccctcaataccagctaccagtcccagctcatcaaacccagccgcatgcgcaagtaccccaaccggcccagcaagacgcccccccacgaacgcccttacgcttgcccagtggagtcctgtgatcgccgcttctcccgctccgacgagctcacccgccacatccgcatccacacaggccagaagcccttccagtgccgcatctgcatgcgcaacttcagccgcagcgaccacctcaccacccacatccgcacccacacaggcgaaaagcccttcgcctgcgacatctgtggaagaaagtttgccaggagcgatgaacgcaagaggcataccaagatccacttgcggcagaaggacaagaaagcagacaaaagtgttgtggcctcttcggccacctcctctctctcttcctacccgtccccggttgctacctcttacccgtccccggttactacctcttatccatccccggccaccacctcatacccatcccctgtgcccacctccttctcctctcccggctcctcgacctacccatcccctgtgcacagtggcttcccctccccgtcggtggccaccacgtactcctctgttccccctgctttcccggcccaggtcagcagcttcccttcctcagctgtcaccaactccttcagcgcctccacagggctttcggacatgacagcaaccttttctcccaggacaattgaaatttgc

SEQ ID NO: 184884 - DNA, 1488 bp, Homo Sapiens
ctgaaaaaggggtcattggacaaactctgctgccgaagtttccaaatgggtttcatctggccacggagaccccccgtcccacctaccccagggtttgaggcaatgaggagaaaccaacagggctgagacgacaggtccccatgctttccatcaccacaaaagtgtcatagacgccatgaagggaaggccaggacaaagtccactcttccgacccttcccaaggcaccggcagagtgccaggcacaaggcagatgctccaagacagtgtgcaggcagctcttgaagaagtggctgcgagtgaggccttgcttgggccactgtcccccacctgggaagagcagggacggtaatgcaagtgctggggaaggatgccaggtgttccgctccccaccttcagaggttccaagccccccagggcaacacaccccaacatctacgttcctgaagagaaggtgggactctcaggtcacacttctgccatcaaaaaagtgcaaaagccagcagctccaggaaagtgtttctcagttccccccaagtccaggtgggaggagagaggggccctggagctccctgggagcaggaggccccagttctcatatttcagcaaaatacttccctctccccgtgcagccagcctgcccttgcacatctttggaggcaggccacaggcctggaaggtgtgtggacctgcaggagagccagggtgcggaccacccagccaacttgcgtctcagctcagggacttcctgcagaagaggcctcaacccaacacctgtccaagttcgttcccatgaggcgtcttcccaggtcaagatgcaccaaacagtcacgtggaggttttacacattccttaactttcagcaactaggagcctgcctcctttaattttaggattctgccaccagtgtggtcttcccagctccaaacgtgccgggagatcacagaaacgaaacaaaacagcacagtgtccccagcggcctcttgtcaggaccagcactcatcaccctcccaaggctttgtgaaggtctccgaggctggacattcctaggaaacccagagggtggaggtgggggccccacggctaaaggcagggcgccagggacccacgtggctttctggtgtccagcggccgaggggacacagacggtgccaagcatggttctcttcggccaaggctcccccgctgctccaccccaccctctccggaagaagtcctcaggatacgttttgcctcgggcggagggcaggacacaagctaagctgcagaaatggaaatggaatggaaccgacacgtctgcctcagtgtttcctggaggagtcagcgctgctccgggagcctttcatgttttgtccaggcagctgcgtgggcacctccgggggcaggcagctgggcagggcggccgaggtggaggccacatgctcctcaaagctgttgatgcgaggctttttggtgggttcggggctggctagcggggtgacactatccaa

SEQ ID NO: 184885 - DNA, 2049 bp, Homo Sapiens
cccccacccccacgggctcgggaaggtcaggcccagccagcaggggtcagaggcggctcagctgtgcggctcaggaccccacctccgagggcgcctccgttggggccatggaggccgggctaggcccgcctaccgcagcccccaggggagttgtgtcagaagctgcggagtcactcggggggacactgtcctggggggcgtgggggaggcccccagcagggcccagcgggctggctggacgccgctccaggagggaggcgctcaggccggacaggaaggaggcgtctgtgatgatggcagcggtctctgccatccaacccaggtcaccaccggcagctgctgccactgaggctgccgcggccaccagggagctgggcgccgctgccacaggcccgggactcccgctggccccaggcgagacggggcccagggcggggggctggccggcagagtcaggggctgtagccggggcgcccgagttgttgttcatgtcatcgggcagcgccgtgggggtcccggggcccagtggcggcgcctgaagcagcatctcctggatgcggacctgctgcaggatggcaggcagctcgtagtggtggaagaagtagatcatggaatgctggatgaagagccaggaggtgaccagggccaggctgctatactgcccattgaagcggtagtgataggcatagaaggcgaagtggtagagatagaagaaccgcagccaatgccgcttgctggtgctggtgtggcagcagatggcgtcatactggtccgcgagccacacgatgaggatgatgtagaaggcggtggtggtgtcgttgaagaactccgacatgatggcctccatcccgacgagggccaggatgacggtcagcaggggcgctgcggggaaggcgatggccatgttcatctccagcatctgcagcaggtccacgatgaagacgaagatctggtggtgtgagtaccgcagcagcatggacacgctcagcgtgaagatgaccatgatggcgaaggcggccaggtaggacgtccgcgccatccacatgctcacaaagcggtagtgctcgcccgacaccacattccgcaggaagcccttgttctcctcgttctcggccaggcccttcacgctggacatgaggatgtcatcatagcccaggaactcatccagcagcaggcggctgaagcggtccccgaagcactggtcccgcgtggggtccagggtgaccaccatgacggggatgctcaggcgctggcgggtggcctgcgacaggcgaaggaagccatactctagtgagtactccacgatgtactcgtcctgcggccacactttggtgggcgtctcggggaaggggaactcctggctgtcattcagggcctctgtgctactcggcggcttgaacaccttgggctcgatgtccagctcaaacttgatggagctgttcccaaacatctccatggtcagctcttcctcctcctcatcttccatgtccaggttgctgcctggttccacggccaggcccgggaagctcccgcggccgccgctgtcacagaactgtaggaagacgggcgcgcggctcgagttgtgccgcacttccacacgcaggatgccctcacgcggccacttgtcacgcacgtgctccaggcagttgatgggcgagcgggagaagacgatgtggatgtaggccaggacgaagagcacaaacagggccttgagcagcacgaagaactcgaagagacggcggaaggcgggcgggaagagccgcgaataggtgacagccatcttgaagaacagcgcgtggaagagccggtcgcgcacgttgatgagggggttggggttgagattgggggtgcgaggcccgcgcgcgggggccgggccgccgccgccgccgttgggcccgggccccggagctgcgggctccacgtgctccgacatgcctcccagcgtcgcgccctaacgacccgcaagtgtccgagggcgcctcccggccgccatcggccgccctcgcagccgccgctctcctcacggcctcccggccgccgccgccccaa

SEQ ID NO: 184886 - DNA, 1804 bp, Homo Sapiens
ttggctcagcttcaggcgctgcttcagatttggcctaaactgcccccccgggaggccctagagcttctggatttcaactatccagaccagtacgttcgagaatatgctgtaggctgcctgcgacagatgagtgatgaagaactttctcaatatcttttacaactggtgcaagtgttaaaatatgagccttttcttgattgtgccctctctagattcctattagaaagagcacttggtaatcggaggatagggcagtttctattttggcatcttaggtcagaagtgcacattcctgctgtctcagtacaatttggtgtcatccttgaagcatactgccggggaagtgtggggcacatgaaagtgctttctaagcaggttgaagcactcaataagttaaaaactttaaatagtttaatcaaactgaatgccgtgaagttaaacagagccaaagggaaggaggccatgcatacctgtttaaaacagagtgcttaccgggaagccctctctgacctgcagtcacccctgaacccatgtgttatcctctcagaactctatgttgaaaagtgcaaatacatggattccaaaatgaagcctttgtggctggtatacaataacaaggtatttggtgaggattcagttggagtgatttttaaaaatggtgatgatttacgacaggatatgttgacactccaaatgttgcgcttgatggatttactctggaaagaagctggtttggatcttcggatgttgccttatggctgtttagcaacaggagatcgctctggcctcattgaagttgtgagcacctctgaaacaattgctgacattcagctgaacagtagcaatgtggctgctgcagcagccttcaacaaagatgcccttctgaactggcttaaagaatacaactctggggatgacctggcaccgagccattgaggaatttacactgtcctgtgctggctactgtgtagcttcttatgtccttgggattggtgacagacatagtgacaacatcatggtcaaaaaaactggccagctcttccacattgactttggacatattcttggaaatttcaaatctaagtttggcattaaaagggagcgagtgccttttattcttacctatgatttcatccatgtcattcaacaaggaaaaacaggaaatacagaaaagtttggccggttccgccagtgttgtgaggatgcatatctgattttacgacggcatgggaatctcttcatcactctctttgcgctgatgttgactgcagggcttcctgaactcacatcagtcaaagatatacagtatcttaaggactctcttgcattagggaagagtgaagaagaagcactcaaacagtttaagcaaaaatttgatgaggcgctcagggaaagctggactactaaagtgaactggatggcccacacagttcggaaagactacagatcttaacgatcagccttcgctcctaatgtatttgttggtttcatttcattttcattttgcacttgcactaaattgaacatgaccctgttagagatgttataaagggaatgaaatcctggaactcagagttaaattaagaacaagggcatcccacagaacctaatctgaacaatccccgatgattccctctgctttttgaatgctttccaagacttatcatgaaaactgtcaatggataatcatttcctgctgacttttgcacgcccaaggaatgctactaggggattgtttccgtttttggttggttttttctaatatttggtacttcccagaatggtgtaatacttctttttcatg

SEQ ID NO: 184887 - DNA, 1136 bp, Homo Sapiens
  misc_feature (749)..(804): n is a, c, g, or t
ttggcatttgccttacctgtcttagtctgaaatgtaataggaaagataacgggaagatgccagttgactgaaaattcaaagcctttcaatttgaagtgacctaggtgggaggtgataaaatttgttccctttatagttatggaagtggcttaggtgaattgagtagagggttcattccaattcctactgtataggtgtctgtgtctcaaaatttattgtaatcattggtaccattggtggcctcaacagaggccaaggagttctgtgagccctggcagcaaaaaacaccttggggggtgaagctgtcaatgccaccagttggacctccatacattctgagctaacccagaatctttagtcggcagaattaagtgctggtgtctttcactggcagcatgaagttagccaccaagtcctcacaagccgtgctgcttagttgctcggtggttatggataaactttgcccagcatgatttttgggttcatcttatcggttcccctggtgggcagatacacagtgttctgcattccacatgtaagtgaattgcaaaaacaaaacaaaactcactctcttgtaggtttatttatgtgtgtgtgaatgtgtattttaattatgtgtatttaactctttaaaatctcttagattttaatttatcctgtaaatttctgtatatataatttaataacagaagcctccaccagcaacagcatgtggaagatacagatttgtcatttctcccttccgcccnnnnnnnnnnnnnnnnnnnnnnnnnnnnnnnnnnnnnnnnnnnnnnnnnnnnnnnnggtctgttccaaaaactctgaatcatctacattttaaggtattttacctcaaaaatgaatcattgtgttaggattctaattctttataaagaacttcatgggcttcaataatgtctagaaagtaaaataaagaggaatgttaccatccccagctgcccttatttccagagaaccagacgtttgtttcccagttggaaagaagacagttgagcacttcacgatggtttttaaatttggtatgagattctctgccaacaccaagctctgagttaacgtgctttcttctcctggccctgacagagcactacagcatcaaagtaaatctttgggga

SEQ ID NO: 184888 - DNA, 832 bp, Homo Sapiens
attttaaagatcaacttttattgtaacaaatataaagtcatcaatgttttacaaattgtcaaaaatgctttaagtacaaaaaaatacattagtaaaatgaaagttatgttgtattatttggtatacacttaatactgccaacatgcataacatatgccagaaaagctcatgcattattggaagagaaaagaaatgtgatgtaactgctatattgtctgattataaattcattgcttcagtcagttttctttcttcagggataccatttacctgtagtctgctgttggggaatctgagtctgatgtggcaagttctgctgcgtttgcatcaatggcatgtttgtgctatcatagttgtctgtgtgtaaaggaggtatgatttccccagtcacagggtggaacacaggaagcgttgacaggggccatgctatctctctattcttggacatgtctcgaagctccttggtagatttctgaatagcactgtgatggaccagttggatgtctggtgtttgcatgtttctcttttccacgccttcccgtcggcagcacatgatataagcaagtattagaaaaaggaccagtgccactgccgagggcacagccagtgtaattaggaaatccgtgtaatagtctctgcttttcaaagaatcagaagggggtttgtattctccaccatcaggtaaaatcccctctccacgaatcacttcctgataggtggacacttgctttgttttatcaaccaatgaaattttgcaccagtcaatgtaaaattgagtacgaaattttttatcacatgttattacaggctccaccaacttttttgtacaaag

SEQ ID NO: 184889 - DNA, 2046 bp, Homo Sapiens
  misc_feature (677)..(699): n is a, c, g, or t
  misc_feature (1823)..(1833): n is a, c, g, or t
ttggattcatttttttcaacaatggagacatagatttgacccacaataacttctccccctctctttttactctgctcaaaaagcatctctcctcccattacccaaccttggtcataagtgtgcctggctggtttgcagatatttgttctgctttgtaaaaattggccattagtgcatttattgagatgatctctaaagagctatgccctgacctacccctgattctatgacattggggcccttcttttgctgaaactgccttacgtaatggttttactccttgaaagagatttgacggaatccattttatgccaagtgctgccctgcactgtttctgcaatatgtggtgtatgctgtggtgatcttgctgggaatgattataagtgtgtgtgtggtgggggagtgggtattacatgcattgctgaagagtcatcctggtgttcctcattcctcccaccttcccgtggtcattttaattacggggcagtgtcaccgcaaagggaggaaactcaaagccgaaagcaaaattccaggcctgattctggcttttgaggttcctggttcttgaagccaggcctgacccgactctcagatggggtcagtcccgtcgctttgcagactgaccctggaaatctacaaaatgcagattttcctgatttcctcttctcttgcccagnnnnnnnnnnnnnnnnnnnnnnnaaagcctggattgtaaccagattttcttttttcccccttctcagctgtaaatatgatatctcctttcagggccccagcttaagggcaaagtgagttaatgtgtagacaaaggcgagggacaagagagagttaacatctagacagtggaaaaagccatggtgtgtggtttctgggaaccaccaacacttgcaggtttagctttttcccagggttgactacaagaaagaaaaccatgtttttgcaagattaaaatgtggttgagtgtgcctaaattaaccatccccatttttatcatatttccaccatcacttcagggttttaagagtcagtgctcacctgggcggagctggtagtacattttgcttcttagaaagctaagtcctgggttccgtctgattttaggttccaggaacttcctgagaacacccgatcgcagagggtaattttctggagtttgttttgcagggatagctgggagtatggccaccctgctccacgatgcggtaatgaatccagcagaagtggtgaagcagcgcttgcagatgtacaactcgcagcaccggtcagcaatcagctgcatccggacggtgtggaggaccgaggggttgggggccttctaccggagctacaccacgcagctgaccatgaacatccccttccagtccatccacttcatcacctatgagttcctgcaggagcaggtcaacccccaccggacctacaacccgcagtcccacatcatctcaggcgggctggccggggccctcgccgcggccgccacgacccccctggacgtctgtaagacccttctgaacactcaggagaacgtggccctctcgctggccaacatcagcggccggctgtcgggtatggccaatgccttccggacggtgtaccagctcaacggcctggccggctacttcaaaggcatccaggcgcgtgtcatctaccagatgccctccaccgccatttcttggtctgtctatgagttcttcaagtactttctcaccaagcgccagctggaaaatcgagctccatactaaaggaagggatcatagaatcttttcttaaagtcattctctgcctgcatccagccccttgccctctcctcacacgtagatcannnnnnnnnnngcagggtgctgcctatgggccctctgctccccaatgcctttagagagaggaggggacggcacggccgctcaccggaaggctgtgtgcggggacatccgaggtggtggtggacaggaaaggacttgggaaagggagcgagaaattgctttttctcttcctccctgggcagaatgtagcttttctgcttcactgtggcagctcctccctggatcc

SEQ ID NO: 184890 - DNA, 1949 bp, Homo Sapiens
ttgggttggaggcgataacgatttgtgttgtgagaggcgcaagctgcgatttctgctgaacttggaggcatttctacgacttttctctcagctgaggcttttcctccgaccctgatgctcttcaattcggtgctccgccagccccagcttggcgtcctgagaaatggatggtcttcacaataccctcttcaatcccttctgactggttatcagtgcagtggtaatgatgaacacacttcttatggagaaacaggagtcccagttcctccttttggatgtaccttctcttctgctcccaatatggaacatgtactagcagttgccaatgaagaaggctttgttcgattgtataacacagaatcacaaagtttcagaaagaagtgcttcaaagaatggatggctcactggaatgccgtctttgacctggcctgggttcctggtgaacttaaacttgttacagcagcaggtgatcaaacagccaaattttgggacgtaaaagctggtgagctgattggaacatgcaaaggtcatcaatgcagcctcaagtcagttgccttttctaagtttgagaaagctgtattctgtacgggtggaagagatggcaacattatggtctgggataccaggtgcaacaaaaaagatgggttttataggcaagtgaatcaaatcagtggagctcacaatacctcagacaagcaaaccccttcaaaacccaagaagaaacagaattcaaaaggacttgctccttctgtggatttccagcaaagtgttactgtggtcctctttcaagacgagaataccttagtctcagcaggagctgtggatgggataatcaaagtatgggatttacgtaagaattatactgcttatcgacaagaacccatagcatccaagtctttcctgtacccaggtagcagcactcgaaaacttggatattcaagtctgattttggattccactggctctactttatttgctaattgcacagacgataacatctacatgtttaatatgactgggttgaagacttctccagtggctattttcaatggtggccagaactctaccttttatgtaaaatccagccttagtccagatgaccagtttttagtcagtggctcaagtgatgaagctgcctacatatggaaggtctccacaccctggcaacctcctactgtgctcctgggtcattctcaagaggtcacgtctgtgtgctggtgtccatctgacttcacaaagattgctacctgttctgatgacaatacactaaaaatctggcgcttgaatagaggcttagaggagaaaccaggaggtgataaactttccacggtgggttgggcctctcagaagaaaaaagagtcaagacctggcctagtaacagtaacgagtagccagagtactcctgccaaagcccccagggtaaagtgcaatccatccaattcttccccgtcatccgcagcttgtgccccaagctgtgctggagacctccctcttccttcaaatactcctacgttctctattaaaacctctcctgccaaggcccggtctcccatcaacagaagaggctctgtctcctccgtctctcccaagccaccttcatctttcaagatgtcgattagaaactgggtgacccgaacaccttcctcatcaccacccatcactccacctgcttcggagaccaagatcatgtctccgagaaaagcccttattcctgtgagccagaagtcatcccaagcagaggcttgctctgagtctagaaatagagtaaagaggaggctagactcaagctgtctggagagtgtgaaacaaaagtgtgtgaagagttgtaactgtgtgactgagcttgatggccaagttgaaaatcttcatttggatctgtgctgccttgctggtaaccaggaagaccttagtaaggactctctaggtcctaccaaatcaagcaaaattga

SEQ ID NO: 184891 - DNA, 1270 bp, Homo Sapiens
ccaactttgtacaaaaaagttggctcaagaggtcacgtctgtgtgctggtgtccatctgacttcacaaagattgctacctgttctgatgacaatacactaaaaatctggcgcttgaatagaggcttagaggagaaaccaggaggtgataaactttccacggtgggttgggcctctcagaagaaaaaagagtcaagacctggcctagtaacagtaacgagtagccagagtactcctgccaaagcccccagggtaaagtgcaatccatccaattcttccccgtcatccgcagcttgtgccccaagctgtgctggagacctccctcttccttcaaatactcctacgttctctattaaaacctctcctgccaaggcccggtctcccatcaacagaagaggctctgtctcctccgtctctcccaagccaccttcatctttcaagatgtcgattagaaactgggtgacccgaacaccttcctcatcaccacccatcactccacctgcttcggagaccaagatcatgtctccgagaaaagcccttattcctgtgagccagaagtcatcccaagcagaggcttgctctgagtctagaaatagagtaaagaggaggctagactcaagctgtctggagagtgtgaaacaaaagtgtgtgaagagttgtaactgtgtgactgagcttgatggccaagttgaaaatcttcatttggatctgtgctgccttgctggtaaccaggaagaccttagtaaggactctctaggtcctaccaaatcaagcaaaattgaaggagctggtaccagtatctcagagcctccgtctcctatcagtccgtatgcttcagaaagctgtggaacgctacctcttcctttgagaccttgtggagaagggtctgaaatggtaggcaaagagaatagttccccagagaataaaaactggttgttggccatggcagccaaacggaaggctgagaatccatctccacgaagtccgtcatcccagacacccaattccaggagacagagcggaaagacattgccaagcccggtcaccatcacgcccagctccatgaggaaaatctgcacatacttccatagaaagtcccaggaggacttctgtggtcctgaacactcaacagaattatagattctaatctgagtgagttactgagctttggtccactaaaacaagctgagctttggtccactaaaacaagatgaaaaatacaagagtgactctataactctgggtctttaagaaagctgccttttcattttt

SEQ ID NO: 184892 - DNA, 1432 bp, Homo Sapiens
  misc_feature (1125)..(1183): n is a, c, g, or t
tttgaaaaacacagtgtgccaccctggacacccgtgagttgaatgtagtcaaatataaaccatgccaggcaatgacacatgaaaaataccataatatcccatctgaacacatggtgggctgcccatccaataattaaactggcaacaaagcattctgaaattggctcacaaattattgtagcaggaagcatgttaattcgtagtttggtccacctgatcattctggattgaaactgagaaattgaatatgagccagagttttgcattgcaacttgagtggacattgcaaacctccaacctcggtcagctatcgctttggccataaagtaatcttcggcaatgtactgagcaaaagctataagtcctcctgcttgatccaacacatcttttctcattaaacaagacattcctgtcacacatttgaaaccagttacattggcagagatatagtatcttggatgtgaagttccaaaatatacctgctctaaggtggcagcaaagccctgtctgtctgctacgtaaggcagcccgtgaaccaagcctactttttctgtcatttgattcaccatgtcagtaagcgtatctggaattactcttattccactatcacaaatccatataagatcatactttgcaacttcatatcctggcattaaattattaattttaggattaatgccaacttttttgccacctataaacaatctagcatcaacatttggatattttccaagaagcttcttacatacatcaatggctggatcatcatgatcttgtacacaaaggagcacttcatatttgggataatccaattcaaagaatgtttccaggttgttgattaagttaggatctacccctttcagtggtttcagaagagagacacctgggagcttgctataaggctgtttgtcagttgccttcttgttgaggtgtaatcgggtgtagatgatagccatgaaatgcatcagccacagcaccaagaagaggacgaacccgaagacggccattccctccaaggccaggtccagcagcgccatcccccggcccgccggaccggcccggcccgctgcggccgccaacacggacaacgctcccgcaggaggaggacagggtgggcgcccggtnnnnnnnnnnnnnnnnnnnnnnnnnnnnnnnnnnnnnnnnnnnnnnnnnnnnnnnnnnncggaaggggcgggcagggcctgcgcgcccccgcccgcgcgctctcgcctgcgcgctgtcttcggcgcgctcgcgggcggctgcgggtgctgcggtctcccggctctggtcggggcgaccgcggtcccgcgctccggttcgcctctcccgagcctcgcggccgcccaccagaccctgcgcgcgggcacctccgccgcctctccgtctcgccgccgggctcccggccgagcagctccaccgccgcagccaa

SEQ ID NO: 184893 - DNA, 1205 bp, Homo Sapiens
acagagttagcacgacatcagtatgagctggtcaccttccctgacaacgcagacatgtggggcctgggaaatgaaagagcgccttgggacagggggatttggaaatgtcatccgatggcacaatcaggaaacaggtgagcagattgccatcaagcagtgccggcaggagctcagcccccggaaccgagagcggtggtgcctggagatccagatcatgagaaggctgacccaccccaatgtggtggctgcccgagatgtccctgaggggatgcagaacttggcgcccaatgacctgcccctgctggccatggagtactgccaaggaggagatctccggaagtacctgaaccagtttgagaactgctgtggtctgcgggaaggtgccatcctcaccttgctgagtgacattgcctctgcgcttagataccttcatgaaaacagaatcatccatcgggatctaaagccagaaaacatcgtcctgcagcaaggagaacagaggttaatacacaaaattattgacctaggatatgccaaggagctggatcagggcagtctttgcacatcattcgtggggaccctgcagtacctggccccagagctactggagcagcagaagtacacagtgaccgtcgactactggagcttcggcaccctggcctttgagtgcatcacgggcttccggcccttcctccccaactggcagcccgtgcagtggcattcaaaagtgcggcagaagagtgaggtggacattgttgttagcgaagacttgaatggaacggtgaagttttcaagctctttaccctaccccaataatcttaacagtgtcctggctgagcgactggagaagtggctgcaactgatgctgatgtggcacccccgacagaggggcacggatcccacgtatgggcccaatggctgcttcaaggccctggatgacatcttaaacttaaagctggttcatatcttgaacatggtcacgggcaccatccacacctaccctgtgacagaggatgagagtctgcagagcttgaaggccagaatccaacaggacacgggcatcccagaggaggaccaggagctgctgcaggaagcgggcctggcgttgatccccgataagcctgccactcagtgtatttcagacggcaagttaaatgagggccacacattgggacatggatcttgtttttctctttgacaacagtaaa

SEQ ID NO: 184894 - DNA, 1442 bp, Homo Sapiens
actttgtacaaaaaagttgggtcctgattatatttgcaaacttctttataaaaggtgaaaaaagcacacaaaagagagggtgtcttcatattaaaccttcacaaccttcatgatttcataggattattttggaaatatagcacttgactttatgaaaggatctgggctaggtatattaggggtagttgccaataacctgaagaagctggcattgtttacagaaacagatcaagggctataatttatgtcattttatagcagcagtatctattaatacatgccttttcctcccatccacctcccccgcacacacacaaagatgacctgggacatgatttttttattcccacattttcttggagcacaaacaactttgttgaggattttggaaggaaagcacaactgggtcctttattcatttctgggacagaaagagggtcagtggacttttgtgggcctccagcttctctcagagtctccccctctgcagcccatcctgggagtgtattaactggagggaagatgggtcttgcagtacatttgttttgcccagccatcactcttttttgtgaggagcctaaatacattcttcctggggtccagagtccccattcaaggcagtcaagttaagacactaacttggccctttcctgatggaaatatttcctccatagcagaagttgtgttctgacaagactgagagagttacatgttgggaaaaaaaagaagcattaacttagtagaactgaaccaggagcattaagttctgaaattttgaatcatctctgaaatgaagcaggtgtagcctgccctctcatcaatccgtctgggtgccagaactcaaggttcagtggacacatccccctgttagagaccctcatgggctaggacttttcatctaggatagattcaagacctttacctcagaattatgtaaactgtgattgtgttttagaaaaattattatttgctaaaaccatttaagtctttgtatatgtgtaaatgatcacaaaaatgtattttataaaatgttctgtacaataaagttacacctcaaagtgtactcttggaatggattctttcctgtaaagtcttatctgcgactctgtctcgggaatgttttgtctgttgccgtcagccgaactttgttatggagggagcagcctcacacaagcagaaacactcctgtggatggtattgtagcatgtattgtttattttagtcaatagaccctctccttataaatggtgtttagtcttcctgttgcatttcatgggcctgggggtttcctagcagaggataattggagcccctttttgtgacattaccaattacatctttgtccacgtttaatactttgttttggaaaatttaaatgctgcagatttgtgtagagttctaataccaaagacagaagtaaatgttttccatatactttgtct

SEQ ID NO: 184895 - DNA, 2287 bp, Homo Sapiens
ttttggtgttttaccactctgcagagaaagctaaggttgctaaccaaacaaaataactttacactgacaatgccaatttttacatttctttcagaacaagggacactcaaactaccagagaaacggaccaatggactgcgaagaactcctaaacaggtggatccaggtttaccaaagatgcaggtcattaggaactattctggaacaccacccccagctctgcatgaaggaccccctttacagctccaggccggggataccgttgaacttctgaaaggagatgcacacagtctgttttggcagggcagaaatttagcatctggagaggttggattttttccaagtgatgcagtcaagccttgcccatgtgtgcccaaaccagtagattattcttgccaaccctggtatgctggagcaatggaaagattgcaagcagagaccgaacttattaatagggtaaatagtacttaccttgtgaggcacaggaccaaagagtcaggagaatatgcaattagcattaagtacaataatgaagcaaagcacatcaagattttaacaagagatggcttttttcacattgcagaaaatagaaaatttaaaagtttaatggaacttgtggagtactacaagcatcattctctcaaggaagggttcagaaccttagatacaactctgcagtttccatacaaggagccagaacattcagctggacagaggggtaatagagcaggcaacagcttgttaagtccaaaagtgctgggcattgccatcgctcggtatgacttctgtgcaagagatatgagagagttgtccttgttgaaaggagatgtggtgaagatttacacaaagatgagtgcaaatggctggtggagaggagaagtaaatggcagggtgggctggtttccatccacatatgtggaagaggatgaataaattcaaatcccgtgttgcaccctgcaccaaaaatttcagagaagggataaatagaagcctgcacagcatcgtgaattaactgaagtgtttaaaaagctgcatttctggctgttcaacatcctccctccttagcccctcctaagtcttaatgctgagatttctaaagatgctggtactgacagattaatggcttgcctagagctgtgcaagaaacagcctgccagtctgtcattgtcagggaccagggcaaaaccaagagctgttcttcccagaagagccctgcaaacacattggttcgtgcttccctttacttcttctggtcagataccatgaatgccagtcatcagtaaatcttaatacacttttgctttattctcacatgccattcaccagattatttgatggtacaaagaagcagaagtgtaattttccttttcccagcatgacgaaaaattggagttctgccatttgagcagcttactggaaagatccagccttacttgtcttaaattgtccaacaaggtgactcattgcccggcaaacacttttaccctcagatgttactcatgatattataaaatatgaggccagtgctcaggtttgcatcataagtgagctatccctgaagggttttaattacttatttggtgtcctgattatatttgcaaacttctttataaaaggtgaaaaaagcacacaaaagagagggtgtcttcatattaaaccttcacaaccttcatgatttcataggattattttggaaatatagcacttgactttatgaaaggatctgggctaggtatattaggggtagttgccaataacctgaagaagctggcattgtttacagaaacagatcaagggctataatttatgtcattttatagcagcagtatctattaatacatgccttttcctcccatccacctcccccgcacacacacaaagatgacctgggacatgatttttttattcccacattttcttggagcacaaacaactttgttgaggattttggaaggaaagcacaactgggtcctttattcatttctgggacagaaagagggtcagtggacttttgtgggcctccagcttctctcagagtctccccctctgcagcccatcctgggagtgtattaactggagggaagatgggtcttgcagtacatttgttttgcccagccatcactcttttttgtgaggagcctaaatacattcttcctggggtccagagtccccattcaaggcagtcaagttaagacactaacttggccctttcctgatggaaatatttcctccatagcagaaagttgtgttctgacaagactgagagagttacatgttgggaaaaaaa

SEQ ID NO: 184896 - DNA, 1115 bp, Homo Sapiens
  misc_feature (915)..(956): n is a, c, g, or t
ttttcgtcatgctgggaaaaggaaaattacacttctgcttctttgtaccatcaaataatctggtgaatggcatgtgagaataaagcaaaagtgtattaagatttactgatgactggcattcatggtatctgaccagaagaagtaaagggaagcacgaaccaatgtgtttgcagggctcttctgggaagaacagctcttggttttgccctggtccctgacaatgacagactggcaggctgtttcttgcacagctctaggcaagccattaatctgtcagtaccagcatctttagaaatctcagcattaagacttaggaggggctaaggagggaggatgttgaacagccagaaatgcagctttttaaacacttcagttaattcacgatgctgtgcaggcttctatttatcccttctctgaaatttttggtgcagggtgcaacacgggatttgaatttattcatcctcttccacatatgtggatggaaaccagcccaccctgccatttacttctcctctccaccagccatttgcactcatctttgtgtaaatcttcaccacatctcctttcaacaaggacaactctctcatatctcttgcacagaagtcataccgagcgatggcaatgcccagcacttttggacttaacactgtcaagaaatgacaagcaatgacagtaggtttgcagttcgttaacaaccataacaacctaatcagatgaatgttattgatgctatcaaatgcacagtcgtgatttcattacagaccagcgataatggcagaggagcttgaaagcagcagaattgctgtttcaattcaatcaggtgcaagcaaattcgcttcataagtttaaagaaccattgtcctgtttttccattcttcataagaacctcaatcaaagtaaggactagtttttatnnnnnnnnnnnnnnnnnnnnnnnnnnnnnnnnnnnnnnnnnntcgttaatatctaagtatctaaggagatagattctaaaataatttcatcatacacttcctattgatggcccagtaatctaaccagcacctccaaggtaaagctttatgtttttatccagtaactgcgtttaactaacacccaacttttttgtacaaagt

SEQ ID NO: 184897 - DNA, 2140 bp, Homo Sapiens
  misc_feature (1254)..(1319): n is a, c, g, or t
  misc_feature (1590)..(1621): n is a, c, g, or t
ttgggtgagggatgggattgttggaactgcttacttggtgttgtatcttgttgcttttcaattttgttatcttttataatattaaaatgttttggagcagatgattcctcccaggggttgtgcctatattgttatggttcataggcaagatgcctatcgtgccctgcagaaactgagccgaggaaactataaagtgaaccagaaatccataaagattgcctgggccttaaacaaaggaataaaggcagattataagcagtattgggatgtagaacttggtgttacttatattccatgggacaaagtcaagcctgaggaactggagagtttttgtgaaggaggaatgttggacagtgacacacttaacccagattggaaaggaattcctaagaagcctgaaaatgaagttgctcaaaatggaggtgctgaaacctcacacacagaaccagtatcacccatacctaaaccattacctgtgcctgtccctcctattcctgttcctgcacctataacagtgccacctccacaggtcccaccacatcaaccgggtccacctgtagttggtgctctccagccgcctgctttcacgcctcctctgggaataccgcctccaggctttggtcctggtgttcctcctccccctcctcctccaccatttttgcgcccaggattcaacccaatgcatttaccaccaggttttctgcctcctggacccccacctcctataactccaccagtatccattcctcctcctcacactccaccaataagcatcccaaacttggtgtctggggctagaggaaacgccgagtctggtgacagcgtgaaaatgtatggctctgccgtgccacctgctgcacccacgaatctgcccacccctcctgtaacccagcctgtttcacttcttggcactcaaggagttgcccctggtcctgtaattggacttcaggcaccatctactggtcttcttggcgcccggcccggtctcatcccactccagcgccctccaggaatgcccccacctcacttacagcggttccctttgatgccgccccgtcccatgccaccgcacatgatgcacagaggcccaccgccaggaccagggggctttgcgatgcctccacctcatggaatgaaaggtcccttcccaccgcatggcccctttgttaggcctggtggaatgccagggctcgggggcccagggccaggcccagggggtcctgaagacagagacggaaggcaacagccgccgcnnnnnnnnnnnnnnnnnnnnnnnnnnnnnnnnnnnnnnnnnnnnnnnnnnnnnnnnnnnnnnnnnncacccccatcacaacagcctccaccaacacagcagcagccacagcagtttagaaatgataacaggcagcagttcaattcaggtagagaccaagaaaggtttggaagaagatcttttggaaatagggtggaaaatgaccgggaacggtatgggaaccgtaatgatgatagagataatagtaaccgtgacaggagagagtggggaaggaggagccctgaccgggacaggcacagagacttggaagagagaaatagacgctctagtgggcatcnnnnnnnnnnnnnnnnnnnnnnnnnnnnnnnntctcgtagagagaaggaagaagcccgaggaaaggaaaagcctgaggtgacagacagggcaggtggtaacaaaaccgttgaacctcccattagccaagtgggaaatgtagacactgcttcagaacttgagaagggggtgtctgaggctgcagtcctaaagccttctgaagagttacctgctgaggctacctcatccgttgaacccgaaaaggattctggctcagcagcagaggctcctcgttagagactggaatttgtgaaaatgtgacagtgacacttcctggagtgtagagcttgaggtgtacagatgctgtattatatccgctcccgctgtactgcagccccgcgccagctggtggggaactgtaagcaatttgattgcttcccttctatttaaaaatagccaccaaataacaaaaaaatactgaaaatatgaataaatattacccttttttgctgtaactttttaaaagtttttgacttttaaaagtttacaaatcgtatttagaagtgctctcta

SEQ ID NO: 184898 - DNA, 1790 bp, Homo Sapiens
ttggctcaaatcactgactctgagagtgaggaacccccaaggcaccaagccagtgactccgaaaatgaggagcctcccaaacctcgaatgagtgattctgaaagtgaggagcttcctaaacctcaggtcagtgattcagaaagtgaggaacccccaaggcaccaggccagtgactctgaaaatgaggagcttcccaaacctcgtatcagtgactcagaaagtgaggaccctccgaggcaccaggccagtgactcagaaaatgaagagcttcccaaaccccgaatcagtgattcggaaagtgaggatcccccaaggaaccaggccagtgattcggaaaatgaggagctacccaaaccccgagtcagtgactctgagagtgaggggcctcagaaggggcctgccagtgactcagaaactgaggatgcgtccagacacaaacagaagccagagtcagatgatgacagcgacagggagaataagggagaggatacagaaatgcagaatgactccttccattcagacagccatatggacagaaaaaagtttcacagttctgatagtgaggaggaagaacacaaaaagcaaaaaatggacagtgatgaagatgaaaaagagggtgaggaggagaaagtagcgaagagaaaagctgctgtgctttctgatagtgaagatgaagagaaagcatcagcaaagaagagtcgtgttgtctctgatgcagatgactctgacagtgatgctgtatcagacaagtcaggcaaaagagagaagaccatagcatctgacagtgaggaagaagctgggaaagaattgtctgataagaaaaatgaagagaaggatctgtttgggagtgacagtgagtcaggcaatgaagaagaaaatcttattgcagacatatttggagaatctggtgatgaagaggaagaagaatttacaggttttaaccaagaagatctggaagaagaaaaaggtgaaacacaggtaaaagaagcagaagattcagattctgatgataacataaagagaggaaaacatatggactttctgtcagattttgagatgatgttgcagcgaaaaaagagcatgagtggcaagcgcagacggaaccgcgatggtggcacctttattagtgatgcagacgacgtcgtgagtgccatgatcgtcaagatgaatgaagctgctgaggaagacagacagttgaacaatcaaaaaaagccagcactgaaaaaattaactttactgcctgctgtagttatgcaccttaagaagcaggaccttaaagaaacattcattgacagtggtgtgatgtctgccatcaaagaatggctctcacctctaccagataggagtttgcctgcactcaagatccgggaggagctgctgaagatcctgcaagagctgcctagtgtgagccaggagaccctgaagcatagtgggattggacgagcagtgatgtatctctataaacaccccaaggagtcaaggtctaacaaggacatggcagggaaattaatcaatgagtggtctaggcctatatttggtcttacctcaaactacaaaggaatgacaagagaagaaagggagcagagagatctagaacagatgcctcaacgacgaagaatgaacaggtatgagggaacagcactggtggtcagacacccagaagagacctgaaaagtgctgacaggagaggagaatgctcttagacctggagatcctggattctgtgcccgtgcaagggtcccaatgcctttcaacaagactatgttgtcaagcccaaatggaatgtggaa

SEQ ID NO: 184899 - DNA, 1528 bp, Homo Sapiens
ttggcggagcgcgggcctcggcggcgcagggcttgacgcgccggaaagtcccctcgccgctggccaccagccttccagcccttacggcccacgccgtaatcctggtgaccgagaagagagcagagccactgccagaaggaaggggacaagacccagcaggacaccttctttccacgctttccagcctgtgggagcggcaggggcaacagagagaggatctggagccaggattaatgactcatttatgaagcatcttattctgcgaccgaggctcagtggtcagtggcgacgtaaatggctcgactccccgctggcattcgcttcatcatctcattctccagggatcagtggtacagagccttcatttttattttgacatttctgctgtatgcaagttttcacttatctcgaaagcctatcagcatagttaagggtgagctccacaagtactgcactgcttgggatgaagctgacgtcaggttcagcagccagaacaggaagtctgggtccgctgccccccaccagctccctgacaatgagaccgactgtggctgggcaccgtttgataagaacaactatcagcagctgcttggggccctggactactccttcctgtgcgcctatgccgtggggatgtacctcagtggcatcattggggagcgcctgccgattaggtattacctaactttcgggatgctcgccagcggagccttcaccgccctgttcggcttagggtatttctacaacatccacagtttcggattctacgtggtaactcaggtcatcaacgggctggtgcagaccaccggctggcccagcgtcgtcacctgcctcggcaactggtttggaaaaggaaggagaggtttgattatgggggtctggaactcccacacctccgtgggcaacatcttggggtcattgatcgctggctactgggtgtccacatgctggggcctgtccttcttcgtgcctggagccatcgtggcagccatggggatagtgtgctttctcttcctcattgaacatccgaacgacgtcaggtgctcctccaccctggtgacgcactcaaaaggctatgagaatggtacaaacagattgagactccagaagcaaatcttgaagagcgaaaagaacaagcctctggacccagagatgcagtgcctgctgctctcagatgggaagggctccatccacccgaaccacgtcgtcattctccccggggacggtgggagtggcacggccgccatcagcttcacaggggccttgaaaattccaggcgtgatagagttctcactgtgtctgctgtttgccaagctggtcagctatactttcctcttctggctgcccctgtacatcacgaatgtggatcaccttgatgccaaaaaggcgggggagctctccaccctgtttgacgtgggcggaatctttggtgggatcctggcggtgtgatctcagaccgactggagaaaaagcctccacctgcggctgatgctgctgctcgcggccccacgctctacatcttctccac

SEQ ID NO: 184900 - DNA, 1073 bp, Homo Sapiens
tgcccaggcacttgaactgcccctgcaccatgatggccagccgggtgcacagggcctcacactcttccatgctgtgagaggtgatgatgatggccttgccagactctcgggctcgtgccacggtgtcccaaagcaggcgccgggccacggggtccatgccagtggacggctcgtccaggaagatgacagcaggctctccgatcagggcgatgccggtgctcagcttccgcttgttaccaccactgtacgtcctgaccagcttgttggcatgtggctccagcagcaggccccgcagagtgttctccacgcaggccccgatgtggcgctcagggatgccccggagccgagcgtacatgaccagcatctcccggcctgtcatgtggtccagcaaggcatcaaactgcgggcagtagccgatccgctgccgcacctttccgacatcagagctgattctgtgacccccgacaaaggcatccccagaagtgaggctctcctccccggtcagcattttgaaagtcgtggtcttcccggctccattgaagcccagcaggccgaagcactcccctttctgcaccgcgagggagagcctgtccacggccaggaggggcacccgctgctcgtacaccttggagagctccttgataatcagaggtgtgtggagcagggagtccgggctgggggccaggatgcgggtcctctcgtccgctacatcttggtcctcaggaagcacaggcatccgggtgtataattctgtcagtgtccgcctcctccggagggcgcagaggatgcccctgagtctctgaagcaggttggtctcgatgaggaagagcaggatgaggtaggcgcaccctgaggcggccatggaggccacaaaccggccgacccccggggcgctccaggcatagaagttctcctggtactggatgttatatttcttgcagtagtgggcggcgacctcggaggaggtgcagtacctccgcgtctcgtagttctcgtagaaactgctgactgccatccccagacagtggttgggcagcaccaggaacacgtgatccagggttttggaaagccaa

SEQ ID NO: 184901 - DNA, 1139 bp, Homo Sapiens
gcttttttataatgccaactttgtacaaaaaagaagtatttgttttgccattcttactagatcagatcctgtatgactttaaaatacattttaaaatatattttgcatctcagcagaaggttgagtgctgcaggaagagctgcttctgcagggagttttctggaatggcgtggcacatattgaagcatttctcagtgtcccgttcacggaagcgcaggcagctcccacgacacacggagagactgactgatacgagatttggaaagctatgtagacatctttggagctcttactgtcctaaactgtacagctgtgcttaaaaccctcatttcatataaatggccttaagttttctaattcaagcgggtttttggaaaaatttatggtctccattaaaatacatattacaactggggtagattatttgtggtccaggtgtctgtgatttaactttgcgttttgctatctgatttttatttttcacagggctaagcatgagctttcattctcactcactcttaatttgtcgtgcgtcactacacatgcacgtgttgcagtccctgaggccctgtgtgttatctgtgatggagtgtgaatgtgtaacgggcactgtgttacactctcaggtgttggcggggcggtcgcagacttcagggtcccctaacggaaaggccaggctccgcgtggacggccaactccctgcccgctccttcagcaggtgactgtctctgccacttcttacctgctgaaggatcttgctcagtagctggaacaatgctgctgtcacacagtctcttctctgaaacttcaggatgctccttggtcaccaggcaatgggagctgtagaccagccgcatgcacttgccccacattcactgctgactggcttcactggaataggttcaggtcaccgggacttctctcagagtcagcggcccacccaactctctcataccgtcgcatctgaaaatttccagagaggaatttctctttgtagtcggcttgtcagggttttcaagtttttctatgggtatttttaaatctctttttttaaatgctaaaattaatggtcctcattaatgcaagtaattttagagcacagtgtaaccaaggtacagtttcccattatttaaaataaa

SEQ ID NO: 184902 - DNA, 1021 bp, Homo Sapiens
gccattccagaaaactcctgcagaagcagctcttctgcagcactcaacgttctgctgagatgcaaaatatattttaaaatgtattttaaagtcatacaggatctgatctagtaagaatggcaaaacaaatacttcctgggcatttcaaatgaggtcattttggttgaaatgtataccaacaattttcgaagtcagaggaagaaaaaagagaaaaatggcaaacccaatgtttaatacaccaaatacctttagggtacttagagagtgaacagtcttattacgtgttattttcctggacttcttttatgtggcagatatttatgttttcatcatggttgaagaagctgcttggaaacaggtgagctgcaagtgcatgctactcttgaacttgttcaggagctcttccagtaactttttatctgctccactggaaagctggggcagggcttccaaagcctgcttaaaacttgacttgctttcgggtgtcaggtaaacagccacagtgtccctcaaagcacagatttcaagtctcgcctgtaaagctccatttttgctgaaggatgaaacacactgcatcagtcgactgagctcttcagaaactgcttctatcaccttggatagtacccgagggaccagttctttggaaatggtgaacacctctgcatgcacggcaattatattcaccagtgcttcttttaaatagtttctgacacctgttggaggcaggcagtccttccaatcaaaatatcctgcataaattccaggttctaaggagccaacgatgggatctgctttcaactcgatgtaattttcaaagagtctttgatctagttctttcaatgaggccatgctaacaaagaagaaagaactggtccgacgtcagatttctcacatgcagtactgggagctgaaatcactggattaaaatctgtgtgatttttctattccctggaagttgtgcttttcaaaatgttctgcgatatttaggaaggtgtgacgttctagatagcagcaattccaa

SEQ ID NO: 184903 - DNA, 1928 bp, Homo Sapiens
ctttgtacaaaaaagttggatctgtgtgcgctttggtggcgagcacgtgcccaacagccccttccaagtgacggctctggctggggaccagccctcggtgcagccccctctacggtctcagcagctggccccacagtacacctacgcccagggcggccagcagacttgggccccggagaggcccctggtgggtgtcaatgggctggatgtgaccagcctgaggccctttgaccttgtcatccccttcaccatcaagaagggcgagatcacaggggaggttcggatgccctcaggcaaggtggcgcagcccaccatcactgacaacaaagacggcaccgtgaccgtgcggtatgcacccagcgaggctggcctgcacgagatggacatccgctatgacaacatgcacatcccaggaagccccttgcagttctatgtggattacgtcaactgtggccatgtcactgcctatgggcctggcctcacccatggagtagtgaacaagcctgccaccttcaccgtcaacaccaaggatgcaggagaggggggcctgtctctggccattgagggcccgtccaaagcagaaatcagctgcactgacaaccaggatgggacatgcagcgtgtcctacctgcctgtgctgccgggggactacagcattctagtcaagtacaatgaacagcacgtcccaggcagccccttcactgctcgggtcacaggtgacgactccatgcgtatgtcccacctaaaggtcggctctgctgccgacatccccatcaacatctcagagacggatctcagcctgctgacggccactgtggtcccgccctcgggccgggaggagccctgtttgctgaagcggctgcgtaatggccacgtggggatttcattcgtgcccaaggagacgggggagcacctggtgcatgtgaagaaaaatggccagcacgtggccagcagccccatcccggtggtgatcagccagtcggaaattggggatgccagtcgtgttcgggtctctggtcagggccttcacgaaggccacacctttgagcctgcagagtttatcattgatacccgcgatgcaggctatggtgggctcagcctgtccattgagggccccagcaaggtggacatcaacacagaggacctggaggacgggacgtgcagggtcacctactgccccacagagccaggcaactacatcatcaacatcaagtttgccgaccagcacgtgcctggcagccccttctctgtgaaggtgacaggcgagggccgggtgaaagagagcatcacccgcaggcgtcgggctccttcagtggccaacgttggtagtcattgtgacctcagcctgaaaatccctgaaattagcatccaggatatgacagcccaggtgaccagcccatcgggcaagacccatgaggccgagatcgtggaaggggagaaccacacctactgcatccgctttgttcccgctgagatgggcacacacacagtcagcgtgaagtacaagggccagcacgtgcctgggagccccttccagttcaccgtggggcccctaggggaagggggagcccacaaggtccgagctgggggccctggcctggagagagctgaagctggagtgccagccgaattcagtatctggacccgggaagctggtgctggaggcctggccattgctgtcgagggccccagcaaggctgagatctcttttgaggaccgcaaggacggctcctgtggtgtggcttatgtggtccaggagccaggtgactacgaagtctcagtcaagttcaacgaggaacacattcccgacagccccttcgtggtgcctgtggcttctccgtctggcgacgcccgccgcctcactgtttctagcctttcaggagtcaggactaaaggtcaaccagccagcctcttttgcagtcagcctg

SEQ ID NO: 184904 - DNA, 1116 bp, Homo Sapiens
ttggtgcctgccagcctgcccgtggagttcaccatcgatgcaaaggacgccggggagggcctgctggctgtccagatcacggatcccgaaggcaagccgaagaagacacacatccaagacaaccatgacggcacgtatacagtggcctacgtgccagacgtgacaggtcgctacaccatcctcatcaagtacggtggtgacgagatccccttctccccgtaccgcgtgcgtgccgtgcccaccggggacgccagcaagtgcactgtcacagtgtcaatcggaggtcacgggctaggtgctggcatcggccccaccattcagattggggaggagacggtgatcactgtggacactaaggcggcaggcaaaggcaaagtgacgtgcaccgtgtgcacgcctgatggctcagaggtggatgtggacgtggtggagaatgaggacggcactttcgacatcttctacacggccccccagccgggcaaatacgtcatctgtgtgcgctttggtggcgagcacgtgcccaacagccccttccaagtgacggctctggctggggaccagccctcggtgcagccccctctacggtctcagcagctggccccacagtacacctacgcccagggcggccagcagacttgggccccggagaggcccctggtgggtgtcaatgggctggatgtgaccagcctgaggccctttgaccttgtcatccccttcaccatcaagaagggcgagatcacaggggaggttcggatgccctcaggcaaggtggcgcagcccaccatcactgacaacaaagacggcaccgtgaccgtgcggtatgcacccagcgaggctggcctgcacgagatggacatccgctatgacaacatgcacatcccaggaagccccttgcagttctatgtggattacgtcaactgtggccatgtcactgcctatgggcctggcctcacccatggagtagtgaacaagcctgccaccttcaccgtcaacaccaagatgcagagaggggggcctgtctctggccattgagggcccgtccaaagcagaaatcagctgcactgacaaccaggatgggacatgcagcgtgtcctacctgcctggtgctgccggggg

SEQ ID NO: 184905 - DNA, 2068 bp, Homo Sapiens
ttggatcaagtacggcggccagcccgtgcccaacttccccagcaagctgcaggtggaacctgcggtggacacttccggtgtccagtgctatgggcctggtattgagggccagggtgtcttccgtgaggccaccactgagttcagtgtggacgcccgggctctgacacagaccggagggccgcacgtcaaggcccgtgtggccaacccctcaggcaacctgacggagacctacgttcaggaccgtggcgatggcatgtacaaagtggagtacacgccttacgaggagggactgcactccgtggacgtgacctatgacggcagtcccgtgcccagcagccccttccaggtgcccgtgaccgagggctgcgacccctcccgggtgcgtgtccacgggccaggcatccaaagtggcaccaccaacaagcccaacaagttcactgtggagaccaggggagctggcacgggcggcctgggcctggctgtagagggcccctccgaggccaagatgtcctgcatggataacaaggacggcagctgctcggtcgagtacatcccttatgaggctggcacctacagcctcaacgtcacctatggtggccatcaagtgccaggcagtcctttcaaggtccctgtgcatgatgtgacagatgcgtccaaggtcaagtgctctgggcccggcctgagcccaggcatggttcgtgccaacctccctcagtccttccaggtggacacaagcaaggctggtgtggccccattgcacgtcaaagtgcaagggcccaaaggcctggtggagccagtggacgtggtagacaacgctgatggcacccagaccgtcaattatgtgcccagccgagaagggccctacagcatctcagtactgtatggagatgaagaggtaccccggagccccttcaaggtcaaggtgctgcctactcatgatgccagcaaggtgaaggccagtggccccgggctcaacaccactggcgtgcctgccagcctgcccgtggagttcaccatcgatgcaaaggacgccggggagggcctgctggctgtccagatcacggatcccgaaggcaagccgaagaagacacacatccaagacaaccatgacggcacgtatacagtggcctacgtgccagacgtgacaggtcgctacaccatcctcatcaagtacggtggtgacgagatccccttctccccgtaccgcgtgcgtgccgtgcccaccggggacgccagcaagtgcactgtcacaggtgctggcatcggccccaccattcagattggggaggagacggtgatcactgtggacactaaggcggcaggcaaaggcaaagtgacgtgcaccgtgtgcacgcctgatggctcagaggtggatgtggacgtggtggagaatgaggacggcactttcgacatcttctacacggccccccagccgggcaaatacgtcatctgtgtgcgctttggtggcgagcacgtgcccaacagccccttccaagtgacggctctggctggggaccagccctcggtgcagccccctctacggtctcagcagctggccccacagtacacctacgcccagggcggccagcagacttgggccccggagaggcccctggtgggtgtcaatgggctggatgtgaccagcctgaggccctttgaccttgtcatccccttcaccatcaagaagggcgagatcacaggggaggttcggatgccctcaggcaaggtggcgcagcccaccatcactgacaacaaagacggcaccgtgaccgtgcggtatgcacccagcgaggctggcctgcacgagatggacatccgctatgacaacatgcacatcccaggaagccccttgcagttctatgtggattacgtcaactgtggccatgtcactgcctatgggcctggcctcacccatggagtagtgaacaagcctgccaccttcaccgtcaacaccaaggatgcaggagaggggggcctgtctctggccattgagggcccgtccaaagcagaaatcagctgcactgacaaccaggatgggacatgcagcgtgtcctacctgcctgtgctg

SEQ ID NO: 184906 - DNA, 2822 bp, Homo Sapiens
ttggagaaaataccggagttgcagggtataggtaaatttctcaaggttataggttggggttcttagaactttttgtggtgtgtgttggcctagagcgactcagaagcgttagtgacttcacctaaaaaagctaacctctctgctgagcgcgaccggtatgcggcgcaggatgagcctcagggcttctgttaagagtctgtctgagaaagccggtctgcgctgttcctcggtggcgaccttaattatgagatgagctaatgctttactgacttaaccatggcgcagcgggcagtgtggctcataagccacgaaccgggaactccactttgtggcaccgtgagattctccagacggtatccaactgttgaaaaacgagccagagtcttcaatggagcaagttatgtgcctgttcctgaagatggtccctttcttaaagcactgctctttgaacttagattattggatgatgataaagacttcgttgagagtcgtgatagctgttcacgcatcaataaaacatccatttatggactcctgataggaggtgaagaactctggccagttgttgcttttctgaagaatgacatgatatatgcttgtgttccactagttgaacaaactctgtcccctcgtccgccactaattagtgtcagtggagtttcacaaggctttgaatttctttttgggatacaggattttctttattcaggtcaaaaaaatgactctgagctgaatacaaaattgagccagttgcctgacttgcttctgcaggcttgtccatttggtactttattagatgccaacttacagaattcattagataataccaattttgcatctgtgactcagccacagaaacagccagcttggaaaactgggacgtacaaaggaaaaccacaagtttctatttctatcactgaaaagtgtgatttggaaggaatcatgccaaatgttaccatcagcttgagtctccccaccaatggatctccacttcaggatattctagttcacccttgtgtaacttctcttgactctgcaattctgacttctagtagtattgatgcaatggatgactctgcatttagtgggccttacaaatttccattcactccacctttagagtcattcaacttatgcttctacacttcccaggtccctgtcccaccaattttgggtttttatcaaatgaaggaggaagaagtacaactaagaataaccattaatttaaaacttcatgaaagtgtgaaaaataattttgaattctgtgaagcccatatacctttttacaatagaggtccaattacacatttggaatacaaaactagttttggccagcttgaagtatttcgagagaaaagcttattgatctggattattggccagaagttcccaaaatcaatggaaattagtctttctggaactgtaacttttggagccaagagccatgagaagcagccatttgacccaatttgtactggagaaacagcatatttaaagcttcattttaggatcttagattacacacttactggatgttatgcagatcagcattcagttcaagtttttgcatcaggaaaaccaaaaataagtgcacaccggaaactaatttcttctgattattacatctggaattctaaagcccctgctccagtaacatatggatcattattattgtaataatctcatgtttaaatgggattatataatgataacagtttaaagaaaatcataatcttatatttttaatgtggatgcatataacctgtgagtgaaaaatcactgaatgatttaattgtaaaagtagtcttatgtggtgtttgtagtctgatagagcttgaaaggacattttaaaagctaatgtctccaattttgttaaccttcgattttatgccagtataattcagaacatagaaaagtaatgattcacttgggctcattttagactggtcctgggtcaccctgccacacttgtttcctagtgtttctgtggcagacattgctaatcaattacagcccttttctgtactgagccttggataaagggtcaggctcctttttagttcagagattcaggcagccactcccagtgggttgtagataatgtgcaagataaaaactattttctcttccaaatctaagtactaagctcctagtataaggtgttgttacagaataccagagaccatgttagagacaactacatctcttcaaaaaacagccaacagagacaaaggaaaagtgtttaaatagtaagctgttcttcttaatcagaactatcctattgactaataaataatctgcataattctacttaaggtgtgtaatctctgttctagagttagtttttaagtaagcttgttaatctgccactttgacattttgcttaggatgtcagtagccatattaagatgtgtagaataccttcagaagatgatcatagtgttttgtaatcatttaatgtctgcagccaaatttttaaaggtaatttagacctaatactgctcttgctgtgtcttattaagttaaaattaatgaatgaattctggtaaaaattcaaaaggcactctgtgagtagagagtatcatttaagcttattttagtcacatgtagtatatatctccttaaagctgtcactctcacttttcttaccattctcttgatttcttcagaaaccatctagtcatcatctttatactctacctgcttctgcaattatatatcatattatgttttcatagcagttcattgtcaagttggactttaagtgaccattcaagaaaagatgaaatctcacgaaccctcaaaacttcattctagtcttt

SEQ ID NO: 184907 - DNA, 1944 bp, Homo Sapiens
  misc_feature (1297)..(1309): n is a, c, g, or t
  misc_feature (1620)..(1659): n is a, c, g, or t
aatagccaactttgtacaaaaaagttggaatcaaccagacgtttagcgggatcatgactatgttgaatatgcagtttgttgtacgagtgaggagatgggacaactctgtgaagaaatcttcaagggttatggacctcaaaggccaaatgatctacattgttgaatccagtgcaatcttgtttttggggtcaccctgtgtggacagattagaagattttacaggacgagggctctacctctcagacatcccaattcacaatgcactgagggatgtggtcttaataggggaacaagcccgagctcaagatggcctgaagaagaggctggggaagctgaaggctacccttgagcaagcccaccaagccctggaggaggagaagaaaaagacagtagaccttctgtgctccatatttccctgtgaggttgctcagcagctgtggcaagggcaagttgtgcaagccaagaagttcagtaatgtcaccatgctcttctcagacatcgttgggttcactgccatctgctcccagtgctcaccgctgcaggtcatcaccatgctcaatgcactgtacactcgcttcgaccagcagtgtggagagctggatgtctacaaggtggagaccattggcgatgcctattgtgtagctgggggattacacaaagagagtgatactcatgctgttcagatagcgctgatggccctgaagatgatggagctctctgatgaagttatgtctccccatggagaacctatcaagatgcgaattggactgcactctggatcagtttttgctggcgtcgttggagttaaaatgccccgttactgtctttttggaaacaatgtcactctggctaacaaatttgagtcctgcagtgtaccacgaaaaatcaatgtcagcccaacaacttacagattactcaaagactgtcctggtttcgtgtttacccctcgatcaagggaggaacttccaccaaacttccctagtgaaatccccggaatctgccattttctggatgcttaccaacaaggaacaaactcaaaaccatgcttccaaaagaaagatgtggaagatggcaatgccaattttttaggcaaagcatcaggaatagattagcaacctatatacctatttataagtctttggggtttgactcattgaagatgtgtagagcctctgaaagcactttagggattgtagatggctaacaagcagtattaaaatttcaggagccaagtcacaatctttctcctgtttaacatgacaaaatgtactcacttcagtacttcagctcttcaagnnnnnnnnnnnnnccttaaaaagctacttttgtgggagtatttctattatataaccagcacttactacctgtactcaaaattcagcaccttgtacatatatcagataattgtagtcaattgtacaaactgatggagtcacctgcaatctcatatcctggtggaatgccatggttattaaagtgtgtttgtgatagtgtcgtcaaaaaaaaggtttttgaatagaaattacattctttgacaccctcagttctttcaaactttcaactctgcattttattgcattttctcatttaactgttagtatatgtttgaatataggctgnnnnnnnnnnnnnnnnnnnnnnnnnnnnnnnnnnnnnnnnagaaaataagcaattaggggttagatgcaatatgaatataaaatagttctgtaaataccaaatattatttttagttctggaagttaaaaatactctccatagtaatgtgtgttataataataaatatttcttttgtttgacttttttaaaattctacaatggtaaaagctattttaatccatgttagcaatttaattcctattaattcattttactatcataatagcaaagtattcagataaaagagtttatatcttctattaaatgcagtatactattcaaatc

SEQ ID NO: 184908 - DNA, 954 bp, Homo Sapiens
gtggtacactgcaggactcaaatttgttagccagagtgacattgtttccaaaaagacagtaacggggcattttaactccaacgacgccagcaaaaactgatccagagtgcagtccaattcgcatcttgataggttctccatggggagacataacttcatcagagagctccatcatcttcagggccatcagcgctatctgaacagcatgagtatcactctctttgtgtaatcccccagctacacaataggcatcgccaatggtctccaccttgtagacatccagctctccacactgctggtcgaagcgagtgtacagtgcattgagcatggtgatgacctgcagcggtgagcactgggagcagatggcagtgaacccaacgatgtctgagaagagcatggtgacattactgaacttcttggcttgcacaacttgcccttgccacagctgctgagcaacctcacagggaaatatggagcacagaaggtctactgtctttttcttctcctcctccagggcttggtgggcttgctcaagggtagccttcagcttccccagcctcttcttcaggccatcttgagctcgggcttgttcccctattaagaccacatccctcagtgcattgtgaattgggatgtctgagaggtagagccctcgtcctgtaaaatcttctaatctgtccacacagggtgaccccaaaaacaagattgcactggattcaacaatgtagatcatttggcctttgaggtccataacccttgaagatttcttcacagagttgtcccatctcctcactcgtacaacaaactgcatattcaacatagtcatgatcccgctaaacgtctggttgatttttggagtcagaatttcaaagtattcttcaaaattaggctttccttgaaagtctctcctgttcatcagccttctgatccattgccaaattgcagaattgccaa

SEQ ID NO: 184909 - DNA, 985 bp, Homo Sapiens
cagcagctgccccaggggatgccagggatctcggtcacattgttgagcatgaagtaggggtcacaggagtcggtcgtaaggttggggctgtggcagaagaaactccatagctgggtggccactgtctcattgtccactacagctgtcttggcacagatgtcaaactggtcccgggacagggtcctgttgcccagcatgcataccggaaacacgggagggtcaaatatagactttatgcccccagcatagatggagaggatggagatgatcacacaggccaggaagagcgaggcaaatttgttcacatacttgacccccacaaacaccaccagggtcatgaaggtcaggaaaatggtcccatacacacgcatattgttcaaagtggcattcgacgtgtcatgagcacccgatgggtaaaaaatggcagctggtggggcaatgtaggtcagcaagatctcgatggcccccaggatgtacatggctgctgcgaatgttgttcccaggtagaagcacaggcccacagcacctccaaattctggccccagtgaacgagagatcatgaaataggagcccccagctggaaccacaccgttggtggcgatggcactcatggagatggccgtcagcagggtacaacagcagcagataagcacgatgaggagggcctgtagcacacctgctgtgcccaccatccaggtcagccgcaggaagaggataaccccaaagatattctgcaggcagggcaggtacacccccatgagggtgcccatgctgggtgcctcggctgccctccggcgggtgccctccccactctcggcctcctcatgctctttggcgccctgggtgaggttggtgtagctgacgagctttcccagaagagacgatacctttgggcggatgtccagctcttcctcaaacagtgccaggttcctgtcatagtagtcaattcctctggaagcctccaagggggaaagaaaagggccaa

SEQ ID NO: 184910 - DNA, 1557 bp, Homo Sapiens
tgtacaaagaagacagccatcatttgaaaggtaaagcttcagcgactgaaggagtgtggactttttgaatttcaagaacagtaaagttggaacacagcagagggtgtgtaataaaatacagattggaaagaagactgatgaagaaaaataacagcatgattcaggcacaccattgagttctttgggatgcccgaaagtgtctggttgggaaacatgaaatagaagacgagaacctgcctcagcaagcgtacctgagaatacttttaaaggaacctgttgataaatgcaaaacagtggctgttgcaggtgatggaactgtactggaacaatgggagaagctggtagcttataggaagccaagatgaccagaatgtttttaaataatccaaggaagaatcctgctcaaaaatgaggtgaattaatacttgggcgctcaggaaccctggacagctacatgaggtgtttaaaaactgccctgaccatcttgccaaacaagtctctgctcatgaggccccacaggatgaacgagccgaggcaggacagtgtcctgccctgtcggaacagtgactgctgacctgccaagagagagctggggactgcctgctgtctgccagtacaatgaaggaagtggtttattggtcacccaagaaggtggcagactggctgctggagaatgctatgccagaatactgtgagcctctggagcatttcacaggccaggacttgatcaacctaacccaagaggatttcaaaaaaccccccttgtgccgagtctcctctgacaacgggcagcggctcctggacatgatagaaaccctgaaaatggagcaccatttggaagcacacaagaacggccatgccaatgggcacctcaacattggcgtagacatccccacccccgacggcagcttcagcatcaagattaaacccaacgggatgccaaatgggtataggaaagagatgataaagatccccatgccagaactggagcgctctcagtaccccatggagtggggcaagacttttctggcctttctttatgcactttcctgtttcgttctcaccacagtgatgatctcggtcgtccacgaacgagtacctcctaaggaggtgcagcctccactaccggacacattttttgaccattttaaccgggtgcagtgggccttttctatttgtgaaattaatggcatgatccttgtaggactctggttaattcagtggctgctcttaaaatacaagtctattattagcagaagatttttctgcatagttggcacgctgtacctgtatcggtgtattacaatgtatgtaactacactcccagtacctggtatgcatttcaactgttctccgaagcttttcggagactgggaagcccaactgcgaagaataatgaagctcattgctggaggtggcttgtctatcactggctctcacaacatgtgtggggactatctgtacagcggccacacggtcatgctaacacttacctacttatttatcaaagagtattcccctcggcgactctggtggtatcactgggatttgctggct

SEQ ID NO: 184911 - DNA, 1730 bp, Homo Sapiens
  misc_feature (1489)..(1523): n is a, c, g, or t
ttggcagaagttgaatcaattgaactagggcactaaactgaatagttgacagtgtcattttatgttggattattaattcctgtttttctttctgctatctgttggtgcctgacttgatggcctcatttggggaaaagtggtggttattagggctttttctgaaatgtgtatctatgtaacatcacttaagtgtgcttaataaatcttctgtaaggattttagatgataaggctacaattcagaatcttctgaaccatctatgtaatgaatggggattatacattggaatttttgtcatgacacatttgccaaatcagtaggatatatttgttttggcagcctatcacgcagaggctagtggtatatttatgtaagaaaatgactgtaaatctcaagaaaaatctcagcagctaatagcaactcatttatttcattttggtcttaatgctttgtaaacaggtcaaaaaatactgtcatactctaagcttctattttccacactggacatacttctagttgtattctccatactattagactgtgtagtgatgtgacttccaagtagaatttaatctccccattgagtgtgtcatggtacaaatcactattcgtttttggtgttttttagggatgtgcaatgtgcattacataatgacagaaatactgagaaggttctgtgtgcccatttgaaaggagtgggaggaatacagcagtttgtttttcaacatgaatctgatattgatttaaactgtgtttcacttacaagttttaaaaaaatgacagggtttaatggagcgtgcataaaaatgtactgttttcaccttttgtttatatgtaaatgtttgtaagtatatgggcctatctgtaagtgggtaagtctgtatgtgtgtatcatacacatcaacctccatgtccttagtcctgggtttttgaaaaagtgctaaaacggacaagtagaataaatgttgctgtggaatgccatgctttagaacaaaccctttttgatcttaatgcttctgaaaactaggtctgactctggggatttttttccagccgaaggaaaatcacttccgttatgtccccctctaatttagccgctcgacattttacacaacccggatatgttgtatattttgacccaaagttacaggtaggtttaagagaatttttagccatgacttttggagcactattccattgtcagttattaataaagaattccattgcttagctaaccaacaggttttttttgtttccaagagagttatttgaaaagttaacagaacaatgagataacagtgacagtttaacaaagataaaattctgaactgcgttttattcatttgtgtactatgtgattttttaaatgtcccctttagtatttaatggaaaattggttcctgcaaaagacaaagggtgagagttagcgtcctgtagatacacacagagactaggccgtatattaactagaagcagctttatgtctagnnnnnnnnnnnnnnnnnnnnnnnnnnnnnnnnnnnagattcctgagagatgtctctggaagggaaagttttgagaactaatggctatttttgaggacaaaaattacatcttaagctaattccttaaatacatacagtaggtgaattttcaggacaatattgcctcacaaccctgcttacattgaaaagtctttttcccttagctcttctgactggatttttctacaaaaactatggaaaata

SEQ ID NO: 184912 - DNA, 2047 bp, Homo Sapiens
ttggcccttcttgacttgtggaaatcattcaccaagtacgatgggatgggattccaagtaaacagtggaccgtcatattgcaaagcaggcccacgcctgggctggccttggttgaggggatggaggaatgttttcgggggtgctttgcagggcagtggtgcagccgcagcgtgaacgctcttggacagctgaaaaccatggcctccttgttctctgccaggatgcaggggcactgttgcctctgacacagcagtttctgggaactcagaggactgcctttctgaaggctggggagaggctttgagcaaggagcttgtttttgcttaatcgctctagaccatccctgatgcgtagatgtgagaggatgttttctggcacagtgttatgaaaatacaagataaatgatctcagtggaatgtttcatattacccgaaaaaaactggaaatcatcctttgttgtgaacacactgagactaagaattgaagcaatgcagttttaagaagtatttttcctattttttgctgtcaactttttggcaatgccacggcaaagttggtgtttcagcacatgctagagtgagctccggcttcgtgtctttaaccaactccactaatgtttcactgggtagacggagctggcctctatatttagccagaagcctttgcctcttttcaggcatcaaaaatgggttttgtcattgtctttgtctttgagagcagcagtttgaggtctgactccttcagttgtcctgtgagctgggcgttgcagtctgctcgaatcaagtgttggaaaccccccacctcagcccatcgtgaaacgacagctgtcagcctggggggtggctgctgaggaggtgcagcaggaatggggctgggccctgaggttttactttccgagccaatggcccctggaacatgccagcacacactgccatgtcctggggctaagagctgcctttagggacaggctcgtgttgtccagtttgccctgagagatgcacctgaccaggggcccgtcgtggctgcaacccacggtggtatgttagtgtttccaggcagttgtcagcagctgccgggtagtgtgtgtgtgcgacagcaggagagttcctggaggaaagggactggggacactttctcagaggttctcctgcctggaatcaagtgatgcgtgtccagaaggcaagagagggcggctccgcctggttaaagtttgggaacgggacggagccaactcctccttccaggactgtgggccccactcttttgcgctaacacttcccctccctcgggtcactgaggaaagagctgctctgtcccctccagtgccctgaaggtccctggcctccactggctgccatggcagggggcccttctgacaggggctgccccaagctgctgttcctcctctgaaccttcaccccaacacccagcccgtggcccctgcaagggggaccctgccagctgggaaacccaaaggcctgtccaaacgtgcgcaccaggaccgaggggagctccctcccaacacctgctaggaattgccaacttttaaatggatggggttttttatgggttgaacctctgttaatacttttgtacactctcactacagtttatatttttataggctattttctcaaggtgtttctagattccacatatctattttatataacaagttattatgttatgtgtgtgactcccttgtgtgtatctgtgccagcctcagcctccgagttgcttttccctctggccctgactctcactgactcaccgatgtgatgtgcaggcccacttcttaccccagatagcctcgggcgctgcctgtagtcatgctgacagctgtacagtaaccgccaagactgctgacagctggagacggttctggtttcaactacggtatactgatatcggaagtattcttagacagatcctcggttgggttttctagctacatgttttgtattgcgcagatccccacctgccaatcctataatgttgtccttcctgtgtgttccggggcttctgggcagctggggcctgcccgggg

SEQ ID NO: 184913 - DNA, 1720 bp, Homo Sapiens
ttccctgatcaaatggcccaactaacttttaaatacaaaatttaacttagaagaacttttctatttttggtgaacatgctgattgaaagaaaaatcaatcattctgttaaatgaagtacagtattctgcaggggaagcaccagggttttctggatcaaacccttaggacatgaagaaaaccaaagtactctgctggttcaaaatctgtatcacaggaatccctggctcccttccatgtgtccagagatgctctcagctcacaaaaccaacagatggaaggaaaagcaagtgaacatgtgaccatgtgggaggggggctggggacggtaaaacactgctcagactttcagcagcaacacaatcctgttggtctgaatatcctgaggttaaatgataataaaatattgcaccaacacaataaagaaaatcacagtttaaacagaattactgaagaactggaataatgtacaatgcagtgactgccatcagtagacctaggtctcttgacaggaattaaagttgtgtcttttctaaaaatggcactcctaccttcttttggtttggtgtttattttgacattctcttaggtatacatatatttacttccatttaacgctaacttactgaattttccccttggcccagtttcatatttagtgatagatgagactgtggctgtaaacagcagcaactcccaagaagagtactcagggcgagagatttaaaaacatatctgataaccccattagaggtaggttagaaaaaggccttttatttgggactgtgtagttatcaaggcatcctgcagatgcaaccttttctctcccttctttctctgacatgctcctaggtaaataagatatgaggaaaatcaaacgtatatcctgttaaagcacttaaagggggtaaaaagtacagccccaacaaaacgtgttttcacattgaaattcatctttcctctttgaaccgacaagcttttcaagaaaccctttcttggtttcataatactgtactgccgatttataaactatattttagtctacccttgaaagaatgaaaactgtagtacttcattaggacctcatatgaccatgatctcaagaaaagatgctttttcaatgtctttaggcctgaatatggtaggaaatcatgaagcacccaaagactcaggatctcacttcgtatttggagtgggccattctcctatgcacacacacccttgttttgttgccctctccaaaatcaagtcttcaccccttcagttcatatcgccttcgttccactcttcaaaacaccatgggaaactcccacagtgtttccactgtttacagattcctttctctcacgtcagcgcaggcaccctttcacttactctgtaaccatcaggacttccattacattctgtgactttgcacatcttcatcccagtttttaacagggatatatatacgaccatcatataaacttgtgcggcaatcctgccggcccaccagaactttctcacattctttaatttctattgccttcagtcttgacgttcatttatgttttcaagtgaatctttcctgtctctctcccaaaaaggcagaaggaaaagaaccaacattctaatttgatgatgaacacagtgatttctgaaatacgttcagagaatgaaggaaacaggctggctctcttctacgtcgctaggatgtgggtcaacctctgaataaagaggccaa

SEQ ID NO: 184914 - DNA, 949 bp, Homo Sapiens
  misc_feature (849)..(869): n is a, c, g, or t
ttggcaatgacttggatcaaacagcctaaatgggaagaaggacatttttgctgcatcaaggaagccgttaaactcctgctaagctaactagctcttttttatgggtccatgcacacgaccgaactcctctttcactgaccagagattatttctgacaacccaggatatcccgaaagcttggaggcatatggctggaaaatgaaacgacccaggacatcgtttctggctgcatcattattttgtgtcgcgtagtaccagatgggcagtcagtgagcggcgcagggatgtgaacggacggttttataatgtgaaaattttcccttggtaaagctaaaacagatttaatttccctctcttttctttcactacttccccctctttattccccctctgtctgcaatatcagtgaactcaactttgcagtgaggtggccaaaaagagagagaatgaggagatcttgatcatcttagtgtcagaggagtcgcagcggactgggaactgcagctgcgaccccccgcgtcctgtgcggatttcagggctgataccgcataggcggttatggaaaggacggtacaccggagcggcggaggatagagaccctggcccccggagaggtctgctgatttcgcagcagccttcgaagccgtggctgcctttcatctgctgcgttttattactattatcgccgttccggaaaagtcatggaagacagcccgctgccagacctcagagacatcgagctgaagctggggcgcaaagtacccgagagtctagtgcgctctctccgtggggaggagccggttcccagggaaagggacagggacccctgcggggggagcggtggtggtnnnnnnnnnnnnnnnnnnnnntgcagctgcagtagcggcagcagctactgcagcttccctccctccttgtcgtcctcctcttcgtctccccaaacctctgg

SEQ ID NO: 184915 - DNA, 954 bp, Homo Sapiens
  misc_feature (104)..(127): n is a, c, g, or t
cgctagagtggctacctcgtggggagccagaggttggggaggacgaagaggaggacgacaaggagggagggaagctgcagtagctgctgccgctactgcagctnnnnnnnnnnnnnnnnnnnnnnnnaccaccaccgctccccccgcaggggtccctgtccctttccctgggaaccggctcctccccacggagagagcgcactagactctcgggtactttgcgccccagcttcagctcgatgtctctgaggtctggcagcgggctgtcttccatgacttttccggaacggcgataatagtaataaaacgcagcagatgaaaggcagccacggcttcgaaggctgctgcgaaatcagcagacctctccgggggccagggtctctatcctccgccgctccggtgtaccgtcctttccataaccgcctatgcggtatcagccctgaaatccgcacaggacgcggggggtcgcagctgcagttcccagtccgctgcgactcctctgacactaagatgatcaagatctcctcattctctctctttttggccacctcactgcaaagttgagttcactgatattgcagacagagggggaataaagagggggaagtagtgaaagaaaagagagggaaattaaatctgttttagctttaccaagggaaaattttcacattataaaaccgtccgttcacatccctgcgccgctcactgactgcccatctggtactacgcgacacaaaataatgatgcagccagaaacgatgtcctgggtcgtttcattttccagccatatgcctccaagctttcgggatatcctgggttgtcagaaataatctctggtcagtgaaagaggagttcggtcgtgtgcatggacccataaaaaagagctagttagcttagcaggagtttaacggcttccttgatgcagcaaaaatgtcccaacttttttgtacaaag

SEQ ID NO: 184916 - DNA, 2247 bp, Homo Sapiens
  misc_feature (1701)..(1725): n is a, c, g, or t
ttggggaaaagctcggacctaccctgtggtcccgggtttctgcagagtctacttcagaagcggaggcactgggagtccggtttgggattgccaggctgtggttgtgagtctgagcttgtgagcggctgtggcgccccaactcttcgccagcatatcatcccggcaggcgataaactacattcagttgagtctgcaagactgggaggaactggggtgataagaaatctattcactgtcaaggtttattgaagtcaaaatgtccaaaaaaatcagtggcggttctgtggtagagatgcaaggagatgaaatgacacgaatcatttgggaattgattaaagagaaactcatttttccctacgtggaattggatctacatagctatgatttaggcatagagaatcgtgatgccaccaacgaccaagtcaccaaggatgctgcagaagctataaagaagcataatgttggcgtcaaatgtgccactatcactcctgatgagaagagggttgaggagttcaagttgaaacaaatgtggaaatcaccaaatggcaccatacgaaatattctgggtggcacggtcttcagagaagccattatctgcaaaaatatcccccggcttgtgagtggatgggtaaaacctatcatcataggtcgtcatgcttatggggatcaatacagagcaactgattttgttgttcctgggcctggaaaagtagagataacctacacaccaagtgacggaacccaaaaggtgacatacctggtacataactttgaagaaggtggtggtgttgccatggggatgtataatcaagataagtcaattgaagattttgcacacagttccttccaaatggctctgtctaagggttggcctttgtatctgagcaccaaaaacactattctgaagaaatatgatgggcgttttaaagacatctttcaggagatatatgacaagcagtacaagtcccagtttgaagctcaaaagatctggtatgagcataggctcatcgacgacatggtggcccaagctatgaaatcagagggaggcttcatctgggcctgtaaaaactatgatggtgacgtgcagtcggactctgtggcccaagggtatggctctctcggcatgatgaccagcgtgctggtttgtccagatggcaagacagtagaagcagaggctgcccacgggactgtaacccgtcactaccgcatgtaccagaaaggacaggagacgtccaccaatcccattgcttccatttttgcctggaccagagggttagcccacagagcaaagcttgataacaataaagagcttgccttctttgcaaatgctttggaagaagtctctattgagacaattgaggctggcttcatgaccaaggacttggctgcttgcattaaaggtttacccaatgtgcaacgttctgactacttgaatacatttgagttcatggataaacttggagaaaacttgaagatcaaactagctcaggccaaactttaagttcatacctgagctaagaaggataattgtcttttggtaactaggtctacaggtttacatttttctgtgttacactcaaggataaaggcaaaatcaattttgtaatttgtttagaagccagagtttatcttttctataagtttacagcctttttcttatatatacagttattgccacctttgtgaacatggcaagggacnnnnnnnnnnnnnnnnnnnnnnnnnctagtaccagcctaggaattcggttagtactcatttgtattcactgtcactttttctcatgttctaattataaatgaccaaaatcaagattgctcaaaagggtaaatgatagccacagtattgctccctaaaatatgcataaagtagaaattcactgccttcccctcctgtccatgaccttgggcacagggaagttctggtgtcatagatatcccgttttgtgaggtagagctgtgcattaaacttgcacatgactggaacgaagtatgagtgcaactcaaatgtgttgaagatactgcagtcatttttgtaaagaccttgctgaatgtttccaatagactaaatactgtttacgccgcagagagtttggaatccggaataaatactacctggaggtttgtcctctccatttttctctttctctcctggcctggcctgaatattatactactctaaatagcatatttcatccagtgcaatatgtaagctgatcttttttggacttctgctggcctgtttatt

SEQ ID NO: 184917 - DNA, 1481 bp, Homo Sapiens
  misc_feature (870)..(894): n is a, c, g, or t
aactttgtacaaaaaagttgggctctgtctaagcggttggcctttgtatctgagcaccaaaaacactattctgaagaaatatgatgggcgttttaaagacatctttcaggagatatatgacaagcagtacaagtcccagtttgaagctcaaaagatctggtatgagcataggctcatcgacgacatggtggcccaagctatgaaatcagagggaggcttcatctgggcctgtaaaaactatgatggtgacgtgcagtcggactctgtggcccaagggtatggctctctcggcatgatgaccagcgtgctggtttgtccagatggcaagacagtagaagcagaggctgcccacgggactgtaacccgtcactaccgcatgtaccagaaaggacaggagacgtccaccaatcccattgcttccatttttgcctggaccagagggttagcccacagagcaaagcttgataacaataaagagcttgccttctttgcaaatgctttggaagaagtctctattgagacaattgaggctggcttcatgaccaaggacttggctgcttgcattaaaggtttacccaatgtgcaacgttctgactacttgaatacatttgagttcatggataaacttggagaaaacttgaagatcaaactagctcaggccaaactttaagttcatacctgagctaagaaggataattgtcttttggtaactaggtctacaggtttacatttttctgtgttacactcaaggataaaggcaaaatcaattttgtaatttgtttagaagccagagtttatcttttctataagtttacagcctttttcttatatatacagttattgccacctttgtgaacatggcaagggacnnnnnnnnnnnnnnnnnnnnnnnnnctagtaccagcctaggaattcggttagtactcatttgtattcactgtcactttttctcatgttctaattataaatgaccaaaatcaagattgctcaaaagggtaaatgatagccacagtattgctccctaaaatatgcataaagtagaaattcactgccttcccctcctgtccatgaccttgggcacagggaagttctggtgtcatagatatcccgttttgtgaggtagagctgtgcattaaacttgcacatgactggaacgaagtatgagtgcaactcaaatgtgttgaagatactgcagtcatttttgtaaagaccttgctgaatgtttccaatagactaaatactgtttaggccgcaggagagtttggaatccggaataaatactacctggaggtttgtcctctccatttttctctttctcctcctggcctgggctgaatattatactactctaaatagcatatttcatccaagtgccataatgtaagctgaatctttttttggacttctgctggcctgttttatttcttttatataaatgtgatttctcagaaaattgatattaaacactatcttatcttctc

SEQ ID NO: 184918 - DNA, 1272 bp, Homo Sapiens
ccagtgctcatgacggtgccgcagcatctgcagctcatactcgcagtggcacagggcctgcttgagctcgtagagcagcaccaggtcgcttcgcagctcatgaacatgtgcaccagctcctccgtaggtgtcgggctcagctccacaccaagctccagcagcatctgttccagggccttgatcttcttctgtcccacagagcttggcagcttcatccgttggctccgcagcgtgacacctgcagacttgaagtctggaaacttgatgcctgcagtctcaggaacagccggcttctcagcctcctttttctggggtagcttctttttgggggccttgcgttccgtgcgccgctgctctgcagtggtgtctgccgctgtgatcagcttctgcaggtcctggctgcgtttctcccgctccttcttccgggcctcaatcttgcgcagctcctgtagcaggtactcctcctctgccacctgctctggggtccggttgtagagacgctcaagctgttccttccgccgtcgttcgtgcccagcatcaaatactggtatcttaaggtctgtgcctggcacagcccgcacgttggcaagcttagcacagatgtggtagtaccgctccttcaggtcttccacagaacgcttcttgaactgctggtggtcataccggtcatggataacaacaaaacgcaggtcaaagcggcggctgaggtcaaagaggtggtcagtttctgccttagtccaagcatcatcgtggagataaagctggtactcctgctccgagtacacaggcacctgcacagtcttattgaacctggcaaaggggtagtccttgccctcctccgctgcacgtcgccagtggaagaacattgctccgtccttgcgggccgggttggtgaatggcatccacttccaaggccgcaccttcttggagcccaacttggccttcactgtacggtatccctggccagtgtcactgggtagcagtgggggtgcatccttcttgtcagagtagagcaaggcatagacttcccggtgcatgccctcgggcctcttgaaagtcagtgtctcagaggacttcttggattttttcttgtccgggttgataatgtccttcttgctgatggtcccagaggctgcatccccttctggacccccgagttctagaatgtcccgtacatccgcgcccgtagccatcgcgcctgagagatgggggagccaccggaggtcaagggtcagtgcctgggtccggcagctgcagcccccactaccccaa

SEQ ID NO: 184919 - DNA, 1174 bp, Homo Sapiens
ttggcttttcagacaccccatcatcctcgcgcgtcctcaccctgtctctaccagggaggtgcctagcttggtgaggttactcctgctcctccaacctttttttgccaaggtttgtacacgactcccatctaggctgaaaacctagaagtggaccttgtgtgtgtgcatggtgtcagcccaaagccaggctgagacagtcctcatatcctcttgagccaaactgtttgggtctcgttgcttcatggtatggtctggatttgtgggaatggctttgcgtgagaaaggggaggagagtggttgctgccctcagccggcttgaggacagagcctgtccctctcatgacaactcagtgttgaagcccagtgtcctcagcttcatgtccagtggatggcagaagttcatggggtagtggcctctcaaaggctgggcgcatcccaagacagccagcaggttgtctctggaaacgaccagagttaagctctcggcttctctgctgagggtgcaccctttcctctagatggtagttgtcacgttatctttgaaaactcttggactgctcctgaggaggccctcttttccagtaggaagttagatgggggttctcagaagtggctgattggaaggggacaagcttcgtttcaggggtctgccgttccatcctggttcagagaaggccgagcgtggctttctctagccttgtcactgtctccctgcctgtcaatcaccacctttcctccagaggaggaaaattatctcccctgcaaagcccggttctacacagatttcacaaattgtgctaagaaccgtccgtgttctcagaaagcccagtgtttttgcaagaatgaaaagggaccccatatgtagcaaaaatcagggctgggggagagccgggttcattccctgtcctcattggtcgtccctatgaattgtacgtttcagagaaattttttttcctatgtgcaacacgaagcttccagaaccataaaatatcccgtcgataaggaaagaaaatgtcgttgttgttgtttttctggaaactgcttgaaatcttgctgtactatagagctcagaaggacacagcccgtcctcccctgcctgcctgattccatggctgttgtgctgattccaatgctttcacgttggttcctggcgtgggaactgctctcctttgca

SEQ ID NO: 184920 - DNA, 2036 bp, Homo Sapiens
  misc_feature (1777)..(1815): n is a, c, g, or t
actaaattaaaaaactgctcttgctgaaattatgatagttaaaattcctaaaaacttgacaatgctcccctggcttgctgggaaattatacttattatagcatcaccaagtttaaaaatcatcactaattttcaccctctgttgtctcttcatattcttcttccttttcctaaatgaaattatattatttcaactactaaaacttcccgccaccctgctatttctcttccaattactgttcaaacatttttggtgagtgctgcttttataaatatgtgatgtcacatatttcagtgacagctgatgttatcagaaaaatcctgttatcctgtgtatttactagtcctcatgatctagacttaaccccttttctgtgttacagagtaacttcacataaaagcagatacctttaagtttgtgtagacttctgaataagatgatagacgagaattttttttaaaaaaggaatttaaaggaatcttgtgcaacttctgttgatagctcttaattttgttatacagtctttttaatgaggattggtagggcaatcctaccaattgatgggggtgaggagactgttgggcccttattctcttatgaaaatctgtttctacaaggactaggcctaagtagatttaggcaacgggtatcatatccatgaaaaatgtcattttaagacactaatatcaacagtatatctcagtgtgtgagatatataaatacacatacaccccatgtgcttttttgttggtttagtgtaaactgagtaccactttatattttctcttccatagtgagatgtatgcagtatgtggccatgtttactaacatactcattcttcacaaaattctgagattataaaatgtatatagttaatatttgtttgagcttgtgacctgacttctaagagctacttctaacacagccttaggtcttcaattaacaaagtaggaagttgagcacaaccttgtccacagccattttaaatatccacttagccctgtgtagttggtaggtggacaccactttcataagtgaacttgagctcactactcaattgtgcagcttaatatgctgactagggacattcccctatggattatctttatatcactgtctttctaagcccagagatgtcataagtgacaagaaaagtgataggatcaagaaatgggtgtcactgcttcatttggaacatgttattaactatggtctctttcaaataaatagtagttttatatttcaacacaagttgctataagcagtccttgatgggtttttgattgcatcagctggaaagcctcaaatctaagagggcttcccatcctagatataaaataggtgttgcctattgctgtgcttataaaatgaaaaaggaaattgaggacacttttgcaaatgccagaatgtaagattcattcagtgtgctccctgggcctttatggcatgggttgacaggatttgtttattttctaaaattagcttcattcaatatttatcatcctcctttccctctctgagaatgaactatgtataaaataagcttctgcctatttgcatttatcttccaaacccaatctagtaggatgttctcattttaaaaacgaggggaaaagaccagagtttttcaggagaaaactggaggaaaatgggcacaaaaactcagaaggcagctattcccagcagcttcctagttaacaacccccatgctgcctccagtctttgtctgtattcttctgtatttaaccttcagattgtaagccttttctggcaagnnnnnnnnnnnnnnnnnnnnnnnnnnnnnnnnnnnnnnnatgaatggctatggcaccattaatgctgctgaatatctttaaactctgcacaagcaagtgtgtagcttaaggcactactgggtaaggaaaccaagtgtccctctgtgccttttttctttctgtgaagtaatttaagaatatccaaaaaaattagactttaaaaagttatcttggtacaacaccgtgtgtatatacacttggaagcttaaaaaggtgttttg

SEQ ID NO: 184921 - DNA, 1568 bp, Homo Sapiens
ttgggcattgaggcggacgcgtctagaggtccgtctgaccgcggcgtcgggacctggtttccgggcatgagctgagagcaccacgccgaggccacgagtatttcatagacattgatggaagcagaaaccaaaactcttcccctggagaatgcatccatcctttcagagggctctctgcaggaaggacaccgattatggattggcaacctggaccccaaaattaccgaataccacctcctcaagctcctccagaagtttggcaaggtaaagcagtttgacttcctcttccacaagtcaggtgctttggagggacagcctcgaggctactgttttgttaactttgaaactaagcaggaagcagagcaagccatccagtgtctcaatggcaagttggccctgtccaagaagctggtggtgcgatgggcacatgctcaagtaaagagatatgatcataacaagaatgataagattcttccaatcagtctcgagccatcctcaagcactgagcctactcagtctaacctaagtgtcactgcaaagataaaagccattgaagcaaaactgaaaatgatggcggaaaatcctgatgcagagtatccagcagcgcctgtttattcctactttaagccaccagataaaaaaaggactactccatattctagaacagcatggaaatctcgaagatgatggttgtgaattactgtagcagcaaaagcaaattggtctccacacctaaaatcgtctgcctgtgtactttgtagatgtgaatggtactattcaacggagcacaatcacatgttagcatttggtaacataatgtttttggatgttcttatggatgtttcttccctaaactatgtatggaattgagcatcatccagaataaatagcgttgtatcccaaattgtgatttgaaccctgggatgctctaattggctggttggttttggatttgtaactccttaaacattctatagtgtgccagagcaaaaggcaaatacacaaaatattatttaaatcaggaaactaaaaatattaacatctattaaaaaattgagcatttttctacgctcgtgtgtcttttacaacataaagaaaaggtaaaaggcagggagggaagtgagagacagattttaaatcatgttcagaactgttgttccagaatttactacggcaatccctccaactggactgaaaaagagaaagttcttggcaaaaaggagctgattctttgaacaaatgttgtagtaatctgtttaagaattatgcttattgtttcaaaatcccaactaggaaaacatggtgtatatcttaaaattgttcgtgttgacaaaactagaatcaaatttaacattttataccacaacacagttctatttggaaattgaacttttattctatagcaaccatttttttcaaatctaaataaccatgcccttctataataacaaatgttgctattatcatggggacttttaaaattacatttattgcctgggattgtttttatagcatgagaatgttccgtttggaaatatatcatggtcagtccaaatacaaaaagcaaa

SEQ ID NO: 184922 - DNA, 1726 bp, Homo Sapiens
gctcctcataccactcctggatctcctcctggtacatcttcaggctcaggtcgctcttggtcttgatcgccgtcccagaaacaccatggaatgttgctggtatctctccatctgggagagggtctccagcagcctggtgacatccgaggaggccccccgtgcctcccggtagagctccaggacggcaaccagctcttctttggagatttccttctcaagggtgatgccaccatcaacttccgagtcctggttcttgcggctgtagttcattcggaagacgaaggcctcgaggataaaggcgacaatgatcgtcatcaccaccatggtcacaatgtaaaaggtcatgaagtagaggcggctccagtgggaggtctgagaggtgacgccttccatgatgatgtaccagttgttgacaactgtgagctcaaacagggtcacaaagctgttgaggatgttgtcaaaattattgagataatagtagccttcctccaccacggtcctgttgcccacggtgtggttgcgccagcggtaggcatctgccactgtactcgtgttgcagcagttggggaagacgatcccgcagaagaactccatgcccacgatggcgaaggagtagtaaaagatgagcagggtgaggcccaggctgtggggcgacaggggcagggtgacgcggggccggcaggagggaacggctcctctgcagccccggcctcctcggacccgtggggctgactgcagggccatgcccctggtcggttcaccaactggaaagtgcctgcggggaaggggcctcgtggggcagctctggggtgaaaaacagctcaagtcaggacgctatgaacaaatgcccctttcccagagattcaccccttacctgtgaaggtagactcacaggtgaccccttacctgtgaatgtagacacaggtggtaagcgagttgacagctccctgccctccctactaaatatgtcagacaggtcagtggagaaaaatggtgcccaggagacctgtggtggtcaagattccaggctccttggagccccgtcaggccctcgattgcagtcctttgtggaactcctttcccccgactgccactcggctcccgcccccacggggcactgccacacggcacctggacctgcaggccagggtgggggctggcagtacctggccatccggggcagcagctcgaacatggtgtccagcacgttgcggtagcgctccttcaacttaaacaacctcagcagctggagggggcgcaggaccacgatgaaatagaagggctccatgttgagggccagcgccagcagtcccaggaaggcgaacactgtcacggagaagtcaaacaagttccatccggaagacaagtactccacagggcccaggccggcaaccttcaggaacagctccaccccatagatagttagaaagacgaggtaactccagggcacgtgcttggagaagaagttcccacctttcagcataaatgtctccacgaggatccagaccccgttgactgccaccaccaagtctgaaatacacaggcccgtaaaagacagagaaataacaggggggcttagaaatctgcaggtcgcagctgaagtccctggttaacttcctggagctctacgggatggggagaacagggctgctccacacacccatttgatagggaacttctttctgctcagtgctcttaccaagggagctaaatcaaccagtgccaa

SEQ ID NO: 184923 - DNA, 970 bp, Homo Sapiens
ttggaagattattctgcgcctgcgcggcccgggtaactttgctggctgctcctaggctcccggctcgccgccatcttgtattggggtttcattgttcccgctgggccgggcggtttagtgtaattgccgccggaggaggaggcggagtaacctctggtcagccgagaaaccccactatcctgtagccataaccgcttaaacgatttgggaggtagtgaagggcagggagctggacctggaggcgccgccgcgacagcagcagccatggaggacgagatgcccaagactctatacgtcggtaacctttccagagatgtgacagaagctctaattctgcaactctttagccagattggaccttgtaaaaactgcaaaatgattatggatacagctggaaatgatccctattgttttgtggagtttcatgagcatcgtcatgcagctgcagcattagctgctatgaatggacggaagataatgggtaaggaagtcaaagtgaattgggcaacaacccctagcagtcaaaagaaagatacaagcagtagtaccgttgtcagcacacagcgttcacaagatcatttccatgtctttgttggtgatctcagcccagaaattacaactgaagatataaaagctgcttttgcaccatttggaagaatatcagatgcccgagtggtaaaagacatggcaacaggaaagtctaagggatatggctttgtctcctttttcaacaaatgggatgctgaaaacgccattcaacagatgggtggccagtggcttggtggaagacaaatcagaactaactgggcaacccgaaagcctcccgctccaaagagtacatatgagtcaataccaaacagctatcatatgatgaggttgtaaatcagtctagtccaagcaactgtactgtatactgtggaggtgttacttctgggctatcagaacaactaatgcgtcagactttttcacc

SEQ ID NO: 184924 - DNA, 898 bp, Homo Sapiens
ttggtaatacatgataaattttgtagaataaaaggtgaatttgcattaaaggttcactttaatgaaggtgaaacatgagaatgagttgtgtgtgaaattcttatttgatatccagaggatagtttgcaaacctaaacttctgattgtttctgatttcagagatgcccgagtggtaaaagacatggcaacaggaaagtctaagggatatggctttgtctcctttttcaacaaatgggatgctgaaaacgccattcaacagatgggtggccagtggcttggtggaagacaaatcagaactaactgggcaacccgaaagcctcccgctccaaagagtacatatgagtgtaggtgtattggagaagaaaaggaaatgtggaattttggagaaaaatacgctagattttaaatgttagagctgttcccggagacttattgcagaaatagatgagaagcaaatcaagactactattcaaaaatcaaataccaaacagctatcatatgatgaggttgtaaatcagtctagtccaagcaactgtactgtatactgtggaggtgttacttctgggctaacagaacaactaatgcgtcagactttttcaccatttggacaaataatggaaattcgagtctttccagataaaggatattcatttgttcggttcaattcccatgaaagtgcagcacatgcaattgtttctgttaatggtactaccattgaaggtcatgttgtgaaatgctattggggcaaagaaactcttgatatgataaatcccgtgcaacagaatcaaattggatatccccaaccttatggccagtggggccagtggtatggaaatgcacaacaaattggccagtatatgcctaatggttggcaagttcctgcatatggaatgtatgg

SEQ ID NO: 184925 - DNA, 903 bp, Homo Sapiens
ttggggggtttcattgttcccgctgggccgggcggtttagtgtaattgccgccggaggaggaggcggagtaacctctggtcagccgagaaaccccactatcctgtagccataaccgcttaaacgatttgggaggtagtgaagggcagggagctggacctggaggcgccgccgcgacagcagcagccatggaggacgagatgcccaagactctatacgtcggtaacctttccagagatgtgacagaagctctaattctgcaactctttagccagattggaccttgtaaaaactgcaaaatgattatggatacagctggaaatgatccctattgttttgtggagtttcatgagcatcgtcatgcagctgcagcattagctgctatgaatggacggaagataatgggaagtcaaagtgaattgggcaacaacccctagcagtcaaaagaaagatacaagcagtagtaccgttgtcagcacacagcgttcacaagatcatttccatgtctttgttggtgatctcagcccagaaattacaactgaagatataaaagctgcttttgcaccatttggaagaatatcagtgtctctgaagaatggacagaattgccctggctaactacaagctacggttcacagtggataaatagatgcccgagtggtaaaagacatggcaacaggaaagtctaagggatatggctttgtctcctttttcaacaaatgggatgctgaaaacgccattcaacagatgggtggccagtggcttggtggaagacaaatcagaactaactgggcaacccgaaagcctcccgctccaaagagtacatatgagtcaaataccaaacagctatcatatgatgaggttgtaaatcagtctagtccaagcaactgtactgtatactgtgg

SEQ ID NO: 184926 - DNA, 2526 bp, Homo Sapiens
  misc_feature (1447)..(1457): n is a, c, g, or t
  misc_feature (2344)..(2353): n is a, c, g, or t
tacaaaaaagttggttcctatattcgtctaccttgattcattgtttaaaattggtaggatttgtatagatataggatagtgttttatttatactttatcataagccataatcattttaagaatactttattggatagattttagtactttttaaattctaaagttctatttttcttttcacttccccttccttccccttataagatcatttccatgtctttgttggtgatctcagcccagaaattacaactgaagatataaaagctgcttttgcaccatttggaagaatatcagatgcccgagtggtaaaagacatggcaacaggaaagtctaagggatatggctttgtctcctttttcaacaaatgggatgctgaaaacgccattcaacagatgggtggccagtggcttggtggaagacaaatcagaactaactgggcaacccgaaagcctcccgctccaaagagtacatatgagtcaaataccaaacagctatcatatgatgaggttgtaaatcagtctagtccaagcaactgtactgtatactgtggaggtgttacttctgggctaacagaacaactaatgcgtcagactttttcaccatttggacaaataatggaaattcgagtctttccagataaaggatattcatttgttcggttcaattcccatgaaagtgcagcacatgcaattgtttctgttaatggtactaccattgaaggtcatgttgtgaaatgctattggggcaaagaaactcttgatatgataaatcccgtgcaacagcagaatcaaattggatatccccaaccttatggccagtggggccagtggtatggaaatgcacaacaaattggccagtatatgcctaatggttggcaagttcctgcatatggaatgtatggccaggcatggaaccagcaaggatttaatcagacacagtcttctgcaccatggatgggaccaaattatggagtgcaaccgcctcaagggcaaaatggcagcatgttgcccaatcagccttctgggtatcgagtggcagggtatgaaacccagtgaataaggactccagaatctaaagccagtggcttgaggctacagggagtgtagtaaagccgttgtttacttaaagatttatcaaatcagtcagtgcaaatgtcagatacaatgtatttatttaaaagattcatttttaatcatgaaattacttatcatccacattgttttaaaaagaaacaagatgctggatgtctgccaatttttgccttcattaccttttttgataaagtttctcagatccttgtttcaaacacaaatgcagggattgctgccactttttaactattaagaggcagaaaattgcacaatattgaacttttttccactgaagtagtgtgcagttctagtttgcattcctgatatgatttaaaacatgtaatataaagatgttnnnnnnnnnnnccaaaactgtgcagagtctagaagttgtttgtcatcttcagcttgtgcacaattctgttttaggttaaaaaaaggcattgtttgagctgtcccatctccactgttatccctttggggttttttaatataaattattagtttacatcatttttgtatctacatcttttttcacaaatttgtcttgccttattaaagttctgtaaaatatacttaaatggaaaaaatgatgttcatttagattgaaaacttttctcagatggattgataattgcattcatcttgtgttttatatgagaaggtgcctcaagaatttcctgttggatttgtttaaaaggatttttatctttcgtgataaactttgctgtgtaccaggaactataaaaacaaaaacttgttactaaagaaaatatctgaaatgtgataagttcttatgccatgttaatttcatgtgtcaacttcaacatttacatgtattatttcattatgtaaaatgttttagcaatttaatattttgcacagttagcaaactttgtatgtcatttccttcaaggcatcatgcagagttgacatgagatttataaggttttaagttgtttgcatgtgaaaatcaaatacatactttggtagtctttgaatacaaagtcatctgctcttgtttttcaagaattttgagacacaaagttgtatgtaaaggaatatattaatttgccgttttctaggtagatttgctcaaaaagagtgaatcaacttaatatgtacaaatgatagctgtgaaactgtagaatatctttgtgtcaggcttggagttcattgtgacctccaaattttgcctgaaggaccagctgggcaaagcatcttttaaatgttcagaggccaaaagataaacnnnnnnnnnnccttaaaatcctacctctttaaacagccttcagataagagaatcctcagtgcaatcattattttgattcgtttggtacctgttttcctggagttcccgattttattattttggggtggctccaagcattaagaggtttaatctttgatggcattgttctagttttgaaatttc

SEQ ID NO: 184927 - DNA, 1564 bp, Homo Sapiens
  misc_feature (970)..(985): n is a, c, g, or t
ttggctggctgctgccgcccgccggtgtccgcccgtgtcgcgccggggcaccaaggagccgttggagggtccgggcggaggcccgctcgtgtggaagtcgtcgacgccgccgctcgtccgtcctcccgtccgttctcgctcccggccgccatcatgctggcgctcatctcccgcctgctggactggttccgttcgctcttctggaaggaagagatggagctgacgctcgtggggctgcagtactcgggcaagaccaccttcgtcaatgtcatcgcgtcaggtcaattcagtgaagatatgatacccacagtgggcttcaacatgaggaaggtaactaaaggtaacgtcacaataaagatctgggacataggaggacaaccccgatttcgaagcatgtgggagcggtattgcagaggagtcaatgctattgtttacatgatagatgctgcagatcgtgaaaagatagaagcttcccgaaatgagctacataatcttctagataaaccacagttacaaggaattccagtgctagtgcttggaaacaagagagatcttcctaatgccttggatgagaaacagctaattgaaaaaatgaatctgtctgctattcaggatagagaaatttgctgctattcaatttcttgcaaagaaaaggataatatagatatcacacttcagtggcttattcagcattcaaaatctagaagaagctgaagcatctcctgaagtcttccagtccttcttggctataatcctagaattattgtccgttcctctgaagtaattcccagaatacggtccttcctaaaccccagaaattgcctttttcagagtttatttctcatgtgcactgctgaagatgaatatccctaatccttcataaagaatcagctagagttgtcatgataaagtcagcacacacaaaaaggcttcttacacatacctgtcttaaaccatgtgtagagctttnnnnnnnnnnnnnnnnccccatatacttatgaccatcttaaatcaagaaaattgcatatttccattctggtctttctgggccagatttttatattggttttcagtaaatgtctatctataatatttcattatagagtccagtagcttaatactgacactgacttgatacagcatgaagtttctagtgccacacacagtatttagaaaacctttaggcgtgaatgactcatgtgggatatatgtaaacataatgtttattttatctcacaaatgcatgtgaaatgtataattacatcttaggaatccaaaatggtctgcagagagtgagcggaggcaccagatcaatgttggttctttgcactggtgagattctgcctgatgaatattaaagatatcctgctttctgagaactctatcaccagatggcagttgggatatgggaggaactaaagcatcctgttttgtatctgtccagatcattatttctgtctcttgttttttcttcctggttcacgatacttttttatagggttgagaattgaagattttccaaaagcgttcatgaatttagagcattccacccaatataataaaa

SEQ ID NO: 184928 - DNA, 1411 bp, Homo Sapiens
ccaactttgtacaaaaaagttggtgagattctccctgatgaatattaaagatatcctgctttctgagaactctatcaccagatggcagttgggatatgggaggaactaaagcatcctgttttgtatctgtccagatcattatttctgtctcttgttttttcttcctggttcaggatacttttttaaggggttgagaattgaagattttccaaaagcgttcatgaatttagagcattccacccaatataataaaacctgttaagaatgtcagtctttgttcaaacatctgtttgttctatctccagtcattaaatcagtgctgctgcatgacactcttaactcctgactttttatatccagtcataaagttgactttcagcacaaaagatacttataaacaaataaaaaatttttatttttctctcttactgatgtaagctttggcactcttttgactggtgccattagacatcttgattattgtgacaactctagacctgcctgctttatctaatgtaatcatgctcaatgtctacaggttgtttaataatcagtcacacagagaactgaggaactgatgctgtttgtttgcttctatgatacagagatgtctaaaaacttcaaatggacatgttttgtagtttagcgacttccgtatacataaagggacatattaatactggttcatttgtaaattattattcatatagaccactgtagtagataaaactctatggtacacctgcttatgtgttgcctcacactgtgtgtgattttgtttcttttgttaagcagcacttatgtagactgcatttccaaatgtgttgagcactcagagtgtagtcaacagtaagttcttttaatgaatatcagttttaatttatagactgccatggccttaaaaatattctgtacaatatactgcactgtgttgcacagacactacttgcttttctccattcatatttttatgagtagaatctgggcttttaaatttctcttcttattctttgaagcatgttgcatactaccctggtgggatggatggttctgtaaatgaagggatatttaaacttgctactgttgttcaacaccattaatggtcagtgtgaaccattacaaagaatgtggcaacttgcttgtgcctaaaaggaggaattggaactagaatgtgtgactctgtggggactgcataggtttgttaattgacctatagctaaaccttaatgtgtttgtgtgtctatacattgctttccgcatttcaagacatccagacgctattaccaacattttcctgtgcattaaacctctgcatgtgaaaacttttaacagttactgaactatgtaaatatgtgaatttttttatttaggtggatgcattttttgtctgtttactgctcttctcagcttt

SEQ ID NO: 184929 - DNA, 927 bp, Homo Sapiens
ttggccaacttttaacaacatgagctgaaactaaaccaaagtactcttctttccaagtcatgaaaaggaaaccttaaatatatttccaagaaatcctgaccatagtctgtagatctgtttttaaaatattttccgctatcttcatttctaagtttcaatattcctagatttggtagtttgagagatgtaacttcatttagggaaaatgataataggaattttctatgttaggctttgccccttaaaaattaaatgtgtcctgggcagatggagggatttcctggtgtgcatcactttctagcatcagctcttcaggagcccacgggaggaacccctgtattaaagtcaatgcaccaaaggcagctagggtttccatacagacaccatggtccaagccctcatgaaagggtgaggacctggagtttgtcggggatttgggttcttgtacacagatacaacacggccgccaaggaagagtgaggaagatgggaaggagtaccactttatctcaacggaggagatgacgaggaacatctctgccaatgagttcttggagtttggcagctaccaaggcaacatgtttggcaccaaatttgaaacagtgcaccagatccataagcagaacaagattgccatccttgacattgagccccagaccctgaaaattgttcggacagcagaactttcgcctttcattgtgttcattgcacctactgaccagggcactcagacagaagccctgcagcagctgcagaaggactctgaggccatccgcagccagtacgctcactactttgacctctcactggtcaataatggtgttgatgaaacccttaagaaattacaagaaagccttcgaccaagcgtgcagttctccacagtggtgcctgtctctgggtttactaagcttgtaaaatgggggaaccc

SEQ ID NO: 184930 - DNA, 1890 bp, Homo Sapiens
  misc_feature (1580)..(1637): n is a, c, g, or t
acagccatgtcctcgtcagccggcagcggccaccagcccagccagagccgcgccatccccacccgcaccgtggccatcagcgacgccgcgcagctacctcatgactattgcaccacgcccggggggacgctcttctccaccacaccgggaggaactcgaatcatttatgacagaaagtttctgttggatcgtcgcaattctcccatggctcagaccccaccctgccatctgcccaatatcccaggagtcactagccctggcaccttaattgaagactccaaagtagaagtaaacaatttgaacaacttgaacaatcacgacaggaaacatgcagttggggatgatgctcagttcgagatggacatctgactctcctgcaaggattagaagaaaagcagcaacactgatacttgtgtgcacctgatttggccaataggatcaacagtgaaaagacagaagaggcaataccagcagtccccattacagtctccacctccccgtcttcctctgggtgccaaatgatgggaagatgagcttcatctgaccatttcttctccctgtctcctgttccccttcccagttaaacaggttagattgaaggcccttgctgtatttctgtagagctaagcagcccttagaggaaaacagttcaactctgactttcctagttgtttttttattgagagccaccctcataccctgtaattttgtcccaaatcaaatatcaacctaccaacaactgcctggctgggaagtctggggaagggatacagagcttggtgggcctaacaccattcatattccttaccctctgtctctcctccctgtatcccacctatggttcagtgttgcaagagtctgggcttggggtctttaaaaccagcagggggaaatgataaaaagagagctgctttcccttttaccttgaggtattcgtccctcgggacagagcacagcttgtgcaactctggtagcgttaccctgtgacactgttttgaggtccacttcctttctttcctctgggaggaatgtcttctgtctttggtattatagttcatcttcccattcttttacttagtgcatttgtgcagatatttttaactctgtacatcagaagagagcccttggtaaccagttttgctcttcttctgccactcctccctgcttgcatctcgttgctggcagagtcctcttgtacttcaagaaagcaaagtgattttgtctgctcctagagcaggtccataccaagtaatagaggcactttagcttccacttggtgggtaaggcctgatcatagtattctgtcagataatgcctaagaatgaccgctgaagaacgttgacccatttgagtacccggtctcagtcgtcatttttaagtccagtgagcattgtggtagttgttcttagattgcagtttcttatgttttgagtttgaagttgattttcagaatgttcttagaaaagaactgcatttttttcctttgtggatctgctttgtttggctgctgggatagataagcatgggcttaaaaaatgtgttcctcccagttttcttgcctttcctgttgtactctgaannnnnnnnnnnnnnnnnnnnnnnnnnnnnnnnnnnnnnnnnnnnnnnnnnnnnnnnnntaccaggccatttttcaaatttacatcaaagatacctgaagtgttggtatctgagaatatctgtcactcctcttatctgagaagtgacctttaatttttaagatgactacagacctattttttagatatgatttcagtacaatttttgaacagcaactttttaatttaacatcttccagtgttaggaagttgagaaaacgttcataggcaagtctgcagttctatgtcacatcttttgtccccccaatccccc

SEQ ID NO: 184931 - DNA, 1409 bp, Homo Sapiens
ctttgtacaaaaaagttggatctgacccaccgtagaaccaagaccgagggacacacgtggacctcggattagcctccgccaacgtggacttcgctttcagcctgtacaagcagttagtcctgaaggcccctgataagaatgtcatcttctccccactgagcatctccaccgccttggccttcctgtctctgggggcccataataccaccctgacagagattctcaaaggcctcaagttcaacctcacggagacttctgaggcagaaattcaccagagcttccagcacctcctgcgcaccctcaatcagtccagcgatgagctgcagctgagtatgggaaatgccatgtttgtcaaagagcaactcagtctgctggacaggttcacggaggatgccaagaggctgtatggctccgaggcctttgccactgactttcaggactcagctgcagctaagaagctcatcaacgactacgtgaagaatggaactagggggaaaatcacagatctgatcaaggaccttgactcgcagacaatgatggtcctggtgaattacatcttctttaaagccaaatgggagatgccctttgacccccaagatactcatcagtcaaggttctacttgagcaagaaaaagtgggtaatggtgcccatgatgagtttgcatcacctgactataccttacttccgggacgaggagctgtcctgcaccgtggtggagctgaagtacacaggcaatgccagcgcactcttcatcctccctgatcaagacaagatggaggaagtggaagccatgctgctcccagagaccctgaagcggtggagagactctctggagttcagagagataggtgagctctacctgccaaagttttccatctcgagggactataacctgaacgacatacttctccagctgggcattgaggaagccttcaccagcaaggctgacctgtcagggatcacaggggccaggaacctagcagtctcccaggtggtccataaggctgtgcttgatgtatttgaggagggcacagaagcatctgctgccacagcagtcaaaatcaccctcctttctgcattagtggagacaaggaccattgtgcgtttcaacaggcccttcctgatgatcattgtccctacagacacccagaacatcttcttcatgagcaaagtcaccaatcacaagcaagcctagagcttgccatcaagcagtgtggctctcagtaaggaacttggaatgcaagctggatgcctgggtctctgggcacagcctggcccctgtgcaccgagtggccatggcatgtgtggccctgtctgcttatccttggaaggtgacagcgattccctgtgtaactctcacatgcacaggggcccatggactcttcagtctgggagggtcctgggcctc

SEQ ID NO: 184932 - DNA, 1570 bp, Homo Sapiens
actttgtacaaaaaagttggccaccagctacatccagctccctgaggcagagttgagaatggagagaatgttacctctcctgactctggggctcttggcggctgggttctgccctgctgtcctctgccaccctaacagcccacttgacgaggagaatctgacccaggagaaccaagaccgagggacacacgtggacctcggattagcctccgccaacgtggacttcgctttcagcctgtacaagcagttagtcctgaaggcccctgataagaatgtcatcttctccccactgagcatctccaccgccttggccttcctgtctctgggggcccataataccaccctgacagagattctcaaaggcctcaagttcaacctcacggagacttctgaggcagaaattcaccagagcttccagcacctcctgcgcaccctcaatcagtccagcgatgagctgcagctgagtatgggaaatgccatgtttgtcaaagagcaactcagtctgctggacaggttcacggaggatgccaagaggctgtatggctccgaggcctttgccactgactttcaggactcagctgcagctaagaagctcatcaacgactacgtgaagaatggaactagggggaaaatcacagatctgatcaaggaccttgactcgcagacaatgatggtcctggtgaattacatcttctttaaagccaaatgggagatgccctttgacccccaagatactcatcagtcaaggttctacttgagcaagaaaaagtgggtaatggtgcccatgatgagtttgcatcacctgactataccttacttccgggacgaggagctgtcctgcaccgtggtggagctgaagtacacaggcaatgccagcgcactcttcatcctccctgatcaagacaagatggaggaagtggaagccatgctgctcccagagaccctgaagcggtggagagactctctggagttcagagagataggtgagctctacctgccaaagttttccatctcgagggactataacctgaacgacatacttctccagctgggcattgaggaagccttcaccagcaaggctgacctgtcagggatcacaggggccaggaacctagcagtctcccaggtggtccataaggctgtgcttgatgtatttgaggagggcacagaagcatctgctgccacagcagtcaaaatcaccctcctttctgcattagtggagacaaggaccattgtgcgtttcaacaggcccttcctgatgatcattgtccctacagacacccagaacatcttcttcatgagcaaagtcaccaatcccaagcaagcctagagcttgccatcaaacagtggggctctcagtaaggaacttggaatgcaagctggatgcctgggtctctgggcacagcctggcccctgtgcaccgagtggccatggcatgtgtggccctgtctgcttatccttggaaggtgacagcgattccctgtgtagctctcacatgcacaggggcccatggactcttcagtctggagggtcctgggcctcctgacagcaataaataatttcgttggac

SEQ ID NO: 184933 - DNA, 1565 bp, Homo Sapiens
  misc_feature (429)..(441): n is a, c, g, or t
  misc_feature (483)..(492): n is a, c, g, or t
  misc_feature (870)..(900): n is a, c, g, or t
ttggcggaacctcaagaacaaactggagaataaaatggaaggaataggtttgaagaggacaccgatgggcattgtcctggatgccctagaacagcaggaagaaggcatcaacagactcactgactatatcagcaaagtgaaggaataaacataacttacctgagctagggttgcagcagaaattgagttgcagcttgcccttgtccagacctattttctgcttgcgtttttgaaacaggaggtgcacgtaccacccaattatctatggcagcatgcatgtataggccgaactattatcagctctgatgtttcagagagaagacctcagaaaccgaaagaaaaccaccaccctcctattgtgtctgaagtttcacgtgtgtttatgaaatctaatgggaaatggatcacacgatttctttaagggaattnnnnnnnnnnnnngaattacggcttttacagcaacaatacgattatcttataggnnnnnnnnnntcattgtaaagtatcaagacaatacgagtaaatgaaaaggctgttaaagtagatgacatcatgtgttagcctgttcctaatcccctagaattgtaatgtgtgggatataaattagtttttattattctcttaaaaatcaaagatgatctctatcactttgccacctgtttgatgtgcagtggaaactggttaagccagttgttcatacttcctttacaaatataaagatagctgtttaggatattttgttacatttttgtaaatttttgaaatgctagtaatgtgttttcaccagcaagtatttgttgcaaacttaatgtcattttccttaagatggttacagctatgtaacctgtattattctggacggacttattnnnnnnnnnnnnnnnnnnnnnnnnnnnnnnncttgagttctatttaccttgcacattttttgttgttacagtgaaaaaaatggtccaagaaaatgtttgccatttttgcattgtttcgtttttaactggaacatttagaaagaaggaaatgaatgtgcattttattaattccttaggggcacaaggaggacaataatagctgatcttttgaaatttgaaaaacgtctttagatgaccaagcaaaaagactttaaaaaatggtaatgaaaatggaatgcagctactgcagctaataaaaaattttagatagcaattgttacaaccatatgcctttatagctagacattagaattatgatagcatgagtttatacattctattatttttcctccctttctcatgtttttataaataggtaataaaaaatgttttgcctgccaattgaatgatttcgtagctgaagtagaaacatttaggtttctgtagcattaaattgtgaagacaactggagtggtacttactgaagaaactctctgtatgtcctagaataaaaagcaatgatgtgctgcttctgatttttcttgcattttaaattctcagccaacctacagccatgatctttagcacagtgatatcaccatgacttcacagacatggtctataatctgtacccttacccacatatgaagaataaaa

SEQ ID NO: 184934 - DNA, 2351 bp, Homo Sapiens
ttggcaaatctgcagcagcatgatttaagattaaattcatgtattgaaaatattgttcagaccccatgtgacataactggagccagtgcagtgccatgaagaactacgagattagcctggatattaacttgtcttctagagaatagatttcatgttccattcttctgcaatggttaattcacacagaaaaccaatgtttaacattcacagaggattttactgcttaacagccatcttgccccaaatatgcatttgttctcagttctcagtgccatctagttatcacttcactgaggatcctggggctttcccagtagccactaatggggaacgatttccttggcaggagctaaggctccccagtgtggtcattcctctccattatgacctctttgtccaccccaatctcacctctctggactttgttgcatctgagaagatcgaagtcttggtcagcaatgctacccagtttatcatcttgcacagcaaagatcttgaaatcacgaatgccacccttcagtcagaggaagattcaagatacatgaaaccaggaaaagaactgaaagttttgagttaccctgctcatgaacaaattgcactgctggttccagagaaacttacgcctcacctgaaatactatgtggctatggacttccaagccaagttaggtgatggctttgaagggttttataaaagcacatacagaactcttggtggtgaaacaagaattcttgcagtaacagattttgagccaacccaggcacgcatggctttcccttgctttgatgaaccgttgttcaaagccaacttttcaatcaagatacgaagagagagcaggcatattgcactatccaacatgccaaaggttaagacaattgaacttgaaggaggtcttttggaagatcactttgaaactactgtaaaaatgagtacataccttgtagcctacatagtttgtgatttccactctctgagtggcttcacttcatcaggggtcaaggtgtccatctatgcatccccagacaaacggaatcaaacacattatgctttgcaggcatcactgaagctacttgatttttatgaaaagtactttgatatctactatccactctccaaactggatttaattgctattcctgactttgcacctggagccatggaaaattggggcctcattacatatagggagacgtcactgctttttgaccccaagacctcttctgcttccgataaactgtgggtcaccagagtcatagcccatgaactggcgcaccagtggtttggcaacctggtcacaatggaatggtggaatgatatttggcttaaggagggttttgcaaaatacatggaacttatcgctgttaatgctacatatccagagctgcaatttgatgactattttttgaatgtgtgttttgaagtaattacaaaagattcattgaattcatcccgctctatctctaaaccagcggaaaccccgactcaaatacaggaaatgtttgatgaagtttcctataacaagggagcttgtattttgaatatgctcaaggattttctgggtgaggagaaattccagaaaggaataattcagtacttaaagaagttcagctatagaaatgctaagaatgatgacttgtggagcagtctgtcaaatagttgtttagaaagtgattttacatctggtggagtttgtcattcggatcccaagatgacaagtaacatgctcgcctttctgggggaaaatgcagaggtcaaagagatgatgactacatggactctccagaaaggaatccccctgctggtggttaaacaagacgggtgttcactccgactgcaacaggagcgcttcctccagggggttttccaggaagaccctgaatggagggccctgcaggagaggtacctgtggcatatcccattgacctactccacgagttcttctaatgtgatccacagacacattctaaaatcaaagacagatactctggatctacctgaaaagaccagttgggtgaaatttaatgtggactcaaatggttactacatcgttcactatgagggtcatggatgggaccaactcattacacagctgaatcaggaccacacacttctcagacctaaggacagagtaggtctgattcatgatgtgtttcagctagttggtgcagggagactgaccctagacaaagctcttgacatgacttactacctccaacatgaaacaagcagccccgcacttctcgaaggtctgagttacttggaatcgttttaccacatgatggacagaaggaatatttcagatatctctgaaaacctcaagcgttaccttcttcagtattttaagccagtga

SEQ ID NO: 184935 - DNA, 1348 bp, Homo Sapiens
  misc_feature (508)..(531): n is a, c, g, or t
  misc_feature (866)..(894): n is a, c, g, or t
  misc_feature (917)..(931): n is a, c, g, or t
gttgaagaggcagagcctgaagaatttgtcgtggaaaaagtactagatcgacgtgtagtgaatgggaaagtggaatatttcctgaagtggaagggatttacagatgctgacaatacttgggaacctgaagaaaatttagattgtccagaattgattgaagcgtttcttaactctcagaaagctggcaaagaaaaagatggtacaaaaagaaaatctttatctgacagtgaatctgatgacagcaaatcaaagaagaaaagagatgctgctgacaaaccaagaggatttgccagaggtcttgatcctgaaagaataattggtgccacagacagcagtggagaattgatgtttctcatgaaatggaaagattcagatgaggcagacttggtgctggcgaaagaggcaaatatgaagtgtcctcaaattgtaattgctttttatgaagagagactaacttggcattcttgtccagaagatgaagctcaataattgttcacattgttctttnnnnnnnnnnnnnnnnnnnnnnnnaaaattgggtcttagattttgatttactagtgtgacaaaataactacatcctaatgaaaatcaagtttgatatgtttgttttgaaagtagcgttggaagagttgttgggggttttttgcatccatagcactggttactttgaacaaataaataaaagctttctgtagttgcttcctttatcagaaaagaacatttgataccatggtatatcatttcctcttcattaaagaacagcttttctaaatgttgggggaaatgtccatagtcattactcagtcaaaacttgtgttctcatgagcctaaggaccattctagatttattacgtgtttttttnnnnnnnnnnnnnnnnnnnnnnnnnnnnnatccataaaatgcatatgtaaannnnnnnnnnnnnnnaagcattcacccaaacaaaaaaatcacaggtaaacccatgtttctgagatgccattattccaagcaaaataagagataatcccttcaagttaaattgaaaattttcctgaaaccatacatttcaagtgaaataagtaattctagataggacaatttaaattggataattttaaagtgtctataattgcagtggtttatttgcaaaattcctaaaaggaaaaattttatcactgccatcacagcaggtctcctcatccagatgaggaaactagacaaatgctagtgtgttttaactagctaaacaaaactaagttaatgaacatttaaaagtttccctagcgggccattctttaccaaatgttgggaatccctgttgctacattgactaaaggtcatgatgaatggaatatgtaagac

SEQ ID NO: 184936 - DNA, 1223 bp, Homo Sapiens
  misc_feature (295)..(318): n is a, c, g, or t
  misc_feature (649)..(681): n is a, c, g, or t
  misc_feature (704)..(718): n is a, c, g, or t
tctttatctgacagtgaatctgatgacagcaaatcaaagaagaaaagagatgctgctgacaaaccaagaggatttgccagaggtcttgatcctgaaagaataattggtgccacagacagcagtggagaattgatgtttctcatgaaatggaaagattcagatgaggcagacttggtgctggcgaaagaggcaaatatgaagtgtcctcaaattgtaattgctttttatgaagagagactaacttggcattcttgtccagaagatgaagctcaataattgttcacattgttctttnnnnnnnnnnnnnnnnnnnnnnnnaaaattgggtcttagattttgatttactagtgtgacaaaataactacatcctaatgaaaatcaagtttgatatgtttgttttgaaagtagcgttggaagagttgttgggggttttttgcatccatagcactggttactttgaacaaataaataaaagctttctgtagttgcttcctttatcagaaaagaacatttgataccatggtatatcatttcctcttcattaaagaacagcttttctaaatgttgggggaaatgtccatagtcattactcagtcaaaacttgtgttctcatgagcctaaggaccattctagatttattacgtgtttnnnnnnnnnnnnnnnnnnnnnnnnnnnnnnnnnatccataaaatgcatatgtaaannnnnnnnnnnnnnnaagcattcacccaaacaaaaaaatcacaggtaaacccatgtttctgagatgccattattccaagcaaaataagagataatcccttcaagttaaattgaaaattttcctgaaaccatacatttcaagtgaaataagtaattctagataggacaatttaaattggataattttaaagtgtctataattgcagtggtttatttgcaaaattcctaaaaggaaaaattttatcactgccatcacagcatgtttcctcatccagatgaggaaactagacaaatgctagtgtgttttaactagctaaacaaaactaagttaaatgaacatttaaaagtttccctagcgggccattccttagcaaaatgttggaaatccctgttgctacattgactaaagggtcatgatgaatggaatatgtaagacttggctcatagaaacctaatcagatggttagaggtgttggcagtttaagacctgctgtcataaatgtgtgaacaaccttttgtaa

SEQ ID NO: 184937 - DNA, 1315 bp, Homo Sapiens
  misc_feature (507)..(531): n is a, c, g, or t
  misc_feature (856)..(894): n is a, c, g, or t
  misc_feature (917)..(931): n is a, c, g, or t
gttgaagaggcagagcctgaagaatttgtcgtggaaaaagtactagatcgacgtgtagtgaatgggaaagtggaatatttcctgaagtggaagggatttacagatgctgacaatacttgggaacctgaagaaaatttagattgtccagaattgattgaagcgtttcttaactctcagaaagctggcaaagaaaaagatggtacaaaaagaaaatctttatctgacagtgaatctgatgacagcaaatcaaagaagaaaagagatgctgctgacaaaccaagaggatttgccagaggtcttgatcctgaaagaataattggtgccacagacagcagtggagaattgatgtttctcatgaaatggaaagattcagatgaggcagacttggtgctggcgaaagaggcaaatatgaagtgtcctcaaattgtaattgctttttatgaagagagactaacttggcattcttgtccagaagatgaagctcaataattgttcacattgttcttnnnnnnnnnnnnnnnnnnnnnnnnnaaaattgggtcttagattttgatttactagtgtgacaaaataactacatcctaatgaaaatcaagtttgatatgtttgttttgaaagtagcgttggaagagttgttgggggttttttgcatccatagcactggttactttgaacaaataaataaaagctttctgtagttgcttcctttatcagaaaagaacatttgataccatggtatatcatttcctcttcattaaagaacagcttttctaaatgttgggggaaatgtccatagtcattactcagtcaaaacttgtgttctcatgagcctaaggaccattctagatttattacnnnnnnnnnnnnnnnnnnnnnnnnnnnnnnnnnnnnnnnatccataaaatgcatatgtaaannnnnnnnnnnnnnnaagcattcacccaaacaaaaaaatcacaggtaaacccatgtttctgagatgccattattcccagcaaaataacagataatcccttcaagttaaattgaaaattttcctgaaaccatacatttcaagtgaaataagtaattctagataggacaatttaaattggataattttaaagtgtctataattgcagtggtttatttgcaaaattcctaaaaggaaaaattttatcactgcccctcacagcaggtttccctcctccgatgaggaactacaacaaatgctagtgtgtgttaactagctacacaaaactaattaaatgaacatttaaaagtttccctagcgggcccttccctaccaagtgttcgaaatccccggtgctacatt

SEQ ID NO: 184938 - DNA, 1462 bp, Homo Sapiens
  misc_feature (532)..(546): n is a, c, g, or t
  misc_feature (569)..(599): n is a, c, g, or t
  misc_feature (932)..(955): n is a, c, g, or t
aaaaacatgcaggtcaattaggttagttacaaaagggtgttcacacattatgacagcaggtcctaaattgccaacacctctaaccatctgattaggtttctataagccaagtcttacatattccattcatcatgacccttttagtcaatgtagcaacaggggattccaacattttgctaaggaatggcccgctagggaaacttttaaatgttcatttaacttagttttgtttagctagttaaaacacactagcatttgtctagtttcttcatctggatgaggaaacctgctgtgatggcagtgataaaatttttccttttaggaattttgcaaataaaccactgcaattatagacactttaaaattatccaatttaaattgtcctatctagaattacttatttcacttgaaatgtatggtttcaggaaaattttcaatttaacttgaagggattatctcttattttgcttggaataatggcatctcagaaacatgggtttacctgtgatttttttgtttgggtgaatgcttnnnnnnnnnnnnnnntttacatatgcattttatggatnnnnnnnnnnnnnnnnnnnnnnnnnnnnnnnaaaaacacgtaataaatctagaatggtccttaggctcatgagaacacaagttttgactgagtaatgactatggacatttcccccaacatttagaaaagctgttctttaatgaagaggaaatgatataccatggtatcaaatgttcttttctgataaaggaagcaactacagaaagcttttatttatttgttcaaagtaaccagtgctatggatgcaaaaaacccccaacaactcttccaacgctactttcaaaacaaacatatcaaacttgattttcattaggatgtagttattttgtcacactagtaaatcaaaatctaagacccaattttnnnnnnnnnnnnnnnnnnnnnnnnaaagaacaatgtgaacaattattgagcttcatcttctggacaagaatgccaagttagtctctcttcataaaaagcaattacaatttgaggacacttcatatttgcctctttcgccagcaccaagtctgcctcatctgaatctttccatttcatgagaaacatcaattctccactgctgtctgtggcaccaattattctttcaggatcaagacctctggcaaatcctcttggtttgtcagcagcatctcttttcttctttgatttgctgtcatcagattcactgtcagataaagattttctttttgtaccatctttttctttgccagctttctgagagttaagaaacgcttcaatcaattctggacaatctaaattttcttcaggttcccaagtattgtcagcatctgtaaatcccttccacttcaggaaatattccactttcccattcactacacgtcgatctagtactttttccacgacaaattcttcaggctctgcctcttcaac

SEQ ID NO: 184939 - DNA, 1736 bp, Homo Sapiens
  misc_feature (91)..(141): n is a, c, g, or t
  misc_feature (649)..(672): n is a, c, g, or t
  misc_feature (1006)..(1036): n is a, c, g, or t
  misc_feature (1059)..(1073): n is a, c, g, or t
ttggggagacgctgcagacccgcgacccggagcagctcggaggcggtgaataatagctcttcaagtctgcaataaaaaatggcctccaacnnnnnnnnnnnnnnnnnnnnnnnnnnnnnnnnnnnnnnnnnnnnnnnnnnngttgaagaggcagagcctgaagaatttgtcgtggaaaaagtactagatcgacgtgtagtgaatgggaaagtggaatatttcctgaagtggaagggatttacagatgctgacaatacttgggaacctgaagaaaatttagattgtccagaattgattgaagcgtttcttaactctcagaaagctggcaaagaaaaagatggtacaaaaagaaaatctttatctgacagtgaatctgatgacagcaaatcaaagaagaaaagagatgctgctgacaaaccaagaggatttgccagaggtcttgatcctgaaagaataattggtgccacagacagcagtggagaattgatgtttctcatgaaatggaaagattcagatgaggcagacttggtgctggcgaaagaggcaaatatgaagtgtcctcaaattgtaattgctttttatgaagagagactaacttggcattcttgtccagaagatgaagctcaataattgttcacattgttctttnnnnnnnnnnnnnnnnnnnnnnnnaaaattgggtcttagattttgatttactagtgtgacaaaataactacatcctaatgaaaatcaagtttgatatgtttgttttgaaagtagcgttggaagagttgttgggggttttttgcatccatagcactggttactttgaacaaataaataaaaagctttctgtagttgcttcctttatcagaaaagaacatttgataccatggtatatcatttcctcttcattaaagaacagcttttctaaatgttgggggaaatgtccatagtcattactcagtcaaaacttgtgttctcatgagcctaaggaccattctagatttattacgtgtttttnnnnnnnnnnnnnnnnnnnnnnnnnnnnnnnatccataaaatgcatatgtaaannnnnnnnnnnnnnnaagcattcacccaaacaaaaaaatcacaggtaaacccatgtttctgagatgccattattccaagcaaaataagagataatcccttcaagttaaattgaaaattttcctgaaaccatacatttcaagtgaaataagtaattctagataggacaatttaaattggataattttaaagtgtctataattgcagtggtttatttgcaaaattcctaaaaggaaaaattttatcactgccatcacagcaggtttcctcatccagatgaggaaactagacaaatgctagtgtgttttaactagctaaacaaaactaagttaaatgaacatttaaaagtttccctagcgggccattccttagcaaaatgttggaatccctgttgctacattgactaaaaggtcatgatgaatggaatatgtaagacttggctcatagaaacctaatcagatggttagaggtgttggcagtttaagacctgctgtcataaatgtgtgaacaaccttttgtaacctaacctattgacctgcatgttttttctttacccccaattcattacatggaggctcaatcttgagtttgctttactggttcagcaaaaagccagggaagaacaactttgtagtactcaaaatgttatccaactgtatattgtttactttattggaaat

SEQ ID NO: 184940 - DNA, 1035 bp, Homo Sapiens
ctttgtacaaaaaagttggcttctatatataaatttggacgaatagaagtaaatatgtttattggtgaaaaagaattccagaaactaatggcagatcctggaaatccagacttgtatcatgtattaagtgttatctggcaattagcttgtgagattaaggttctgcacatggagccttggtcatcatttgatatatacacccggaaagggccgctggaaaacccaaagcgtagggaattattagaccaattacaacaaaagctgtatcttattcaaatgattcctcgtcaaaatttatttaccaagaacttaacacctatgaactataatatattttttcacttgttaaagcactgttttgggaggcgcagcgccactgtaatagaccacttacgttcattgactccacttgatgcgagagatatattgatgcaaataggaaaacaggaggatgagaaagtagttaacatgcaccctcaagacttcaaaacactttttgaaactatagagcgttccaaagattgtgcttataaatggctgtatgatgaaaccctggaagataggtagcaactagactgtcgtttttggtggagcggttcatttatttggaaactatgacatgaaaaccaaatttgaaaactcacatcctttcagcagaaggtaactgttcttgtcttgcacaagccaggcagatcatttctcctaagctgatatcattggcttattggatgaaacagtgtctgctattttattcacaattgaataaaatgaaaacttcaattaattgtggatttgatcagattgaattcgttttgtttcagattcctatttaaatatttcacttgtactgttgctgatttttgcatcttcttgaagagcaagagtctgtacattattaagcttaaaaagtaagcaaaactgatttactggtttgcctttcagtttgttgaaatgtattgtcaagtactgtacaatgaaattgtttaaattttaatatgatttaagctttttagaaattaaatattttaaatagga

SEQ ID NO: 184941 - DNA, 1542 bp, Homo Sapiens
tacaaaaaagttggagtagctgcactaggtgattcttggagcgggcctgagagacaaggacatgtggatcccagtggtcgggcttcctcggcggctgaggctctccgccttggcgggcgctggtcgcttttgcattttagggtctgaagcggcgacgcgaaagcatttgccggcgaggaaccactgtgggctctctgactcctctccgcagctgtggcccgaaccggatttcaggaatccgccaaggaaggcgtctaaggccagcttagactttaagcgttacgtaaccgatcggagattggctgagaccctggcgcaaatctatttgggaaaaccaagtagacctccacacctactgctggagtgcaatccaggtcctggaatcctgactcaggcattacttgaagctggtgccaaagtggttgcgctcgaaagtgacaaaacttttattccacatttggagtccttaggaaaaaatctggatggaaaactacgagtgattcactgtgacttctttaaactagatcctagaagtggtggagtaataaaaccacctgctatgtcttctcgagggctctttaagaatttgggaatagaagcagttccttggacagcagacatccctttaaaagtagttggaatgttcccaagtagaggtgagaaaagggcactttggaaactcgcatatgacttgtattcctgtacttctatatataaatttggacgaatagaagtaaatatgtttattggtgaaaaagaattccagaaactaatggcagatcccggaaatccagacttgtatcatgtattaagtgttatctggcaattagcttgtgagattaaggttctgcacatggagccttggtcatcatttgatatatacacccggaaagggccgctggaaaacccaaagcgtagggaattattagaccaattacaacaaaagctgtatcttattcaaatgattcctcgtcaaaatttatttaccaagaacttaacacctatgaactataatatattttttcacttgttaaagcactgttttgggaggcgcagcgccactgtaatagaccacttacgttcattgactccacttgatgcgagagatatattgatgcaaataggaaaacaggaggatgagaaagtagttaacatgcaccctcaagacttcaaaacactttttgaaactatagagcgttccaaagattgtgcttataaatggctgtatgatgaaaccctggaagataggtagcaactagactgtcgtttttggtggagcggttcatttatttggaaactatgacatgaaaaccaaatttgaaaactcacatcctttcagcaaaaggtaactgttcttgtcttgcacaagccaggcaaatcatttctcctaagctgatatcattggcttattggatgaaacagtgtctgctattttattcacaattgaataaaatgaaaacttcaattaattgtggatttgatcagattgaattcgttttgtttcagattcctatttaaatatttcacttgtactgttgctga

SEQ ID NO: 184942 - DNA, 1438 bp, Homo Sapiens
aaatgatctatgctttaagagccagaaaactcaggctcagcaactaaaacagagaattccaaaattgtaattacaaatcagatggtaagcctaatttcatgcccctaatattcagatttgtggacactgcaagaggaaatatcatttgcttccaaatatctggcttgaatattgctgcagttaaaggatctcgctaaggttaaacaacaaacccaaaccacttagagcttcacagtttagctgctttagcaagtgaagaggtagtcggtattcaggatgctgtgggaatgcaaatgatttgattttgaggcatggctgttcctttttcactatgcccctcactctgaacaagctcatgctttcactcaatcaaaacctacttatcacagccgttctccaggttccgaacctccgtatggcagatcaaagtccataatcatttctatttataaatgccaaaatagtcattaagattatctgaggacatcacttccataggtaatttaaaggatttcttttcaggtagagcagcacttaaagcacataccttctccagtctttctgggtcaaagaataatgagcagagtccaccctgcgtttggtggtctttggtcttatgatttggggaggcaccatggatgaacagctttaaatgtaaaggtcaatgtaaacagaaattttggagttttatcttgtgcctggtatagcagcagactcccatgatgaatttcaagttaaatactgttacctaaaatgtgctgtacctcagaaaacggaattccatgtgaaaaactgtagcatacaggtatatacgagaaagcttatgttcttgcatgagaagacgttccttttccccactttattaccctgaaagaggagcattattctttattcagtggagatgactggcagcagggccccatctcctgtcatactggtcactggcataatatgtggtcagcctattcccaaactttcagttcctctaactttccccagcaacttagtttctctgccctctctcatgccatgttacgttgtaaacaaaaataagcatggggccatgtcccattcttcctcttctatgagcatcttagatatgcctaccttttaagtgattcctctttaagcaagttggctttttctctgaatgctaaaagacagtaagggagtagtgggaaatgcataaagatcttttgagggatggagggagaggagagaaagacaagtattataatctcttttcccactacccgatccacaaatatggatagagataataaattatagagataataaagtaaaaaagcttaccaagaaaatcaggattaagaagaaatctcccaactgtggcaacagatcttcagggaataaactagaaaaacctatgtcttggactttaaaaatactgtttaaaatctacctcaggaaaagccaa

SEQ ID NO: 184943 - DNA, 921 bp, Homo Sapiens
tttgatttttaaaaggcattattcagtgtacaattaacaaggaaatcagttttctactctactgtacttaggatgcttcaaaaacatcaggtgaaatgatctatgctttaagagccagaaaactcaggcctcagcaactaaaacagagaattccaaaattgtaattacaaatcagatggtaagcctaatttcatgcccctaatattcagatttgtggacactgcaagaggaaatatcatttgcttccaaatatctggcttgaatattgctgcagttaaaggatctcgctaaggttaaacaacaaacccaaaccacttagagcttcacagtttagctgctttagcaagtgaagaggtagtcggtattcaggatgctgtgggaatgcaaatgatttgattttgaggcatggctgttcctttttcactatgcccctcactctgaacaagctcatgctttcactcaatcaaaacctacttatcacagccgttctccaggttccgaacctccgtatggcagatcaaagtccataatcatttctatttataaatgccaaaatagtcattaagattatctgaggacatcacttccataggtaatttaaaggatttcttttcaggtagagcagcacttaaagcacataccttctccagtctttctgggtcaaagaataatgagcagagtccaccctgcgtttggtggtctttggtcttatgatttggggaggcaccatggatgaacagctttaaatgtaaaggtcaatgtaaacagaaattttggagttttatcttgtgcctggtatagcagcagactcccatgatgaatttcaagttaaatactgttacctaaaatgtgctgtacctcagaaaacggaattccatgtgaaaaactgtggcatacaggtccaacttttttgtacaaagt

SEQ ID NO: 184944 - DNA, 993 bp, Homo Sapiens
tacaaaaaagttggggagagttgtgcgccggtccctgggcctgagctccggctccggctggggcgcctgcgatgtctcaagatggcggagctgggcgaattaaagcacatggtgatgagtttccgggtgtctgagctccaggtgcttcttggctttgctggccggaacaagagtggacggaagcacgagctcctggccaaggctctgcacctcctgaagtccagctgtgcccctagtgtccagatgaagatcaaagagctttaccgacgacgctttccccggaagaccctggggccctctgatctctcccttctctctttgccccctggcacctctcctgtaggctcccctggtcctctagctcccattcccccaacgctgttggcccctggcaccctgctgggccccaagcgtgaggtggacatgcacccccctctgccccagcctgtgcaccctgatgtcaccatgaaaccattgcccttctatgaagtctatggggagctcatccggcccaccacccttgcatccacttctagccagcggtttgaggaagcgcactttacctttgccctcacaccccagcaagtgcagcagattcttacatccagagaggttctgccaggagccaaatgtgattataccatacaggtgcagctaaggttctgtctctgtgagaccagctgcccccaggaagattattttccccccaacctctttgtcaaggtcaatgggaaactgtgccccctgccgggttaccttcccccaaccaagaatggggccgagcccaagaggcccagccgccccatcaacatcacacccctggctcgactctcagccactgttcccaacaccattgtggtcaattggtcatctgagttcggacggaattactccttgtctgtgtacctggtgaggcagttgactgcaggaacccttctacaaaaactcagagcaaacgggtatccggaacccagaccactcgcgggcactgat

SEQ ID NO: 184945 - DNA, 2995 bp, Homo Sapiens
  misc_feature (2947)..(2955): n is a, c, g, or t
ttggcacaaaacatggtagcaggagagcagcatttccgccgggcatgtccatatccaatggggcccatgggagaggcgtagtcttctgggtcttgcccagactcaacatggcggctacacgtcgcctgtcagtctgtgaagcctaccccgggcgtgggccgcagcgtcgagtaacgtcattcgaaccccgtcgcgcccctttgtgcgtcacgggtggcgggcgcgggaaggggatttggattgttgcgcctctgctctgaagaaagtgctgtctggctccaactccagttctttcccctgagcagcgcctggaacctaacccttcccactctgtcaccttctcgatcccgccggcgctttagagccgcagtccagtcttggatccttcagagcctcagccactagctgcgatgcatgtgatcaagcgagatggccgccaagaacgagtcatgtttgacaaaattacatctcgaatccagaagctttgttatggactcaatatggattttgttgatcctgctcagatcaccatgaaagtaatccaaggcttgtacagtggggtcaccacagtggaactagatactttggctgctgaaacagctgcaaccttgactactaagcaccctgactatgctatcctggcagccaggatcgctgtctctaacttgcacaaagaaacaaagaaagtgttcagtgatgtgatggaagacctctataactacataaatccacataatggcaaacactctcccatggtggccaagtcaacattggatattgttctggccaataaagatcgcctgaattctgctattatctatgaccgagatttctcttacaattacttcggctttaagacgctagagcggtcttatttgttgaagatcaatggaaaagtggctgaaagaccacaacatatgttgatgagagtatctgttgggatccacaaagaagacattgatgcagcaattgaaacatataatcttctttctgagaggtggtttactcatgcttcgcccactctcttcaatgctggtaccaaccgcccacaactttctagctgttttcttctgagtatgaaagatgacagcattgaaggcatttatgacactctaaagcaatgtgcattgatttctaagtctgctggaggaattggtgttgctgtgagttgtattcgggctactggcagctacattgctgggactaatggcaattccaatggccttgtaccgatgctgagagtatataacaacacagctagatatgtggatcaaggtgggaacaagcgtcctggggcatttgctatttacctggagccttggcatttagacatctttgaattccttgatttaaagaagaacacaggaaaggaagagcagcgtgccagagatcttttctttgctctttggattccggatctcttcatgaaacgagtggagactaatcaggactggtctttgatgtgtccaaatgagtgtcctggtctggatgaggtttggggagaggaatttgagaaactatatgcaagttatgagaaacaaggtcgtgtccgcaaagttgtaaaagctcagcagctttggtatgccatcattgagtctcagacggaaacaggcaccccgtatatgctctacaaagattcctgtaatcgaaagagcaaccagcagaacctgggaaccatcaaatgcagcaacctgtgcacagaaatagtggagtacaccagcaaagatgaggttgctgtttgtaatttggcttccctggccctgaatatgtatgtcacatcagaacacacatacgactttaagaagttggctgaagtcactaaagtcgttgtccgaaacttgaataaaattattgatataaactactatcctgtaccagaggcatgcctatcaaataaacgccatcgccccattggaattggggtacaaggtctggcagatgcttttatcctgatgagatacccttttgagagtgcagaagcccagttactgaataagcagatctttgaaactatttattatggtgctctggaagccagctgtgaccttgccaaggagcagggcccatacgaaacctatgagggctctccagttagcaaaggaattcttcagtatgatatgtggaatgttactcctacagacctatgggactggaaggttctcaaggagaagattgcaaagtatggtataagaaacagtttacttattgccccgatgcctacagcttccactgctcagatcctggggaataatgagtccattgaaccttacaccagcaacatctatactcgcagagtcttgtcaggagaatttcagattgtaaatcctcacttattgaaagatcttaccgagcggggcctatggcatgaagagatgaaaaaccagattattgcatgcaatggctctattcagagcataccagaaattcctgatgacctgaagcaactttataaaactgtgtgggaaatctctcagaaaactgttctcaagatggcagctgagagaggtgctttcattgatcaaagccaatctttgaacatccacattgctgagcctaactatggcaaactcactagtatgcacttctacggctggaagcagggtttgaagactgggatgtattatttaaggacaagaccagcagctaatccaatccagttcactctaaataaggagaagctaaaagataaagaaaaggtatcaaaagaggaagaagagaaggagaggaacacagcagccatggtgtgctctttggagaatagagatgaatgtctgatgtgtggatcctgaggaaagacttggaagagaccagcatgtcttcagtagccaaactacttcttgagcatagataggtatagtgggtttgcttgaggtggtaaggctttgctggaccctgttgcaggcaaaaggagtaattgatttaaagtactgttaatgatgttaatgannnnnnnnnaaactcatatattgggattttcaccaaaataatgcttttg

SEQ ID NO: 184946 - DNA, 2332 bp, Homo Sapiens
ttggcaaaaaaagagtgtcagacttgtacattctctcattgcctcgtgcctgatctgaagtctgcacgaagacccgccttcacggcttagctggtaagcatgtgctttgtttcctgtctagtgtgtactgtaagcacggtcacctgtgtcccatcgacaccggcctcatcgagaagaatatcgaactcttcttttctggttcagcaaaaccaatctatgatgatgacccatctcttgaaggtggtgttaatggcaaaaatcttggccccataaatgaatggtggatcactggctttgatggaggtgaaaaggccctcatcggcttcagcacctcatttgccgaatacattctgatggatcccagtcccgagtatgcgcccatatttgggctgatgcaggagaagatctacatcagcaagattgtggtggagttcctgcagagcaattccgactcgacctatgaggacctgataaacaagatcgagaccacggttcctccttctggcctcaacttgaaccgcttcacagaggactccctcctgcgacacgcgcagtttgtggtggagcaggtggagagttatgacgaggccggggacagtgatgagcagcccatcttcctgacgccctgcatgcgggacctgatcaagctggctggggtcacgctgggacagaggcgagcccaggcgaggcggcagaccatcaggcattctaccagggagaaggacaggggacccacgaaagccaccaccaccaagctggtctaccagatcttcgatactttcttcgcagagcaaattgaaaaggatgacagagaagacaaggagaacgcctttaagcgccggcgatgtggcgtctgtgaggtgtgtcagcagcctgagtgtgggaaatgtaaagcctgcaaggacatggttaaatttggtggcagtggacggagcaagcaggcttgccaagagcggaggtgtcccaatatggccatgaaggaggcagatgacgatgaggaagtcgatgataacatcccagagatgccgtcacccaaaaaaatgcaccaggggaagaagaagaaacagaacaagaatcgcatctcttgggtcggagaagccgtcaagactgatgggaagaagagttactataagaaggtgtgcattgatgcggaaaccctggaagtgggggactgtgtctctgttattccagatgattcctcaaaaccgctgtatctagcaagggtcacggcgctgtgggaggacagcagcaacgggcagatgtttcacgcccactggttctgcgctgggacagacacagtcctcggggccacgtcggaccctctggagctgttcttggtggatgaatgtgaggacatgcagctttcatatatccacagcaagtgaaagtcatctacaaagctctctccgaaaactgggccatggagggaggcatggatcctcgagtctctgctggagggggacgacgggaagacctacttctaccagctgtggtatgatcaagactacgcgagattcgagtcccctccaaaaacccagccaacagaggacaacaagttcaaattctgtgtgagctgtgcccgtctggctgagatgaggcaaaaagaaatccccagggtcctggagcagctcgaggacctggatagccgggtcctctactactcagccaccaagaacggcatcctgtaccgagttggtgatggtgtgtacctgccccctgaggccttcacgttcaacatcaagctgtccagtcccgtgaaacgcccacggaaggagcccgtggatgaggacctgtacccagagcactaccggaaatactccgactacatcaaaggcagcaacctggatgcccctgagccctaccgaattggccggatcaaagagatcttctgtcccaagaagagcaacggcaggcccaatgagactgacatcaaaatccgggtcaacaagttctacaggcctgagaacacccacaagtccactccagcgagctaccacgcagacatcaacctgctctactggagcgacgaggaggccgtggtggacttcaaggctgtgcagggccgctgcaccgtggagtatggggaggacctgcccgagtgcgtccaggtgtactccatgggcggccccaaccgcttctacttcctcgaggcctataatgcaaagagcaaaagctttgaagatcctcccaaccatgcccgtagccctggaaacaaagggaagggcaagggaaaagggaaggggcaagcccaagtcccaagcctgtgagccgagcgagccagagatagagatcaagctgcccagctgcggaccctggatgtgttttctggctg

SEQ ID NO: 184947 - DNA, 269 bp, Homo Sapiens
  misc_feature (180)..(217): n is a, c, g, or t
ttggctaccttgctcctacttggctctaagtcaacatgagtcgacagtttagttccaggtctgggtaccgaagtggagggggcttcagctctggctctgctgggatcatcaactaccagcgcaggaccaccagcagctccacacgccgcagtggaggaggtggtgggagattttcaagcnnnnnnnnnnnnnnnnnnnnnnnnnnnnnnnnnnnnnnatttggaagtcggagtcttgttaaccttggtggcagtaaaagcatctccata

SEQ ID NO: 184948 - DNA, 1094 bp, Homo Sapiens
ttgggtatgataagaacaggagcataaaatgtttgggtttgactcttgaggaaagcaactctgatcatgtttttctttccagaattgtggtggttttggactccatgattaaggtgttcacattcacacacaatccccatcagttgcacgtcttcgaaacctgctataaccccaaaggcctctgtgtcctttgtcccaatagtaacaactccctcctggcctttccgggcacgcacacgggccatgtgcagcttgtggacctggccagcacggagaagccacccgtggacattcctgcacacgagggtgtcctgagctgcattgcactcaacctgcagggaacaagaattgcaactgcatccgagaaagggacgcttataagaatatttgatacttcatcagggcatttaatccaggaactgcgaagaggatctcaagcagccaatatttactgcatcaacttcaatcaggatgcgtccctcatctgcgtatccagcgaccacggcacagtgcatatttttgcagctgaagatccaaaaaggaataaacagtccagtttggcctcagccagtttccttccaaaatacttcagttccaagtggagtttctccaagtttcaggttccctcaggctctccgtgcatttgtgcctttggaacagagccaaacgccgtcattgcaatttgtgcagacggcagctactacaaattcctgttcaaccccaagggggagtgcatccgagatgtctacgcgcagtttctagagatgaccgatgacaagctgtgactccagctgggggcgccacagcacccaccacctgccgccttcagactctcggggctggtgccagtgccccaggggcctcctgggccacgggctggaggggctgcccagggaccttggtctcgaagccatacgtggttgtctgctttcctaaggactcccatttccagtattaaagagagaatcatcatcaaggcaccgtagtaactcagtgggctgtgaccagctcgactggcggcactggctgttcccatgagttcagctgtgacgttagcttcagtggctccggccgcatcctcacactgacggggg

SEQ ID NO: 184949 - DNA, 1693 bp, Homo Sapiens
ttggggatttgtgaatgtgagtcatttcaaaaactaacgaaaaagttttgaatctttgataatgaaacacttcactgtttttcaaaggggacgcttataagaatatttgatacttcatcagggcatttaatccaggaactgcgaagaggatctcaagcagccaatatttactgcatcaacttcaatcaggatgcgtccctcatctgcgtatccagcgaccacggcacagtgcatatttttgcagctgaagatccaaaaaggaataaacagtccagtttggcctcagccagtttccttccaaaatacttcagttccaagtggagtttctccaagtttcaggttccctcaggctctccgtgcatttgtgcctttggaacagagccaaacgccgtcattgcaatttgtgcagacggcagctactacaaattcctgttcaaccccaagggggagtgcatccgagatgtctacgcgcagtttctagagatgaccgatgacaagctgtgactccagctgggggcgccacagcacccaccacctgccgccttcagactctcggggctggtgccagtgccccaggggcctcctgggccacgggctggaggggctgcccagggaccttggtctcgaagccatacgtggttgtctgctttcctaaggactcccatttccagtattaaagagagaatcatcatcaaggcaccgtaggtaactcagtggctgtgaccagctcgactggcggccactggctgttcccatgagttcagctgtgacgttagcttcagtggctccgccgcatcctcacactgacgggggctccatacggacctggggactgggctgagagggtggacgagttcaggtttgtttttgcagcagattccgtcgttcttactgagtctgcagcgggggagtgaacaagtgtgcagatgtaagttcttacatgataagcagattgaatacaacaccagcagcttgccttagaaaaggagaaaggaattccttttcccgcccgaacatgaagaaaaacgacctgaccctgtagagagaacacagtgtgaatgtttcccctcgtgtgagcccagcctgtggtcttctccgtacccgcaacgtggtcatctgtgcccgtgacgtcacctgtgcccgtgcgtggcgtccccgtctccgttggggccattagaatgaggcagacaccaggccactctagaagccgagccgtcacacctcaggcgtgtgcggggcggggacggggggtctcctggttacattttggattaaacctgtttcccggttatgtgtagggaacagcagagtgatgcacgaactttgaacattcgttatggggaaaacatcctttaacttcggggtcgtctgccagagcagggtctgggagggtccatgcatttcccgctggtgtggagggaaatgccctggtctggcctccgagcccccaggtccaccgtctcccctcccctcatttgtaagaatagctacacactaacattttgggaaggagaggcacataactttttttaacatttggtaactaggttatgggctctacattgtcagctacttgggatatatatttaattttcttaaattcccgttaaactctattttatggttttgatttcagattgcaaacatgtaaaacctgcttagcagcgagttctccggttttgccggtttcttt

SEQ ID NO: 184950 - DNA, 2136 bp, Homo Sapiens
  misc_feature (1872)..(1906): n is a, c, g, or t
actttgtacaaaaaagttggctaagaagcagcaacaacagcagagttgattaagaaaaatgaagaaaaaacgcaaaaagagaacacatgtagaaggtggtggatgcttcctagatgtcgatgctgggggcagtgctttccataaccaccactgtgtagttgcagaaagccctagatgtaatgatagtgtaatcattttgaattgtatgcattattatatcaaggagttagatatcttgcatgaatgctctcttctgtgtttaggtattctctgccactcttgctgtgaaattgaagtgcatgtagaaaaaaccttttactatatgaaactttacaacacttgtgaaagcaactcaatttggtttatgcacagtgtaatatttctccaagtatcatccaaaattccccacagacaaggctttcgtcctcattaggtgttggcctcagcctaaccctctaggactgttctattaaattgctgccagaattttacatccagttacctccactttctagaacatattctttactaatgttattgaaaccaatttctacttcatactgatgtttttggaaacagcaattaaagtttttcttccatgagttgagtccttaagaaaatgattccagttactcattttgcatatttgctattttaacattattggaccctgcatttatagtcctttgatttcttccctctccctggtgtctcccccaagaccccaaataaagcaatacactgttaacactgtgggtttatatactaattctataccccagatggggaatgggggagatggtccctgggcttaatattctttaaagggcatgggaatttagcctctcttttattgtaatgtgctcttttggaaaatagttggttagcagggaagacccagagttgtagattgagattagggtgtactggctgaactgtggaaaacatacaattctgtgttcctcagtaaatgagattagcgtctaatgagtagcacccctttactaacttagtagtagtataaaatcatttttatttagttaattaccagagagatttagcataattttgttctggattcagtaaatcaagtcagcttggatcattcaccttaacttttcctttagcagccatttccactagtttccattaagtagtgttctataaactttgatccaaagcagaatcaatgtcttttccatctcgtgacttaaagttctgtgactgtgatgcatgtgagtgttccgacttcatctgttcctcttaactacggtgtttcccttaccatggcattcataggatgaaatgaatgactgcccagaatgagaatttgtccagattattcagataaacatcataaagcagaatacattataaataagtagaatatgaataaatagaataataaaattccaaaatactcaatgggaaatgactagtaatataggctttcaagagttggtaccttttagctatatttgcagattctctgggattttaaggaactgagaaaacagcaaagttgactaaattttatatttcttgtcctctaaatattttgataatttctggattgatgcagtgatgtttttgttccttccgtatttataaatgaaacacctttttttagtgtttctaaacctaaaatctacttggtttgaaatcaagtggttggaacactgtttgacttttatttgaagcatgttgttgattgaaaatttcattgaggaagttttcaatcagtgtgatcagtttgattctgtaatgagcacagcacctaatattttgaggagctctgttttgaggaccaatgcttaaggtggactttgttcgtaaacaatatcccaatagatttgttgacttgaggtctgnnnnnnnnnnnnnnnnnnnnnnnnnnnnnnnnnnnccaatagaattaagaattctaatgttgaaaaactgcacaaatttttatgggacaaagcctagaaaagagaaatgtagtttgaatcataatctaaatcatcgtatgatagaagagggaaagttttggtgccataatttctcctttcactggtgttggacttaaatcagttgaaatgtatttctgtaccacaatatacgcttcaataaaagtttaattgtctagtgacattc

SEQ ID NO: 184951 - DNA, 518 bp, Homo Sapiens
  misc_feature (313)..(374): n is a, c, g, or t
ctttgtacaaaaaagttgggcagtgatgttcttgttccttccgtatttataaatgaaacacctttttttagtgtttctaaacctaaaatctacttggtttgaaatcaagtggttggaacactgtttgacttttatttgaagcatgttgttgattgaaaatttcattgaggaagttttcaatcagtgtgatcagtttgattctgtaatgagcacagcacctaatattttgaggagctctgttttgaggaccaatgcttaaggtggactttgttcgtaaacaatatcccaatagatttgttgacttgaggtctgnnnnnnnnnnnnnnnnnnnnnnnnnnnnnnnnnnnnnnnnnnnnnnnnnnnnnnnnnnnnnnaaaaactgcacaaatttttatgggacaaagcccacaaaagagaaatgtagtttgaatcataatctaaatcatcgtatgatagaagagggaaagttttggtgccataatttctcctttcactggtgttggacttaaatcagttga

SEQ ID NO: 184952 - DNA, 2156 bp, Homo Sapiens
  misc_feature (128)..(187): n is a, c, g, or t
ttggcgacattagctagcgctcgctctactctctctaacgggaaagcagcggaatacaagagactgaactgtatctgcctctatttccaaaagactcacgttcaactttcgctcacacaaagccgggnnnnnnnnnnnnnnnnnnnnnnnnnnnnnnnnnnnnnnnnnnnnnnnnnnnnnnnnnnnnggaacctgaactttagtaacacagctggaacaatccgcagcggcggcggcagcggcgggagaagaggtttaatttagttgattttctgtggttgttggttgttcgctagtctcacggtgatggaagctgcacattttttcgaagggaccgagaagctgctggaggtttggttctcccggcagcagcccgacgcaaaccaaggatctggggatcttcgcactatcccaagatctgagtgggacatacttttgaaggatgtgcaatgttcaatcataagtgtgacaaaaactgacaagcaggaagcttatgtactcagtgagagtagcatgtttgtctccaagagacgtttcattttgaagacatgtggtaccaccctcttgctgaaagcactggttcccctgttgaagcttgctagggattacagtgggtttgactcaattcaaagcttcttttattctcgtaagaatttcatgaagccttctcaccaagggtacccacaccggaatttccaggaagaaatagagtttcttaatgcaattttcccaaatggagcagcatattgtatgggacgtatgaattctgactgttggtacttatatactctggatttcccagagagtcgggtaatcagtcagccagatcaaaccttggaaattctgatgagtgagcttgacccagcagttatggaccagttctacatgaaagatggtgttactgcaaaggatgtcactcgtgagagtggaattcgtgacctgataccaggttctgtcattgatgccacaatgttcaatccttgtgggtattcgatgaatggaatgaaatcggatggaacttattggactattcacatcactccagaaccagaattttcttatgttagctttgaaacaaacttaagtcagacctcctatgatgacctgatcaggaaagttgtagaagtcttcaagccaggaaaatttgtgaccaccttgtttgttaatcagagttctaaatgtcgcacagtgcttgcttcgccccagaagattgaaggttttaagcgtcttgattgccagagtgctatgttcaatgattacaattttgtttttaccagttttgctaagaagcagcaacaacagcagagttgattaagaaaaatgaagaaaaaacgcaaaaagagaacacatgtagaaggtggtggatgctttctagatgtcgatgctgggggcagtgctttccataaccaccactgtgtagttgcagaaagccctagatgtaatgatagtgtaatcattttgaattgtatgcattattatatcaaggagttagatatcttgcatgaatgctctcttctgtgtttaggtattctctgccactcttgctgtgaaattgaagtgcatgtagaaaaaaccttttactatatgaaactttacaacacttgtgaaagcaactcaatttggtttatgcacagtgtaatatttctccaagtatcatccaaaattccccacagacaaggctttcgtcctcattaggtgttggcctcagcctaaccctctaggactgttctattaaattgctgccagaattttacatccagttacctccactttctagaacatattctttactaatgttattgaaaccaatttctacttcatactgatgtttttggaaacagcaattaaagtttttcttccatgagttgagtccttaagaaaatgattccagttactcattttgcatatttgctattttaacattattggaccctgcatttatagtcctttgatttcttccctctccctggtgtctcccccaagaccccaaataaagcaatacactgttaacactgtgggtttatatactaattctataccccagatggggaatgggggagatggtccctgggcttaatattctttaaagggcatgggaatttagcctctcttttattgtaatgtgctcttttggaaaatagttggttagcagggaa

SEQ ID NO: 184953 - DNA, 1539 bp, Homo Sapiens
  misc_feature (44)..(52): n is a, c, g, or t
  misc_feature (436)..(462): n is a, c, g, or t
  misc_feature (965)..(993): n is a, c, g, or t
ttggcttaggactctgcattaactctataatgttcttggtattnnnnnnnnngcatatttgtcacagaaatttagttaacatcttacaactgaacatgtatgtatgttgcttagataaatgtaatcactgtaaacatctatatgatctgggattttgtttttattttgaaatgggagcttttttgtttacaagttcattaaaaactaaaaactgtttctgtaaggaaatgagattttttttaaacaacaaaaaatgccttgctgactcactattaaataaaaatctccccaattttttgatagactacttcattccatttgttacatggtattcctttgcaagtcaatttaggtttcgtgttataacttttcctctttttttaagaaaaatgaaaaaagtaattcttttgtctgaaggggaaaggcattctttcannnnnnnnnnnnnnnnnnnnnnnnnnnatgacttgcaggcacaatatctagtactgcaactgccaaaacttggtattgtagctgctgcccgctgactagcagctggactgattttgaataaaaatgaaagcattaaagggtttccctacaaaacatttttctttaaaatacttttgaaatggctataagcagttgactttcacccttggagagcatcacactgtgtgaggttcagtgattgttgaccctccccagcccctcctgcttctttaagttatctgtgtgcgtgcgcttcctctcaatcttctttgcacgctcatttctttttctctgacccatgagaaaggaaaacttactgatgataatttttaaatagtgtaatttattcatttatagcatgtcaggataaattaaaagaacatttgtctggaaatgctgccgggagcctattgtgtaaatgtaggtattttgtaaaataaccttgaaattgtaaattgacacgtgtttggtcagattgtgtcaagtttaannnnnnnnnnnnnnnnnnnnnnnnnnnnnatttgaaaactactttagcaataattaattccatgattatcacattctgccattaagggatattagtaccgtaatactgaagaaattttattaagtctgaacttctggggtaggcagcttctttgtttcttttctatccacccttgtcggttgaggtatttgtttcttgactaataaaccctttgatacttttagccagaaatcagtctcataaagctatttttgagtatagtttgtgtaaaataaaaatgtttagctttggtaataacttccaagctgaactccctctagcaagatatttttcagtgcttttatttactatgcacttagactatgcactttttctgaaatatttttgtaacacttttttgtatttttgccatttgaaaaggttgtggtgtagttggtctgtaattaagttgcagatttaaaactgctgttagctttgtaaatcaaaatataggtgttttttgtcctggtatatcgtcattccatctgcagctgggagctggaatcccattgatcttctagctaccattcattttc

SEQ ID NO: 184954 - DNA, 1622 bp, Homo Sapiens
  misc_feature (154)..(162): n is a, c, g, or t
  misc_feature (546)..(572): n is a, c, g, or t
  misc_feature (1075)..(1103): n is a, c, g, or t
ttggcaaagattccagtgtttgagcatatgaaagactctgcctgcttaattgtgctagaaataacagcatctaaagtgaagacttaagaaaaacttagtgactactagattatccttaggactctgcattaactctataatgttcttggtattnnnnnnnnngcatatttgtcacagaaatttagttaacatcttacaactgaacatgtatgtatgttgcttagataaatgtaatcactgtaaacatctatatgatctgggattttgtttttattttgaaatgggagcttttttgtttacaagttcattaaaaactaaaaactgtttctgtaaggaaatgagattttttttaaacaacaaaaaatgccttgctgactcactattaaataaaaatctccccaattttttgatagactacttcaagccatttgttacatggtattcctttgcaagtcaatttaggtttcgtgttataacttttcctctttttttaagaaaaatgaaaaaagtaattcttttgtctgaaggggaaaggcattctttcannnnnnnnnnnnnnnnnnnnnnnnnnnatgacttgcaggcacaatatctagtactgcaactgccagaacttggtattgtagctgctgcccgctgactagcagctggactgattttgaataaaaatgaaagcattaaagggtttccctacaaaacatttttctttaaaatacttttgaaatggctataagcagttgactttcacccttggagagcatcacactgtgtgaggttcagtgattgttgaccctccccagcccctcctgcttctttaagttatctgtgtgcgtgcgcttcctctcaatcttctttgcacgctcatttctttttctctgacccatgagaaaggaaaacttactgatgataatttttaaatagtgtaatttattcatttatagcatgtcaggataaattaaaagaacatttgtctggaaatgctgccgggagcctattgtgtaaatgtaggtattttgtaaaataaccttgaaattgtaaattgacacgtgtttggtcagattgtgtcaagtttaannnnnnnnnnnnnnnnnnnnnnnnnnnnnatttgaaaactactttagcaataattaattccatgattatcacattctgccattaagggatattagtaccgtaatactgaagaaattttattaagtctgaacttctggggtaggcagcttctttgtttcttttctatccacccttgtcggttgaggtatttgtttcttgactaataaaccctttgatacttttagccagaaatcagtctcataaagctatttttgagtatagtttgtgtaaaataaaaatgtttagctttggtaataacttccaagctgaactccctctagcaagatatttttcagtgcttttatttactatgcacttagactatgcactttttctgaaatatttttgtaacacttttttgtatttttgccatttgaaaaaggttgtgggtgtagttggtctgtaattaagtttgcagatttaaaactgctgtttagctttgtaaatcaaaatataggtgttttttgtcctgggtatatcgtcattccatctgcagctgggagctggga

SEQ ID NO: 184955 - DNA, 1540 bp, Homo Sapiens
  misc_feature (88)..(96): n is a, c, g, or t
  misc_feature (480)..(504): n is a, c, g, or t
  misc_feature (1007)..(1035): n is a, c, g, or t
ttggctaaagtgaagacttaagaaaaacttagtgactactagattatccttaggactctgcattaactctataatgttcttggtattnnnnnnnnngcatatttgtcacagaaatttagttaacatcttacaactgaacatgtatgtatgttgcttagataaatgtaatcactgtaaacatctatatgatctgggattttgtttttattttgaaatgggagcttttttgtttacaagttcattaaaaactaaaaactgtttctgtaaggaaatgagattttttttaaacaacaaaaaatgccttgctgactcactattaaataaaaatctccccaattttttgatagactacttcaagccatttgttacatggtattcctttgcaagtcaatttaggtttcgtgttataacttttcctctttttttaataaaaatgaaaaaagtaattcttttgtctgaaggggaaaggcattctttcannnnnnnnnnnnnnnnnnnnnnnnnatgacttgcaggcacaatatctagtactgcaactgccaaaacttggtattgtagctgctgcccgctgactagcagctggactgattttgaataaaaatgaaagcattaaagggtttccctacaaaacatttttctttaaaatacttttgaaatggctataagcagttgactttcacccttggagagcatcacactgtgtgaggttcagtgattgttgaccctccccagcccctcctgcttctttaagttatctgtgtgcgtgcgcttcctctcaatcttctttgcacgctcatttctttttctctgacccatgagaaaggaaaacttactgatgataatttttaaatagtgtaatttattcatttatagcatgtcaggataaattaaaagaacatttgtctggaaatgctgccgggagcctattgtgtaaatgtaggtattttgtaaaataaccttgaaattgtaaattgacacgtgtttggtcagattgtgtcaagtttaannnnnnnnnnnnnnnnnnnnnnnnnnnnnatttgaaaactactttagcaataattaattccatgattatcacattctgccattaagggatattagtaccgtaatactgaagaaattttattaagtctgaacttctggggtaggcagcttctttgtttcttttctatccacccttgtcggttgaggtatttgtttcttgactaataaaccctttgatacttttagccagaaatcagtctcataaagctatttttgagtatagtttgtgtaaaataaaaatgtttagctttggtaataacttccaagctgaactctctctagcaagatatttttcagtgcttttatttactatgcacttagactatgcactttttctgaaatatttttgtaacacttttttgtatttttgccatttgaaaaggttgtggtgtagttgggtctgtaattaagttgcagatttaaaactgctgttagctttgtaatcaaaatataagtgttttttgtcctggtatatcgtcattccatctgcagctgg

SEQ ID NO: 184956 - DNA, 1697 bp, Homo Sapiens
  misc_feature (1529)..(1537): n is a, c, g, or t
ttggattaagtaatagctttttgtaatatcctctcttctccttttgtttcgttaggtggtatggtcaggaaaaagactacaatgtactagtcatggatcttctgggacctagcctcgaagacctcttcaatttctgttcaagaaggttcacaatgaaaactgtacttatgttagctgaccagatgatcagtagaattgaatatgtgcatacaaagaattttatacacagagacattaaaccagataacttcctaatgggtattgggcgtcactgtaataagttattccttattgattttggtttggccaaaaagtacagagacaacaggacaaggcaacacataccatacagagaagataaaaacctcactggcactgcccgatatgctagcatcaatgcacatcttggtattgagcagagtcgccgagatgacatggaatcattaggatatgttttgatgtattttaatagaaccagcctgccatggcaagggctaaaggctgcaacaaagaaacaaaaatatgaaaagattagtgaaaagaagatgtccacgcctgttgaagttttatgtaaggggtttcctgcagaatttgcgatgtacttaaactattgtcgtgggctacgctttgaggaagccccagattacatgtatctgaggcagctattccgcattcttttcaggaccctgaaccatcaatatgactacacatttgattggacaatgttaaagcagaaagcagcacagcaggcagcctcttccagtgggcagggtcagcaggcccaaacccccacaggcaagcaaactgacaaaaccaagagtaacatgaaaggtttctaagcatgaattgaggaacagaagaagcagagcagatgatcggagcagcatttgtttctccccaaatctagaaattttagttcatatgtacactagccagtggttgtggacaaccatttacttggtgtaaagaacttaatttcagtataaactgactctgggcagcattggtgatgctgtatcctgagttgtagcctctgtaattgtgaatattaactgagatagtgaaacatggtgtccggttttctattgcattttttcaagtggaaaagttaactaaatggttgacacacaaaaattggtggagaaattgtgcatatgccaattttttgttaaaaccttttgttttgaactatactgctttgagatctcatttcagaagaacggcatgaacagtcttcagccacagttgtgatggttgttaaatgctcacaattgtgcattcttagggtttttccatccctggggtttgcaagttgttcacttaaaacattcttaaaatggttggcttcttgtctgcaagccagctgatatggtagcaaccaaagattccagtgtttgagcatatgaaagactctgcctgcttaattgtgctagaaataacagcatctaaagtgaagacttaagaaaaacttagtgactactagattatccttaggactctgcattaactctataatgttcttggtattnnnnnnnnngcatatttgtcacagaaatttagttaacatcttacaactgaacatgtatgtatgttgcttagataaatgtaatcactgtaaacattctatatgatctgggattttgtttttattttgaaatgggagcttttttgtttacaagttcattaaaaactaaaaa

SEQ ID NO: 184957 - DNA, 1662 bp, Homo Sapiens
  misc_feature (1093)..(1101): n is a, c, g, or t
  misc_feature (1485)..(1510): n is a, c, g, or t
actttgtacaaaaaagttggcgccgagatgacatggaatcattaggatatgttttgatgtattttaatagaaccagcctgccatggcaagggctaaaggctgcaacaaagaaacaaaaatatgaaaagattagtgaaaagaagatgtccacgcctgttgaagttttatgtaaggggtttcctgcagaatttgcgatgtacttaaactattgtcgtgggctacgctttgaggaagccccagattacatgtatctgaggcagctattccgcattcttttcaggaccctgaaccatcaatatgactacacatttgattggacaatgttaaagcagaaagcagcacagcaggcagcctcttccagtgggcagggtcagcaggcccaaacccccacaggtttctaagcatgaattgaggaacagaagaagcagagcagatgatcggagcagcatttgtttctccccaaatctagaaattttagttcatatgtacactagccagtggttgtggacaaccatttacttggtgtaaagaacttaatttcagtataaactgactctgggcagcattggtgatgctgtatcctgagttgtagcctctgtaattgtgaatattaactgagatagtgaaacatggtgtccggttttctattgcattttttcaagtggaaaagttaactaaatggttgacacacaaaaattggtggagaaattgtgcatatgccaattttttgttaaaaccttttgttttgaactatactgctttgagatctcatttcagaaaaacggcatgaacagtcttcagccacagttgtgatggttgttaaatgctcacaattgtgcattcttagggtttttccatccctggggtttgcaagttgttcacttaaaacattcttaaaaatgggttggcttcttgtctgcaacccagctgatatggtagcaaccaaagattccagtgtttgagcatatgaaagactctgcctgcttaattgtgctagaaataacagcatctaaagtgaagacttaagaaaaacttagtgactactagattatccttaggactctgcattaactctataatgttcttggtattnnnnnnnnngcatatttgtcacagaaatttagttaacatcttacaactgaacatgtatgtatgttgcttagataaatgtaatcactgtaaacatctatatgatctgggattttgtttttattttgaaatgggagcttttttgtttacaagttcattaaaaactaaaaactgtttctgtaaggaaatgagattttttttaaacaacaaaaaatgccttgctgactcactattaaataaaaatctccccaattttttgatagactacttcaagccatttgttacatggtattcctttgcaagtcaatttaggtttcgtgttataacttttcctctttttttaagaaaaatgaaaaaagtaattcttttgtctgaaggggaaaggcattctttcannnnnnnnnnnnnnnnnnnnnnnnnnatgacttgcaggcacaatatctagtactgcaactgccagaacttggtattgtagctgctgcccgctgactagcagctggactgattttgaataaaaatgaaagcattaaagggtttccctacaaaacatttttcttttaaaatactttttga

SEQ ID NO: 184958 - DNA, 2543 bp, Homo Sapiens
  misc_feature (1156)..(1456): n is a, c, g, or t
ttggcttaattttgcaaaagctcttataaaatcaaaacagtaagtactgctcttttgtttgttcattgtcttgaacattgtgggttgaagctttcctggaggacttgggattgcaagggtaggtccagatatgtgaatgtctctcttctacatgttgataaaatgtttttggtgggtctaaggaggaagacaccttgacatatttaattaacaggaaagtttctggcaacttgaagtttatatagattttagtaatttgtgctaaggtttctcttttgacctgcatcactacactctctttcagggtgccacttagttgttagctatattattttcctgttaaaatttcatgttagaaatttagggctttaatatatttgctattcttacagattatgtattcttttagatagaaatttactgctcctccctgtttttatatttgtttttggaattcaacttctgatatgaatatttttttccttaaacataaggctttggcagctcaagtacatctgggtttaacttcagcaatcctggcatcacggcatcagctggtttgacttttggggtgtccaatcctgcctctgcaggttttggaacaggaggacaactccttcagttgaagaaacctccagctggaaacaaaagaggaaaaagataaacatgggttgatgtgttgagagaatccatagcagcaccgttcattctatgagtctatttttctaatgatgcagtaattaaattgcatcccaggagatttataaagttttgatatttttccctactctggaatttgaactttcttcatgtttgccatactgaacatcttttttcttgtggaatttaaagtccagctgtgttttctttttaatttgattctcagtgtaagaaatgttctgattacatcactgattggtaatggttagaaaccattaacctaaaacttactatttaacctagtgtttttgttgatgaggtttacattatgtgaatacatgcacatttgtttcttatacaggtggtgtgaactctagggcctatactagaatcaatttgttccttgttaaaggccttttgaattatactgcagggcatcttgtgaatatgtatgtaaatatatacagaataatacacacagttgtgtgtgcatatnnnnnnnnnnnnnnnnnnnnnnnnnnnnnnnnnnnnnnnnnnnnnnnnnnnnnnnnnnnnnnnnnnnnnnnnnnnnnnnnnnnnnnnnnnnnnnnnnnnnnnnnnnnnnnnnnnnnnnnnnnnnnnnnnnnnnnnnnnnnnnnnnnnnnnnnnnnnnnnnnnnnnnnnnnnnnnnnnnnnnnnnnnnnnnnnnnnnnnnnnnnnnnnnnnnnnnnnnnnnnnnnnnnnnnnnnnnnnnnnnnnnnnnnnnnnnnnnnnnnnnnnnnnnnnnnnnnnnnnnnnnnnnnnnnnnnnnnnnnnntgaaaataaaataaaatatatatttacaggcctacaacttttgcctcagactgttccccttttctaagggtattcaagttttcaccttttaagcttcatatcctcagtgcttgtagaatgatgagcttagaggtaccaggtcattgcagttgtttgcttaaagacttattgaaatggttactggcgtaaatacttggccaactcaactttattgcccctgatcttttccatttttgtttccaccttaacctatagcagctcctccaaatgaggaatgctgtaagtaagactcatcaaacagattttaaccattttattatcctgtgtgtccttacattgcttctgtgagatgtttttttcttatctgagatgaactttcaggagcctatttgaactccagactggtgttctggggcaaagagctattagccaaactgattctatgcaggtgaaggatgcactaaagttctcactttagtgagaacttttctagctattccaatacagagttctttcttatagggctattgatattgacaccaaatggagtggcttctcagcctcttaatgtcttaagtaagtgcttaatttggaatagagaaaccagtatattttaaaaaagaaaaatattctttgtagcaactgtaaattctcccattataacagtgaacagagctccaggtaataacgcataggcatgtcaggttgcatctgtatatttgactacattagtattagtgacatcaggtggatataaaagaaaacccttggaaagagaactgccttagccatgatttcgttagtagacctatttatgattcaattgcaattttcagataggatgtgaacatggaatttcattgaaaatagtttaattttttatataaaaggttttgtatataatgtgtgtcagtgactattttcaaaatcattttcatcaagacaccttttttctaaaataggcattgcatacacatatgcacacgtatgtgcatgtgccacacattttttgtataatgttgggtttgaatataaaagtgttgtcaaatgttttatttatctggcatatagcagtggctggcttttt

SEQ ID NO: 184959 - DNA, 733 bp, Homo Sapiens
ttggggatataaaagacctattccacaaaaaggaacgagaactgccttagccatgatttcgttagtagacctatttatgattcaattgcaattttcagataggatgtgaacatggaatttcattgaaaatagtttaattttttatataaaaggttttgtatataatgtgtgtcagtgactattttcaaaatcattttcatcaagacaccttttttctaaaataggcattgcatacacatatgcacacgtatgtgcatgtgccacacattttttgtataatgttgggtttgattataaaagtgttgtcaaatgttttatttatctgcatatagcagtggttggcttttttgaattgaaatttttgcgcattgatgcattgaaataaggaaaattatttatctctgagcactaaacttatttttgcatatttctgtaatattgcagtccccagatccagaacatgggaagttagggaaaatgtgtgattttgtgttttgaattactgtcagaattacatacacaattacaacaaactttttttaaaagacatttcattgtactgcaaaaatctgaatatttatatttcttgtttttttctttatatgttttgcattttaatatgttgagccactggaaatttgtaacagattaatttgttataggagtttaaatgtgttgtcattgtctccattgtctttgtccagagcctattattatggaaacaataaaattt

SEQ ID NO: 184960 - DNA, 1773 bp, Homo Sapiens
  misc_feature (1413)..(1422): n is a, c, g, or t
ttggcagaagtccgtgccagtgaccggaggcggcggcggcgagcggttccttgtgggctagaagaatcctgcaaaaatgtctctctatccatctctcgaagacttgaaggtagacaaagtaattcaggctcaaactgctttttctgcaaaccctgccaatccagcaattttgtcagaagcttctgctcctatccctcacgatggaaatctctatcccagactgtatccagagctctctcaatacatggggctgagtttaaatgaagaagaaatacgtgcaaatgtggccgtggtttctggtgcaccacttcaggggcagttggtagcaagaccttccagtataaactatatggtggctcctgtaactggtaatgatgttggaattcgtagagcagaaattaagcaagggattcgtgaagtcattttgtgtaaggatcaagatggaaaaattggactcaggcttaaatcaatagataatggtatatttgttcagctagtccaggctaattctccagcctcattggttggtctgagatttggggaccaagtacttcagatcaatggtgaaaactgtgcaggatggagctctgataaagcgcacaaggtgctcaaacaggcttttggagagaagattaccatgaccattcgtgacaggccctttgaacggacgattaccatgcataaggatagcactggacatgttggttttatctttaaaaatggaaaaataacatccatagtgaaagatagctctgcagccagaaatggtcttctcacggaacataacatctgtgaaatcaatggacagaatgtcattggattgaaggactctcaaattgcagacatactgtcaacatctgggactgtagttactattacaatcatgcctgcttttatctttgaacatattattaagcggatggcaccaagcattatgaaaagcctaatggaccacaccattcctgaggtttaaaattcacggcaccatggaaatgtagctgaacgtctccagtttccttctttggcaacttctgtattatgcacgtgaagccttcccggagccagcgagcatatgctgcatgaggacctttctatcttacattatggctgggaatcttactctttcatctgataccttgttcagatttcaaaatagttgtagccttatcctggttttacagatgtgaaactttcaagagatttactgactttcctagaatagtttctctactggaaacctgatgcttttataagccattgtgattaggatgactgttacaggcttagctttgtgtgaaaaccagtcacctttctcctaggtaatgagtagtgctgttcatattactttagttctatagcatacttgcatctttaacatgctatcatagtacatttagaatgattgcctttgannnnnnnnnnaaattctgtgtgtgtgtgtgtaaaatgccaattaagaacactggtttcattccatgtaagcattaaacagtgtatgtaggtttcaaagagattgtgatgattcttaaattttaactaccttcacttaatatgcttgaactgtcgccttaactatgttaagcatctagactaaaaagccaaaatataattattgctgcctttctaaaaacccaaaatgtagttctctattaacctgaaatgtacactagcccaaacagtttaatggtacttactgagctatagcatagctgcttagttgttttgagatttttaagtcaccacataatggaaacttctttccttctaaaagtt

SEQ ID NO: 184961 - DNA, 3001 bp, Homo Sapiens
ttggcgggcctagtccggactcgccgccgccgccgccatattcccgtggcatcttccttactttgtccatcctccggactcgcgatcttccttccggagccatgtcagaaggagtggacttgattgatatatatgctgacgaggagttcaaccaggacccagagttcaacaatacagatcagattgacctgtatgatgatgtgctgacagccacctcacagccctcagatgacagaagcagcagcactgaaccacctcctcctgttcgccaggagccatctcccaagcccaacaacaagacccctgcaattctgtatacctacagtggcctgcgtaatagacgagctgccgtttatgtgggcagcttctcctggcagggtcatctgagggacgagatttcagagtgaacaccttgaactcttggtggtcattagatggtcctgtgataatgtggaccacagaccagcagctgatccaggttattcgctctataggagtctatgatgtggtggagttgaaatttgcagagaatcgagcaaatggccagtccaaagggtatgctgaggtggtggtagcctctgaaaactctgtccacaaattgttggaactcctaccagggaaagttcttaatggagaaaaagtggacgtgaggccggccacccggcagaacctgtcacagtttgaggcacaggctcggaaacgaatacctccacgggcccattcccgagattctagtgattctgctgatggacgggccacaccctctgagaaccttgtaccctcatctgctcgtgtggataagccccccagtgtgctgccctacttcaatcgtcctccttcggcccttcccctgatgggtctgcccccaccaccaattccacccccaccacctctctcctcaagctttggggtccctcctcctcctcctggtatccactaccagcatctcatgcccccacctcctcgattacctcctcatcttgctgtacctccccctggggccatcccacctgcccttcacctcaatccagccttcttccccccaccaaacgctacagtggggcctccaccagatacttacatgaaggcctctgccccctataaccaccatggcagccgagattcgggccctccaccctctacagtgagtgaagccgaatttgaagatatcatgaagcgaaacagagcaatttccagcagtgccatttccaaagcagtatctggagccagtgcaggggattacagtgacgcaattgagacgctgctcacagccattgcggttatcaaacagtcccgggttgccaatgatgagcgttgccgtgtcctcatctcctctcttaaggactgtcttcatggcattgaagccaagtcctacagtgtgggtgccagtgggagctcttccaggaaaagacatcgctcccgggaaaggtcacctagccggtcccgggagagcagcaggaggcaccgggatctgcttcataatgaagatcggcatgatgattatttccaagaaaggaaccgggagcatgagagacaccgggatagagaacgggaccggcaccactgagaaaggagtctggttggaagcaaatgtttttttaatggacttgcatctcctcaccttgatcaggactaaaggacggaggccgccccacccccttccctttcctccaaacccctaactccctccagacacccagggaataccctctgccccacaggattgaagactgcttggcagtcctcccaatcccacacctcctgtttgccaggggaaagaacctaaagacttcgtgtgattgggaggggtggcagacaggaagaaaacatgtccaggcccctggtctccatagagaatggtgctttgtccaagaaaacgtatgagtttctgattctccgggagccgttcaatggtgaggttgatgggaagacttccttcccaaagaaaatagatcctccatgcaggatctaggagagtgactgggtgtgccaaaatatgcccagggtcctgccctcagcactagatttaatggggccaagagggtccaaaccccttgctaacataccacttctttgtttaactcctttacctttccagccctttgaggagggaccatgagaacagaaattaccttatgaaaagctacttctgttcctgctttccctctcacgtattgacggtttatttctttgacctcccagagggctgaactctttcaactctgcgctgcccagccttctcagtggacttgcccctcctaagcagagaaggcctatgaggttgcttgctgctgggaagcctggcagagccaattaccaccctctgctgcttagtgcttgggtacctcttgcaataaccagctcttagttgttccctttccctggggcttttccatttaacacatggagcccttcccccagaaggctacttccttgttttagaggaaggtactgcccattgggagatggggacattgggacctcagcaatgaagaacccttgtgaagtaaccaggaggaatggggaaagaagcaagttgggcaggatatggcctacttccataggcttttcttttttcaggtttgatgtaagcatgggcttacatcccccaggtacatacttttacttattgtgggataacctggcactagtaggcaggtaaagtcacaaatttggtgtcttttcaccttttgactgttgacttaatagctcctctcactctgcctggagatacttcctgcctcagatgaggagccagaagaaacagagcccgacttgaatgaactcagctcagagttctaaggaccagcattctgggggccattttctctacaggcaaatggaattgcttttccataacatccaaattgtaatgtggttgctgctgaaggaggaggcagcagcgaggtcctgcggtacccatggggtgatgctacttctgcatgcatctacagggcatctgacacctaacatgagacgtggcatgtgagatgagacttgg

SEQ ID NO: 184962 - DNA, 2226 bp, Homo Sapiens
ttgggaagtgccccaggtaggactgaaagatgcctcagtgcagactgtggccacggagggcgacctgctgagattcaagcatgaagcaacaagagaggcttgggaagagaaaccgatcaacactgcactcagcgcagagcatcggccagagaacctgcacggggtgcctgggtggcaggctgccctcctttccctccctggtattaccaacagagaggctaagaagtcccgcttgccaatcctaataaaaccatcccggtcattaggaaatatgtatcgtctccctgccacccaggaggtggtgacgcagctgcagagccagatcttggagctgcagggggagctgaaggagtttaaaacttgtaataagcaacttcaccaaaagttaattctggctgaagcagtgatggaggggaggccaacgcccgacaaaacgttgctgaatgctcagccccctgtgggagcagcctaccaggacagcccaggagagcagaaaggaattaaaaccacatcttctgtctggagagacaaggaaatggacagtgatcagcaaagaagctacgagattgactctgagatttgcccacctgatgaccttgccagcttgccatcatgcaaagaaaatcctgaagatgttctgagcccaacttcagtagctacttacctgagttccaagagtcagccttctgctaaagtcagtgtgatggggactgatcagtcagagagcattaatacctcaaatgagacagaatacttaaaacagaaaatccatgacttggaaactgagctggaaggctaccagaatttcatatttcagcttcaaaagcactcccagtgcagtgaggccataattacagttttgtgtgggacagaaggggcccaggatggcttgagcaagcccaagaatggttctgatggggaagaaatgaccttttcaagtttgcaccaagtgcgatacgtgaaacacgtgaaaatcctcggtccgctggccccagagatgattgacagcagggtgctggagaacctcaaacagcagctggaggaacaggaatacaagctgcagaaggagcagaatttgaacatgcaacttttcagtgagatccataatctgcagaataagttcagagatctctcacctcccagatacgattcattagttcagtcccaagccagggagctctcccttcaacggcagcagattaaggatggccatggcatctgtgtcatctcccgtcaacacatgaacaccatgattaaggcatttgaggagttgctgcaggccagtgatgtggattactgtgtggccgagggtttccaggaacagctgaatcaatgtgctgagctgctggagaaattggaaaagctatttctcaacggaaaatcagttggagtggaaatgaacacccagaatgaactgatggagaggattgaggaagacaacttaacctaccaacatcttctgcctgaatctcctgagccttcagcctctcatgcgctctctgattatgaaacatctgaaaagtccttcttctcacgagaccagaagcaagataatgagacagagaagacttcagttatggtgaacagtttttctcaagacttactaatggaacacatacaggaaattcgaactttgagaaagcgtttagaagaatctattaaaacaaatgagaagctacggaaacagttggaacggcaaggatctgaatttgttcaaggttctacaagcatttttgcttctggttcagagcttcatagttctctaacatcagaaattcatttcttgaggaagcagaaccaggccctcaatgcaatgctcattaaaggatccagagataaacagaaggagaatgacaaattacgagagtccctctccaggaagaccgtgagcctggagcaccttcagcgggagtatgccagcgtgaaggaagaaaatgaaaggctgcagaaagaaggcagcgagaaggagagacacaaccagcagctgatccaggaggtccgctgcagcggccaggagctgagcagggtgcagaggaggtgaagttgagcagcagctgctctcacagaatgacaagctattgcagtctctccgagtggagctgaaggcgtatgagaagctggatgaagagcacagggagactgagagaggcgtcgggagaagctggaaggggcaggatcctttcaggaactgcacagcctctgatggagatccaggctctgcgcttg

SEQ ID NO: 184963 - DNA, 1493 bp, Homo Sapiens
  misc_feature (204)..(213): n is a, c, g, or t
  misc_feature (502)..(537): n is a, c, g, or t
  misc_feature (866)..(880): n is a, c, g, or t
  misc_feature (904)..(913): n is a, c, g, or t
  misc_feature (1036)..(1055): n is a, c, g, or t
gagctgcggggcatgatggggattgctgcgtatcagcagttggatgttcttgcctctgacagtagcttatttgctctgggggccaggaattggattcagtttacactatcattaaaaaagagggagagagataataaactatattttggtggggatggtgattaaacacctcttttgggtatgccttttaaaaatgcttatagnnnnnnnnnnttttaaaaagaaagctaatgctagtatatactgcaatgttaggggaatgaacatgttttcctactgcattggggacttctaaataggttaatgaaaggccttttattctgttactggacatgaaaactttgtctaatttcttactctattgtacgtttacagtcgcagcactaaaaatggatgacatcaaacatttttaacaaaatgatgtacaaactaaggactatttattgataatgttttgctactcttgtcagacaatggctataaactgaattaggcagtcttnnnnnnnnnnnnnnnnnnnnnnnnnnnnnnnnnnnngaacgttgcaaatttgttaaaatgccaaaaaggacagtttaattttgtacagattatgcttacctcaggtttctttagtgtgcttgaatgcccttctttccatataacacttatcttcttcttaattcggcaatggaatatcttttaagttttaaaaaaactggaataattatatctatcttttttgccgtttatatttaggggtttttgttgataaaatcaagtcttggttgtggcttgctgaattaaatatttatgagtggtgcatttttaagtatagtgaacaagacaccatattaagtacagtgataaagcatctatattctgtnnnnnnnnnnnnnnntctgcctatgcatgttttttaagnnnnnnnnnntggctgtatcggcctgtatgggactgtaatgcgcttagtggtctgacatatactggaaatgtatgtatactggcgtactttatattctctaaaatgcttaatgcctttgaaattttgtaatcnnnnnnnnnnnnnnnnnnnntctaaaggggagagtattctttaaagtttttaacataagcttgtcaatgcacatgtagatggttagcatgtttagcaaaccttgtgaaattataataagtttgtagttacatgtgaaactctaaatgcatggcaactgttaatgtcataacagtttagttattttgttctgttctgtcatgtgccacaaaatatgtacttttttcacttttttccctttgtatatcagttacgggttacaactggttcattctgaaaacaacaacaacaaaagtccattcatattttttaacaattgtataagtgcccaagtaattcactacagcctaaagccttgcctttgtaatttgacttctgacatgttggcaatcaaagcatgcacttgtaacatgaaaaagaaaaagcattttatattactactcaataaaatgtgcatgaa

SEQ ID NO: 184964 - DNA, 2445 bp, Homo Sapiens
ttggccacttccaatccccagtgagggatctggctttaccaaattgcatcttgtagaaagcttactaagtagaataccttccagtaaagaaacaaataagatgaaagaacgagcaatccaaacactgggatattttccagttggggatggagattttcctcaccagaaactcctcttgcaaggtctgatggattctgtggaggagccaaagtgaatgatgtggttccatgggtgttggatgtgattttaaataaacatatcatcagccccaacccacacgtgaggcaagcagcctgcatctggctcctttcccttgtcaggaagctaagtacccacaaagaagtgaagtctcatcttaaagaaattcaaagtgcatttgtttcagttctatcagaaaatgatgaacttagccaagatgttgcatcaaagggccttgggttggtttatgaactaggcaatgaacaagatcaacaggaattggtttctacacttgtggaaacacttatgactggcaaaagagttaaacatgaagtttctggagagacagtggtatttcaagggggagctcttggcaaaacaccagatggtcagggcctttctacttacaaggaactttgttctctggcaagtgatcttagccagccagatctggtgtataaatttatgaatttagccaaccatcatgcaatgtggaactctaggaagggtgctgcttttggttttaatgtaattgctaccagagctggagagcagctggctccttttctgcctcagctagttcctcgactttatcgttaccagtttgatcccaaccttggcattcgacaggccatgacaagtatttggaatgcgttggtcactgacaaatccatggtggataaatatttgaaagaaattcttcaagatttggttaagaaccttacaagcaatatgtggcgagttcgagaatccagctgtttagctttgaatgatttattgagaggaagacccttagatgacatcattgataaacttccagaaatttgggaaacgctttttagagtacaagatgatatcaaggaatctgtacgaaaagcggcagaactagctctgaaaactctgagcaaggtctgtgtgaaaatgtgtgaccctgccaaaggagcagctggccagagaaccatcgctgcccttctgccttgccttctggacaaaggaatgatgagcaccgtgacggaagttcgagccctcagcattaacacccttgtgaagatcagcaaaagtgcaggagccatgttgaaaccgcatgcaccaaaactcattccagctctgctagagtccttaagtgtattggagccccaagttctcaattatttgagcctccgggcgacagagcaagaaaaggctgcgatggatagtgctcggcttagtgctgccaaatcttctccaatgatggaaacaatcaacatgtgcctgcaataccttgatgtgtcagtgctgggcgagctagttcctaggttgtgtgaactgatcagaagtggtgtaggtcttggaactaagggtggctgtgccagtgtcattgtgtcattaactactcagtgtcctcaggacctaacaccttactcaggtaaacttatgagtgctttgctgagtggcctgacagatcggaacagtgtgattcagaaatcttgtgcatttgctatgggccatttagttcggacctcacgggatagcagcactgaaaaactcctgcagaagctcaatgggtggtatatggagaaagaagaacctatctacaagacctcttgtgctttgactattcatgctattggacgatacagccctgatgtattaaagaatcatgcaaaagaagtcctgcctctggcatttttaggcatgcatgaaattgctgatgaggagaaatccgaaaaagaagaatgtaatttatggaccgaagtgtggcaggaaaacgtacctggatcctttggtggcattcgattatacctgcaggagttaattactattacccagaaggctttgcagtctcagtcctggaaaatgaaagcccagggtgcaattgccatggcatcaattgcaaaacagactagctctctagtacctccatatctcggaatgatactgaccgcattgctgcaaggcctggctggaagaacgtgggcaggaaaggaggagctattgaaagccattgcctgtgtggtgacagcttgcagtgcagagctggaaaagtctgtgcccaatcaacccagcacaaatgaaattcttcaagctgttctgaaggaatgtagcaaagagaatgtcaaatacaagattgtagcaatcagctgtgcagctgatatcttgaaggccaccaagaggacagattccaggagttctctaacattgtcatacctctcatcaagaagaactcacttgaaagcagtgggggtccggacacccaaaaatgaagag

SEQ ID NO: 184965 - DNA, 1395 bp, Homo Sapiens
ttggtgcttcagcagctgttagcaggtgttggaggtttgccggttatgtactgtctattggaagctgtgtcagtgtatccagaaaagctggctaccaaatttgtagacaaaacagaatggataaagagtctgatgaataacagtaaagaagaaatgcgcgaactggcagcgttgttttattctgtagtggtatcaacagtgtcggggaatgagttgaaatcaatgatagaacagcttataaagactacaaaagacaatcacagcccggagatacagcatggatccttgcttgcattgggattcacggtgggaaggtatttggctaaaaagaaaatgagaatgtcagagcaacaagacctggagagaaatgctgacaccctccctgatcaagaggaactcattcagagtgctacagaaacaataggctcatttttggacagtacatcacccctcctggcaattgctgcctgcacagccctgggtgaaattggcagaaatggtccacttccaatccccagtgagggatctggctttaccaaattgcatcttgtagaaagcttactaagtagaataccttccagtaaagaaacaaataagatgaaagaacgagcaatccaaacactgggatattttccagttggggatggagattttcctcaccagaaactcctcttgcaaggtctgatggattctgtggaggccaagcagatagaacttcagttcactattggcgaagccattaccagtgctgcaataggaactagttctgtggctgcccgagatgcctggcaaatgactgaagaggaatatactccacctgctggagccaaagtgaatgatgtggttccatgggtgttggatgtgattttaaataaacatatcatcagccccaacccacacgtgaggcaagcagcctgcatctggctcctttcccttgtcaggaagctaagtacccacaaagaagtgaagtctcatcttaaagaaattcaaagtgcatttgtttcagttctatcagaaaatgatgaacttagccaagatgttgcatcaaagggccttgggttggtttatgaactaggcaatgaacaagatcaacaggaattggtttctacacttgtggaaacacttatgactggcaaaagagttaaacatgaagtttctggagagacagtggtatttcaagggggagctcttggcaaaacaccagatggtcagggcctttctacttacaaggaaactttgttctctggcaagtgatcttagccagccagatctggtgtataaatttatgaatttagccaaccatcatgcatgtggaactctaagaagagtgctgcttttgggttttaatgtaattgcttaccagagctggaaagcagcttggctccttttctgcct

SEQ ID NO: 184966 - DNA, 1878 bp, Homo Sapiens
ttggcctcctacctgcgcacgtggtgccgccgctgctgcctcccgctcgccctgaacccagtgcctgcagccatggctcccggccagctcgccttatttagtgtctctgacaaaaccggccttgtggaatttgcaagaaacctgaccgctcttggtttgaatctggtcgcttccggagggactgcaaaagctctcagggatgctggtctggcagtcagagatgtctctgagttgacgggatttcctgaaatgttggggggacgtgtgaaaactttgcatcctgcagtccatgctggaatcctagctcgtaatattccagaagataatgctgacatggccagacttgatttcaatcttataagagttgttgcctgcaatctctatccctttgtaaagacagtggcttctccaggtgtaactgttgaggaggctgtggagcaaattgacattggtggagtaaccttactgagagctgcagccaaaaaccacgctcgagtgacagtggtgtgtgaaccagaggactatgtggtggtgtccacggagatgcagagctccgagagtaaggacacctccttggagactagacgccagttagccttgaaggcattcactcatacggcacaatatgatgaagcaatttcagattatttcaggaaacagtacagcaaaggcgtatctcagatgcccttgagatatggaatgaacccacatcagacccctgcccagctgtacacactgcagcccaagcttcccatcacagttctaaatggagcccctggatttataaacttgtgcgatgctttgaacgcctggcagctggtgaaggaactcaaggaggctttaggtattccagccgctgcctctttcaaacatgtcagcccagcaggtgctgctgttggaattccactcagtgaagatgaggccaaagtctgcatggtttatgatctctataaaaccctcacacccatctcagcggcatatgcaagagcaagaggggctgataggatgtcttcatttggtgattttgttgcattgtccgatgtttgtgatgtaccaactgcaaaaattatttccagagaagtatctgatggtataattgccccaggatatgaagaagaagccttgacaatactttccaaaaagaaaaatggaaactattgtgtccttcagatggaccaatcttacaaaccagatgaaaatgaagttcgaactctctttggtcttcatttaagccagaagagaaataatggtgtcgtcgacaagtcattatttagcaatgttgttaccaaaaataaagatttgccagagtctgccctccgagacctcatcgtagccaccattgctgtcaagtacactcagtctaactctgtgtgctacgccaagaacgggcaggttatcggcattggagcaggacagcagtctcgtatacactgcactcgccttgcaggagataaggcaaactattggtggcttagacaccatccacaagtgctttcgatgaagtttaaaacaggagtgaagagagcagaaatctccaatgccatcgatcaatatgtgactggaaccattggcgaggtgaaagacttggcattgggttctcggctgtgttaatattcagttcatccctttatgtgtaacagattttaacttcatcaccacacagagaaaaagatactttcattgaaattctatgttgtctaaaattgatcattgaaacttcttacacatttctcatgttcttctgtctcatgtaactttcttcattgtttttgacccctttctgaaaccacagtcctctgtctttttaaattgcagcctttggtgaaggttgtatatttgtactttcccctgttgaatataaccttttgatgacaggac

SEQ ID NO: 184967 - DNA, 1384 bp, Homo Sapiens
gaaccagcgggccttccaaggctttcatgaaggcccccttcttgtacagagtgccctcgtaggacctgttctcactctctgctgtctggaactggctgtacagggtgctggtgctgcggcgggcagcctgacgggagccggatgtggttgagccactactctggtcgctgtccaggctgaggctcagggtggagcccacgggcccctcctgcaggtacacacccagcgagcgacggtggtggggtgcggtggacacaaggagggagctaggggtgccacggccgtctggccggccctcgaggcgctgtgcagccttcacccggtcccaggtgtccttccagcgctcagcgggttggcccaactctgtctccagcctctgcagctcctccagcaggcgtgagatggcgtcaggctgggcccgcgggcagctgtcgtaacagggccacaccacgcggcgcctgctctggggagcgcctccatcagaccgttcttcctctgggggttcagggggcccctgggccagttcccagtcatagggagggccctcggccagcgtctcctcagtgtagaagtcccacaccttcaggttggacacgttgctgtagggccgcaggacctctgcgtcctcgggcgcatacatgtaattgtggaacacaggcgtcctcttgctcagccggtccacatactcccacacagacctgcacggcacctggcccctgcgttcccccttctcctcatacagcagccccagctcaatgcgctcatagtcagagtcgagcaggaaggtccggaaacggcgggacacatggtggtagccgaggaacttgaggtagaactggctgaactcaaactccatggggaactgcaggtggacctggtgtacgcagtccaggaactgcaggaagacgggtgtgaagccgctgctctgcccggccagggtgtgagctccacggtggctgaagcgatggccgaaggacagccactccttctccaccagcaggcgaaagccctccagcgtgcggtagaaggggtctgagagcagctgcaccaaggataccacctgggtggtgatgtcccagccatcctccaggcccaccagcacggaggagcctgaatccaggagctccaccaccagcacagacacctgcagcagcttgtggatctggatcagccactctgagtcctccagtgagcgcaggaaggaggctgggctgggctcagcagcggggcagcctgggacacatgctttcagcagcttcttgaagctagccttcacctgccgtgcctcgaatacctcaatgggcaccagctcccactgctgcagggggtctgaccgcacacccttgagctgggctttgtccccaaggatatagagggctgccaa

SEQ ID NO: 184968 - DNA, 2998 bp, Homo Sapiens
ttggagaaaggagaggaggaaagtggagcctggcgggccggagggaggaagggaaggggcggaggccaggggcagagtgtgccggcgcgcgggggggtctcggcgctgggcgcgtctcggagcccaagtcgcggccgccgagcggagccagcccctcccctacccggagcagcccgctggggccgtcccgagcggcgacacactaggagtcccggccggccagccagggcagccgcggtcccgggactcggccgtgagtgcagcgaccgcgccgccgctgagggaggcgccccaccatgccgcgggccccggcgccgctgtacgcctgcctcctggggctctgcgcgctcctgccccggctcgcaggtctcaacatatgcactagtggaagtgccacctcatgtgaagaatgtctgctaatccacccaaaatgtgcctggtgctccaaagaggacttcggaagcccacggtccatcacctctcggtgtgatctgagggcaaaccttgtcaaaaatggctgtggaggtgagatagagagcccagccagcagcttccatgtcctgaggagcctgcccctcagcagcaagggttcgggctctgcaggctgggacgtcattcagatgacaccacaggagattgccgtgaacctccggcccggtgacaagaccaccttccagctacaggttcgccaggtggaggactatcctgtggacctgtactacctgatggacctctccctgtccatgaaggatgacttggacaatatccggagcctgggcaccaaactcgcggaggagatgaggaagctcaccagcaacttccggttgggatttgggtcttttgttgataaggacatctctcctttctcctacacggcaccgaggtaccagaccaatccgtgcattggttacaagttgtttccaaattgcgtcccctcctttgggttccgccatctgctgcctctcacagacagagtggacagcttcaatgaggaagttcggaaacagagggtgtcccggaaccgagatgcccctgaggggggctttgatgcagtactccaggcagccgtctgcaaggagaagattggctggcgaaaggatgcactgcatttgctggtgttcacaacagatgatgtgccccacatcgcattggatggaaaattgggaggcctggtgcagccacacgatggccagtgccacctgaacgaggccaacgagtacactgcatccaaccagatggactatccatcccttgccttgcttggagagaaattggcagagaacaacatcaacctcatctttgcagtgacaaaaaaccattatatgctgtacaagaattttacagccctgatacctggaacaacggtggagattttagatggagactccaaaaatattattcaactgattattaatgcatacaatagtatccggtctaaagtggagttgtcagtctgggatcagcctgaggatcttaatctcttctttactgctacctgccaagatggggtatcctatcctggtcagaggaagtgtgagggtctgaagattggggacacggcatcttttgaagtatcattggaggcccgaagctgtcccagcagacacacggagcatgtgtttgccctgcggccggtgggattccgggacagcctggaggtgggggtcacctacaactgcacgtgcggctgcagcgtggggctggaacccaacagcgccaggtgcaacgggagcgggacctatgtctgcggcctgtgtgagtgcagccccggctacctgggcaccaggtgcgagtgccaggatggggagaaccagagcgtgtaccagaacctgtgccgggaggcagagggcaagccactgtgcagcgggcgtggggactgcagctgcaaccagtgctcctgcttcgagagcgagtttggcaagatctatgggcctttctgtgagtgcgacaacttctcctgtgccaggaacaagggagtcctctgctcaggccatggcgagtgtcactgcggggaatgcaagtgccatgcaggttacatcggggacaactgtaactgctcgacagacatcagcacatgccggggcagagatggccagatctgcagcgagcgtgggcactgtctctgtgggcagtgccaatgcacggagccgggggcctttggggagatgtgtgagaagtgccccacctgcccggatgcatgcagcaccaagagagattgcgtcgagtgcctgctgctccactctgggaaacctgacaaccagacctgccacagcctatgcagggatgaggtgatcacatgggtggacaccatcgtgaaagatgaccaggaggctgtgctatgtttctacaaaaccgccaaggactgcgtcatgatgttcacctatgtggagctccccagtgggaagtccaacctgaccgtcctcagggagccagagtgtggaaacacccccaacgccatgaccatcctcctggctgtggtcggtagcatcctccttgttgggcttgcactcctggctatctggaagctgcttgtcaccatccacgaccggagggagtttgcaaagtttcagagcgagcgatccagggcccgctatgaaatggcttcaaatccattatacagaaagcctatctccacgcacactgtggacttcaccttcaacaaatcctacaatggcactgtggactgatgtttccttctccgaggggctggagcggggatctgatgaaaacgtcaaactgaaacgccttgcacggctgctcggcttgatcacagctccctaggtaggcaccacagagaagaccttctagtgagcctgggccaggagcccacagtgcctgtacaggaaggtgcctggccatgtcacctggctgctaggccagagccctgccaggctgcgtccctccgagcttggaataaagcaaggggaccttggcgctctcagctttccctgccacatccagcttgatgtcccaatgaaatactgagatgctgggctgt

SEQ ID NO: 184969 - DNA, 1728 bp, Homo Sapiens
  misc_feature (145)..(169): n is a, c, g, or t
  misc_feature (231)..(239): n is a, c, g, or t
ttggccgagctttcggcacctctgccgggtggtaccgagccttcccggcgccccctcctctcctcccaccggcctgcccttccccgcgggactatcgcccccacgtttccctcagcccttttctctcccggccgagccgcggcgnnnnnnnnnnnnnnnnnnnnnnnnngaggaggagcccggtggcggcggtggccggggagcccatggcgtacagtcaaggaggcggcnnnnnnnnngtctgctactactacgacggtgatattggaaattattattatggacagggtcatcccatgaagcctcatagaatccgcatgacccataacttgctgttaaattatggcttatacagaaaaatggaaatatataggccccataaagccactgccgaagaaatgacaaaatatcacagtgatgagtatatcaaatttctacggtcaataagaccagataacatgtctgagtatagtaagcagatgcagagatttaatgttggagaagattgtccagtgtttgatggactctttgagttttgtcagctctcaactggcggttcagttgctggagctgtgaagttaaaccgacaacagactgatatggctgttaattgggctggaggattacatcatgctaagaaatcagaagcatcaggattctgttacgttaatgatattgtgcttgccatccttgaattactaaagtatcatcagagagtcttatatattgatatagatattcatcatggtgatggtgttgaagaagctttttatacaacagatcgtgtaatgacggtatcattccataaatatggggaatactttcctggcacaggagacttgagggatattggtgctggaaaaggcaaatactatgctgtcaattttccaatgagagatggtatagatgatgagtcatatgggcagatatttaagcctattatctcaaaggtgatggagatgtatcaacctagtgctgtggtattacagtgtggtgcagactcattatctggtgatagactgggttgtttcaatctaacagtcaaaggtcatgctaaatgtgtagaagttgtaaaaacttttaacttaccattactgatgcttggaggaggtggctacacaatccgtaatgttgctcgatgttggacatatgagactgcagttgcccttgattgtgagattcccaatgagttgccatataatgattactttgagtattttggaccagacttcaaactgcatattagtccttcaaacatgacaaaccagaacactccagaatatatggaaaagataaaacagcgtttgtttgaaaatttgcgcatgttacctcatgcacctggtgtccagatgcaagctattccagaagatgctgttcatgaagacagtggagatgaagatggagaagatccagacaagagaatttctattcgagcatcagacaagcggatagcttgtgatgaagaattctcagattctgaggatgaaggagaaggaggtcgaagaaatgtggctgatcataagaaaggagcaaagaaagctagaattgaagaagataagaaagaacagaggacaaaaaaacagacgttaagaagaagataaatccaggacacagtggtgaaaaacacataccaaagaacctaatcagaacagctcagcaacccctgaatttgacagtctcaccaatttcagaaaatcattaaaagaaaatattgaaaggaaaatgttt

SEQ ID NO: 184970 - DNA, 1847 bp, Homo Sapiens
gagcaatgcttttcctataatagcgcaactttgtacaaaaaagttgggttgtcatccgcggcgcggcggcggctctggggtttcagcgagagtcttctaatccgaggcgctgcgggacggtcattatattttggagagaacagattaagaagtacacaggctgctacccaagttgttctgaatgttcctgaaacaagagtaacatgtttagaaagtggactcagagtagcttcggaagactctgggctctcaacatgcacagttggactctggattgatgctggaagtagatacgaaaatgagaagaacaatggaacagcacactttctggagcatatggctttcaagggcaccaagaagagatcccagttagatctggaacttgagattgaaaatatgggtgctcatctcaatgcctatacctccagagagcagactgtatactatgccaaagcattctctaaagacttgccaagagctgtagaaattcttgctgatataatacaaaacagcacattgggagaagcagagattgaacgtgagcgtggagtaatccttagagagatgcaggaagttgaaaccaatttacaagaagttgtttttgattatcttcatgccacagcttatcaaaatactgcacttggacggacaattttgggaccaactgaaaatatcaaatctataagtcgtaaggacttagtggattatataaccacacattataaggggccaagaatagtgcttgctgctgctggaggtgtttcccatgatgaattgcttgacttagcaaagtttcatttcggtgactctttatgcacacacaaaggagaaataccagctctgcctccctgcaaattcacaggaagtgagattcgtgtgagggatgacaagatgcctttggcgcaccttgcaatagctgttgaagctgttggttgggcacatccagatacaatctgtctcatggttgcaaacacgctgattggcaactgggatcgctcttttgggggaggaatgaatttatctagcaagctggcccagctcacttgtcatggcaatctttgccatagctttcagtctttcaacacttcctacacagatacaggattatggggactgtatatggtttgtgaatcatccactgttgcagacatgctacatgttgttcaaaaagaatggatgcgactctgtacaagtgtcacagaaagtgaggttgcacgagccagaaatcttctgaaaacaaacatgttgttgcagcttgatggttcaactccaatttgtgaagatattggtaggcaaatgttatgctataatagaaggattcccatccctgagcttgaagcaagaattgatgctgtgaatgctgagacaattcgagaagtatgtaccaaatacatttataataggagtccagctattgctgctgttggtaagcctggcttcttttcttctatgcaaaaagttggccaagtacttttaattaactcttctttttaatccttaggtcccattaagcaactaccagattttaaacagatacgcagtaacatgtgttggcttcgtgattaaaatgctcctaatcaagattgtttgaacacatgtatttataaaacagagctagagaaaaataaaaatgaacatgtatatacatttggaaatttgaattaaatactgtatcatactttcaaaggataaaaagactacccctctgaaagttgttttgtattaatgggtcagtctttgttctctgagaaattatgtttggaagcagcatactttcaaattattaccatgagtataatttaaagaatgaaaatggtttacagtattttcagtttttatttataaaa

SEQ ID NO: 184971 - DNA, 1493 bp, Homo Sapiens
  misc_feature (551)..(571): n is a, c, g, or t
  misc_feature (1367)..(1395): n is a, c, g, or t
ttggctcaggatggcatcaggcagggcacgctgcacccgaaaactccggaactgggtggtggagcaagtggagagtgggcagtttcccggagtgtgctgggatgatacagctaagaccatgttccggattccctggaaacatgcaggcaagcaggacttccgggaggaccaggatgctgccttcttcaaggcctgggcaatatttaagggaaagtataaggagggggacacaggaggtccagctgtctggaagactcgcctgcgctgtgcactcaacaagagttctgaatttaaggaggttcctgagaggggccgcatggatgttgctgagccctacaaggtgtatcagttgctgccaccaggaatcgtctctggccagccagggactcagaaagtaccatcaaagcgacagcacagttctgtgtcctctgagaggaaggaggaagaggatgccatgcagaactgcacactcagtccctctgtgctccaggactccctcaataatgaggaggagggggccagtgggggagcagtccattcagacattgggnnnnnnnnnnnnnnnnnnnnncctgagccacaggaagttacagacacaactgagggcccctttcaaggggatcagaggtccctggagtttctgcttcctccagagccagactactcactgctgctcaccttcatctacaacgggcgcgtggtgggcgaggcccaggtgcaaagcctggattgccgccttgtggctgagccctcaggctctgagagcagcatggagcaggtgctgttccccaagcctggcccactggagcccacgcagcgcctgctgagccagcttgagaggggcatcctagtggccagcaacccccgaggcctcttcgtgcagcgcctttgccccatccccatctcctggaatgcaccccaggctccacctgggccaggcccgcatctgctgcccagcaacgagtgcgtggagctcttcagaaccgcctacttctgcagagacttggtcaggtactttcagggcctgggccccccaccgaagttccaggtaacactgaatttctgggaagagagccatggctccagccatactccacagaatcttatcacagtgaagatggagcaggcctttgcccgatacttgctggagcagactccagagcagcaggcagccattctgtccctggtgtagagcctgggggacccatcttccacctcacctctttgttcttcctgtctcctttgaagtagactcattcttcacacgattgacctgtcctctttgtgataattctcagtagttgtccgtgataatcgtgtcctgaaaatcctcgcacacactggctggtggagaactcaaggctaannnnnnnnnnnnnnnnnnnnnnnnnnnnngagatatacgccctctttcatctgtaagggactaggaaattccaaatggtgtgaacccagggggcctttccctcttctctgacctcccaactctaaag

SEQ ID NO: 184972 - DNA, 1464 bp, Homo Sapiens
  misc_feature (579)..(599): n is a, c, g, or t
ttggctgagccctgcgacagcctggacagcaactcaggatggcatcaggcagggcacgctgcacccgaaaactccggaactgggtggtggagcaagtggagagtgggcagtttcccggagtgtgctgggatgatacagctaagaccatgttccggattccctggaaacatgcaggcaagcaggacttccgggaggaccaggatgctgccttcttcaaggcctgggcaatatttaagggaaagtataaggagggggacacaggaggtccagctgtctggaagactcgcctgcgctgtgcactcaacaagagttctgaatttaaggaggttcctgagaggggccgcatggatgttgctgagccctacaaggtgtatcagttgctgccaccaggaatcgtctctggccagccagggactcagaaagtaccatcaaagcgacagcacagttctgtgtcctctgagaggaaggaggaagaggatgccatgcagaactgcacactcagtccctctgtgctccaggactccctcaataatgaggaggagggggccagtgggggagcagtccattcagacattgggnnnnnnnnnnnnnnnnnnnnncctgagccacaggaagttacagacacaactgaggccccctttcaaggggatcagaggtccctggagtttctgcttcctccagagccagactactcactgctgctcaccttcatctacaacgggcgcgtggtgggcgaggcccaggtgcaaagcctggattgccgccttgtggctgagccctcaggctctgagagcagcatggagcaggtgctgttccccaagcctggcccactggagcccacgcagcgcctgctgagccagcttgagaggggcatcctagtggccagcaacccccgaggcctcttcgtgcagcgcctttgccccatccccatctcctggaatgcaccccaggctccacctgggccaggcccgcatctgctgcccagcaacgagtgcgtggagctcttcagaaccgcctacttctgcagagatcctccatgtagcctatgcttggcactcctgcgcttgtgtgttgcatatcctgtgtggccatatgcccagcctggcagctacctggcagctctcctccagccaagacagtggaagaggtggttcagacttggtcaggtactttcagggcctgggccccccaccgaagttccaggtaacactgaatttctgggaagagagccatggctccagccatactccacagaatcttatcacagtgaagaaggagcaggcctttgcccgatacttgctggagcagactccagagcagcaggcagccattctgtccctggtgtagagcctggggggacccatcttccacctcacctcttttgttcttcctgtctcctttgaagtagactcatacttcacacgattgacctgtcctccttgtgataattctcagtagttgtcc

SEQ ID NO: 184973 - DNA, 2689 bp, Homo Sapiens
  misc_feature (72)..(112): n is a, c, g, or t
  misc_feature (1369)..(1378): n is a, c, g, or t
  misc_feature (1885)..(1901): n is a, c, g, or t
ttggtgagaaagtgcctccttcttcccaggatcaggacctctgccatccagcgccacaaagagacattctgnnnnnnnnnnnnnnnnnnnnnnnnnnnnnnnnnnnnnnnnntcgcccagagacaaacttaaggtgaggagaaagagcgctagcttcacttgatctccagcttccaacttaagcagaacttgagagcatccgaactcctggatttcaggacaagtgaagaagattctttgggctataaagatgaagagtctacttcttctggtgctgatttcaatctgctgggctgatcatctttcagacaactatactctggatcatgacagagctattcacatccaagcagaaaatggcccccatctacttgtggaagcagagcaagccaaggtgttttcacacagaggtggcaatgttacactgccatgtaaattttatcgagaccctacagcatttggctcaggaatccataaaatccgaattaagtggaccaagctaacttcggattacctcaaggaagtggatgtttttgtttccatgggataccacaaaaaaacctatggaggctaccagggtagagtgtttctgaagggaggcagtgatagtgatgcttctctggtcatcacagacctcactctggaagattatgggagatataagtgtgaggtgattgaaggattagaagatgatactgttgtggtagcactggacttacaaggtgtggtattcccttactttccacgactggggcgctacaatctcaattttcacgaggcgcagcacgcgtgtctggaccaggatgctgtgatcgcctccttcgaccagctgtacgacgcctggcggggcgggctggactggtgcaatgccggctggctcagtgatggctctgtgcaatatcccatcacaaagcccagagagccctgtggggggcagaacacagtgcccggagtcaggaactacggattttgggataaaaataaaagcagaaatgatgttttctgttttacatccaatttcaatggccgtttttactatctgatccaccccaccaaactgacctatgatgaagcggtgcaagcttgtctcaatgatggtgctcagattgcaaaagtgggccagatatttgctgcctggaaaattctcggatatgaccgctgtgatgcgggctggttggcggatggcagcgtccgctaccccatctctaggccaagaaggcgctgcagtcctactgaggctgcagtgcgcttcgtgggtttcccagataaaaagcataagctgtatggtgtctactgcttcagagcatacaactgaatgtgcccttagagcgcatcagttttaaagtcattaagaacatgtgaaaggtgnnnnnnnnnnccaatatgaactcatgcaagttaccaaaactgtgataacccttttttacttactgtaaagagtcattttcataaagatcaattcattgatttgttttttgtaaagctatcattcaatatatattataaattaatataaatttaagggaagctctatgtaaggagacttagagccaaactgtttaagctgtatcatcccaacaaagtatcctttcatgaacggggcatgcaatagcttaagaattgctaggattaaattaaggaaagtaaagctactcagagcagcaggttccacaagcacaaactttacacatttgtacaattttgaaatgcactacaataaacaaattagagcaacacatttgaaatacaggcttctttacataaactgagaggttatacaaaactcagtttcacaagggaacaatctatacctttctaaaagttaatatttcaagtctctaataggcagaatattttactctttaaaatcctgcctttctgaccnnnnnnnnnnnnnnnnnttcatatggattccaatccatagtaacaagcacagttaaaactcctcaataatcccatttatatgaagcatgacacataaataagcagataatatttaaccaatgaaaaagacttctaccttcttataattaaaattacacatgtctaagaggaattgttttatcttttgagtagctttaccgagttgtatttaaattctaagggccatttgctaagcagcatttagcatctactcagggcagttatatagataaactgctggacagaaaaattgtaaaatttagcagcttgattttctgttagcctatgaaatgttattgtcctataaaaataactttaaactgatttaatatttcatatttacattatatgaaaatcaattacattataaaaggaatccctaatgcagaaacaaagatgcaactttcaaaattcttattattcctatttgtatatacacgagagaacccaaccagtgcctgtgtttggggggaaaagtcaacagtgtagttctaaaccttatccccaacagaaaatgtggttaatgatgtcactttccttgctggtcatcattaggcttaaattaaatgctgaagctgtcatcaagagtttacactaaaatcttcaagggtttaaataaaggttaagtccagcttccaaacacaattttccacattagcagcctccaatcttcttaaataaaagctctgttttcctatatttttatgactgctgagacccacagggaaccataattggtattcaaattacatttcatggtttccca

SEQ ID NO: 184974 - DNA, 971 bp, Homo Sapiens
  misc_feature (149)..(158): n is a, c, g, or t
  misc_feature (736)..(766): n is a, c, g, or t
ttggcttataaccccctggaggcaggtccttcccctcagtgcggtcacatacttccagaagagcggaccagggctgctgccagcacctgccactcagagcgcctctgtcgctgggacccttcagaactctctttgctcacaagttaccnnnnnnnnnngagccaacatgttggtattgctggctggtatctttgtggtccacatcgctactgttattatgctatttgttagcaccattgccaatgtctggttggtttccaatacggtagatgcatcagtaggtctttggaaaaactgtaccaacattagctgcagtgacagcctgtcatatgccagtgaagatgccctcaagacagtgcaggccttcatgattctctctatcatcttctgtgtcattgccctcctggtcttcgtgttccagctcttcaccatggagaagggaaaccggttcttcctctcaggggccaccacactggtgtgctggctgtgcattcttgtgggggtgtccatctacactagtcattatgcgaatcgtgatggaacgcagtatcaccacggctattcctacatcctgggctggatctgcttctgcttcagcttcatcatcggcgttctctatctggtcctgagaaagaaataaggccggacgagttcatggggatctggggggtggggaggaggaagccgttgaatctgggagggaagtggaggttgctgtacaggaaaaaccgagatnnnnnnnnnnnnnnnnnnnnnnnnnnnnnnnaggtcaaatcccaaaccattactgaggggattctctactgccaagcccctgccctggggagaaagtagttggctagtactttgatgctcccttgatggggtccagagagcctccctgcagccaccagacttggcctccagctgttcttagtgacacacactgtctggggccccatcagctgccacaacaccagccccacttctgg

SEQ ID NO: 184975 - DNA, 962 bp, Homo Sapiens
  misc_feature (248)..(278): n is a, c, g, or t
  misc_feature (856)..(865): n is a, c, g, or t
tttaactcagtgcagtaggtctgtggacctcagtgcatgacccagaagtggggctggtgttgtggcagctgatggggccccagacagtgtgtgtcactaagaacagctggagggccaagtctggtggctgcagggaggctctctggaccccatcaagggagcatcaaagtactagccaactactttctccccagggcaggggcttggcagtagagaatcccctcagtaatggtttgggatttgacctnnnnnnnnnnnnnnnnnnnnnnnnnnnnnnnatctcggtttttcctgtacagcaacctccacttccctcccagattcaacggcttcctcctccccaccccccagatccccatgaactcgtccggccttatttctttctcaggaccagatagagaacgccgatgatgaagctgaagcagaagcagatccagcccaggatgtaggaatagccgtggtgatactgcgttccatcacgattcgcataatgactagtgtagatggacacccccacaagaatgcacagccagcacaccagtgtggtggcccctgagaggaagaaccggtttcccttctccatggtgaagagctggaacacgaagaccaggagggcaatgacacagaagatgatagagagaatcatgaaggcctgcactgtcttgagggcatcttcactggcatatgacaggctgtcactgcagctaatgttggtacagtttttccaaagacctactgatgcatctaccgtattggaaaccaaccagacattggcaatggtgctaacaaatagcataataacagtagcgatgtggaccacaaagataccagccagcaataccaacatgttggctcnnnnnnnnnnggtaacttgtgagcaaagagagttctgaagggtcccagcgacagaggcgctctgagtggcaggtgctggcagcagccctggtccgctcttctgccaa

SEQ ID NO: 184976 - DNA, 2783 bp, Homo Sapiens
  misc_feature (210)..(219): n is a, c, g, or t
  misc_feature (797)..(827): n is a, c, g, or t
tgtacaaagaagaagacggtgaaaagaaaccgcccattacacaccccagtacaccagcagaggaaacttataacctcgggaggcaggtccttcccctcagtgcggtcacatacttccagaagagcggaccagggctgctgccagcacctgccactcagagcgcctctgtcgctgggacccttcagaactctctttgctcacaagttaccnnnnnnnnnngagccaacatgttggtattgctggctggtatctttgtggtccacatcgctactgttattatgctatttgttagcaccattgccaatgtctggttggtttccaatacggtagatgcatcagtaggtctttggaaaaactgtaccaacattagctgcagtgacagcctgtcatatgccaatgaagatgccctcaagacagtgcaggccttcatgattctctctatcatcttctgtgtcattgccctcctggtcttcgtgttccagctcttcaccatggagaagggaaaccggttcttcctctcaggggccaccacactggtgtgctggctgtgcattcttgtgggggtgtccatctacactagtcattatgcgaatcgtgatggaacgcagtatcaccacggctattcctacatcctgggctggatctgcttctgcttcagcttcatcatcggcgttctctatctggtcctgagaaagaaataaggccggacgagttcatggggatctggggggtggggaggaggaagccgttgaatctgggagggaagtggaggttgctgtacaggaaaaaccgagatnnnnnnnnnnnnnnnnnnnnnnnnnnnnnnnaggtcaaatcccaaaccattactgaggggattctctactgccaagcccctgccctggggagaaagtagttggctagtactttgatgctcccttgatggggtccaaagagcctccctgcagccaccagacttggcctccagctgttcttagtgacacacactgtctggggccccatcagctgccacaacaccagccccacttctgggtcatgcactgaggtccacagacctactgcactgagttaaaatagcggtacaagttctggcaagagcagatactgtctttgtgctgaatacgctaagcctggaagccatcctgcccttctgacccaaagcaaaacatcacattccagtctgaagtgcctactggggggctttggcctgtgagccattgtccctctttggaacagatatttagctctgtggaattcagtgacaaaatgggaggaggaaagagagtttgtaaggtcatgctggtgggttagctaaaccaagaaggagaccttttcacaatggaaaacctgggggatggtcagagcccagtcgagacctcacacacggctgtccctcatggagacctcatgccatggtctttgctaggcctcttgctgaaagccaaggcagctcttctggagtttctctaaagtcactagtgaacaattcggtggtaaaagtaccacacaaactatgggatccaaggggcagtcttgcaacagtgccatgttagggttatgtttttaggattcccctcaatgcagtcagtgtttcttttaagtatacaacaggagagagatggacatggctcattgtagcacaatcctattactcttcctctaacatttttgaggaagttttgtctaattatcaatattgaggatcagggctcctaggctcagtggtagctctggcttagacaccacctggagtgatcacctcttggggaccctgcctatcccacttcacaggtgaggcatggcaattctggaagctgattaaaacacacataaaccaaaaccaaacaacaggcccttgggtgaaaggtgctatataattgtgaagtattaagcctaccgtatttcagccatgataagaacagagtgcctgcattcccaggaaaatacgaaaatcccatgagataaataaaaatataggtgatgggcagatcttttctttaaaataaaaaagcaaaaactcttgtggtacctagtcagatggtagacgagctgtctgctgccgcaggagcacctctatacaggacttagaagtagtatgttattcctggttaagcaggcattgctttgccctggagcagctattttaagccatctcagattctgtctaaaggggttttttgggaagacgttttctttatcgccctgagaagatctaccccagggagaatctgagacatcttgcctacttttctttattagctttctcctcattcatttcttttatacctttcctttttggggagttgttatgccatgatttttggtatttatgtaaaaggattattactaattctatttctctatgtttattctagttaaggaaatgttgagggcaagccaccaaattacctaggctgaggttagagagattggccagcaaaaactgtgggaagatgaactttgtcattatgatttcattatcacatgattatagaaggctgtcttagtgcaaaaaacatacttacatttcagacatatccaaagggaatactcacattttgttaagaagttgaactatgactggagtaaaccatgtattcccttatcttttactttttttctgtgacatttatgtctcatgtaatttgcattactctggtggattgttctagtactgtattgggcttcttcgttaatagattatttcatatactataattgtaaatattttgatacaaatgtttataactctagggatataaaaacagattctgattcccttc

SEQ ID NO: 184977 - DNA, 852 bp, Homo Sapiens
  misc_feature (87)..(96): n is a, c, g, or t
  misc_feature (674)..(704): n is a, c, g, or t
cggaccattggctgctgccagcacctgccactcagagcgcctctgtcgctgggacccttcagaactctctttgctcacaagttaccnnnnnnnnnngagccaacatgttggtattgctggctggtatctttgtggtccacatcgctactgttattatgctatttgttagcaccattgccaatgtctggttggtttccaatacggtagatgcatcagtaggtctttggaaaaactgtaccaacattagctgcagtgacagcctgtcatatgccagtgaagatgccctcaagacagtgcaggccttcatgattctctctatcatcttctgtgtcattgccctcctggtcttcgtgttccagctcttcaccatggagaagggaaaccggttcttcctctcaggggccaccacactggtgtgctggctgtgcattcttgtgggggtgtccatctacactagtcattatgcgaatcgtgatggaacgcagtatcaccacggctattcctacatcctgggctggatctgcttctgcttcagcttcatcatcggcgttctctatctggtcctgagaaagaaataaggccggacgagttcatggggatctggggggtggggaggaggaagccgttgaatctgggagggaagtggaggttgctgtacaggaaaaaccgagatnnnnnnnnnnnnnnnnnnnnnnnnnnnnnnnaggtcaaatcccaaaccattactgaggggattctctactgccaagcccctgccctggggagaaagtagttggctagtactttgatgctcccttgatggggtccagagagcctccctgcaacaccagacttggcctccagctgttctta

SEQ ID NO: 184978 - DNA, 1851 bp, Homo Sapiens
ttgggtttacagtttttaagcaatcccttaccagcgctgtgactgttggcttcctggaaaggagttctgcaagggttcgattaagaagatgtaactacagagtgtctggtgctgcaagctcctgggacagtggtggaggtaactggtatccttggcagtgatatcacactgactgcacttgtcatcctgtttaggaaatagctcgtctgctggccctggaggaggctaccctgagtaccgatctgcagcagggttatgcccttaaaagtctcacaggccttctctcctcctttgttgaggtggaatccatcaaaagacattttaaaagtcgcttggtgggtactgtgctgaatggatacctgtgcttgcggaagctggtggtgcagaggaccaagctgatcgatgagacgcaggacatgctgctggagatgctggaggacatgaccacaggtacagaatcagaaaccaaggccttcatggctgtgtgcattgagacagccaagcgctacaatctggatgactaccggaccccggtgttcatcttcgagaggctctgcagcatcatttatcctgaggagaatgaagtcactgagttctttgtgaccctggagaaggatccccaacaagaagacttcttacagggcaggatgcctgggaacccgtatagcagcaatgagccaggcatcgggccgctgatgagggatataaagaacaagatttgccaggactgtgacttagtggccctcctggaagatgacagtggcatggagcttctagtgaacaataaaatcattagtttggaccttcctgtggctgaagtttacaagaaagtctggtgtaccacgaatgagggagagcccatgaggattgtttatcgtatgcgggggctgctgggcgatgccacagaggagttcattgagtccctggactctactacagatgaagaagaagatgaagaagaagtgtataaaatggctggtgtgatggcccagtgtgggggcctggaatgcatgcttaacagactcgcagggatcagagatttcaagcagggacgccaccttctaacagtgctactgaaattgttcagttactgcgtgaaggtgaaagtcaaccggcagcaactggtcaaactggaaatgaacaccttgaacgtcatgctggggaccctaaacctggcccttgtagctgaacaagaaagcaaggacagtgggggtgcagctgtggctgagcaggtgcttagcatcatggagatcattctagatgagtccaatgctgagcccctgagtgaggacaagggcaacctcctcctgacaggtgacaaggatcaactggtgatgctcttggaccagatcaacagcacctttgttcgctccaaccccagtgtgctccagggcctgcttcgcatcatcccgtacctttcctttggagaggtggagaaaatgcagatcttggtggagcgattcaaaccatactgcaactttgataaatatgatgaagatcacagtggtgatgataaagtcttcctggactgcttctgtaaaatagctgctggcatcaagaacaacagcaatgggcaccagctgaaggatctgattctccagaaggggatcacccagaatgcacttgactacatgaaaaagcacatccctagcgccaagaatttggatgccgacatctggaaaaagtttttgtctcgcccagccttgccatttatcctaaactgcttcaggcctggccatccagcaccctggcacccaggttctgattggaactgattccatcccgaacctgcataagctggagcagtgtccagtgatgagggcattgggaccttggcagagaacctgctgg

SEQ ID NO: 184979 - DNA, 1687 bp, Homo Sapiens
gcaagcacaggtatccattcagcacagtacccaccaagcgacttttaaaatgtcttttgatggattccactcaacaaaggaggagagaaggcctgtgagacttttaagggcataaccctgctgcagatcggtactcagggtagcctcctccagggccagcagacgagctatttccttggtgatgaggttgcccacatagggtaggactccccgagctgccaagtagactttccagtgcgcagaagtgatgagcttctggtagagagccaggtactcagctgcacactccccagctatgctcagctcatccaggtaactggtaagcaggtccaggacctgctgcttgcggctgggaatggtggctagagcttccacaatggtacaggctgcctgccgtgcggcctgcgttgctggagtgaaaagcacttgtcgcagccagttgttatgccccagtttgagatccaagggggaggtcctcttcccccgacgactcaggaactgtttccacctccacacatacttctcagtcaaatagagatggcggagctctgatttgctgggggctttcccattgccatctatccctctgataggaagacacttcttccaggcatcataggatgccttggggtctctcttgagccacagttgagcctgggcatggatctcattgcagtatggcttcaccgtggtgagggcctcgacggggacatccttgttcttcttgctagtgggagcaggtggttttatcagcttctgcaagatcctcaggcacatgagggtaatgttttcaaccaccacaggagtcttaatgttcacagccatgaggaaaaggctgagagcacagcgtaaccggagctcccagcagctgtcctccttggagatagaatccgtcagcagcagcatttcatactgcaggctacttgcatagaaggcaatgggaagagacatgagtcaagagggtcagctccggtccagcgactcttaactattaatacaatttctggtcctaggtggctccaacagagacaaaggacagacggagacccttgtgctccaggctcttccctgggaaaaccattctggggtaatgttctgctccttccctcctcagtcaccgcaggacctgggaggggaagctgagaaacacaagtcatgtgaggggaagtcagagaggacagctgggcctgctaggccggctcaccagatcggggttggcccagtggcccttcagggctgtggagaccttgccaataatcaggtcattcatctgttgggtggcttctgggttgtctcgagttaggaggcacatgagctggcggacctcctcccgcatggccgcagcccctcggcgaagattataatcaaagagctcccggataaggccctgggagacaaggatgtgcctcaaggctgggttggtggccagggcccgaagtagtgtgatacaatgttctgtgacagccgaggcgcagccatagcacttggtggaggatgtgtggccacagcccaggacggataaggcacggtactggctggcagtgaatgtgggctgcacggaggtccgggatgatttagtggctgcttccctctgctgtaggtcatattccaacaactctttgcgcgaagcaaagactttctaagaacaaaaaggcaacaataatgggaattagcaattaaaatccaa

SEQ ID NO: 184980 - DNA, 966 bp, Homo Sapiens
ccaactttgtacaaaaaagttggattgcaggcgtgagccaccgcgctcggcccaatttgggtttttaaaagataactctcgtgctacacctaggggaacagggatgccctggcagccttgggagggcagatctggggtggggtgcctacagggaggtggcgaggccagctgattccatggtcagtccccagggacttggagctgggtatggactagaaccagaggagggcaggtgtgtgaaatgaccactgaccccacccctgggtgcaggtggaaggccccagtgcgcctccaggctggtttcccctcttgccccgcaggcctgggcatgtgcttcagcttccagtcaagcatcacggtgctgggcttctactttgtccgccggcgggtgctggccaacgcgctggcctcgatgggcgtctccctgggcatcaccctctggccgctgctctcccgctaccttctggagaacctgggctggaggggtaccttccttgtcttcggcgggatctttctccactgctgcatctgcggggccatcataaggcctgtggccaccagtgtggcccctgagaccaaagaatgtcccccgccacctcccgagacacctgcacttggctgcctggctgcatgcggccggaccatccagcgccacctggccttcgacatcctgcggcacaacacaggctactgcgtgtacatactgggtgtgatgtggtccgtcctgggcttcccactgccacaagtcttcctggtgccatatgccatgtggcacagcgtggacgagcagcaagcagccctcctcatctccatcatcggcttcagcaacatcttcctgaagcccctagccgggctgatggcaggacggccggcctttgctagccaccgcaagtacctgttcagcctggcactcctgctcaatgggctcactaacctggtgtgtgcggcatcaggtgactttctggg

SEQ ID NO: 184981 - DNA, 2973 bp, Homo Sapiens
ttggcgccggccggggccgctggctgcactcagcgccggagccgggagctagcggccgccgccatgtcccaccagaccggcatccaagcaagtgaagatgttaaagagatctttgccagagccagaaatggaaagtacagacttctgaaaatatctattgaaaatgagcaacttgtgattggatcatatagtcagccttcagattcctgggataaggattatgattcctttgttttacccctgttggaggacaaacaaccatgctatatattattcaggttagattctcagaatgcccagggatatgaatggatattcattgcatggtctccagatcattggctcatgttcgtcaaaaaatgttgtatgcagcaacaagagcaactctgaagaaggaatttggaggtggccacattaaagatgaagtatttggaacagtaaaggaagatgtatcattacatggatataaaaaatacttgctgtcacaatcttcccctgccccactgactgcagctgaggaagaactacgacagattaaaatcaatgaggtacagactgacgtgggtgtggacactaagcatcaaacactacaaggagtagcatttcccatttctcgagaagcctttcaggctttggaaaaattgaataatagacagctcaactatgtgcagttggaaatagatataaaaaatgaaattataattttggccaacacaacaaatacagaactgaaagatttgccaaagaggattcccaaggattcagctcgttaccatttctttctgtataaacattcccatgaaggagactatttagagtccatagtttttatttattcaatgcctggatacacatgcagtataagagagcggatgctgtattctagctgcaagagccgtctgctagaaattgtagaaagacaactacaaatggatgtaattagaaagatcgagatagacaatggggatgagttgactgcagacttcctttatgaagaagtacatcccaagcagcatgcacacaagcaaagttttgcaaaaccaaaaggtcctgcaggaaaaagaggaattcgaagactaattaggggcccagcggaaactgaagctactactgattaaagtcatcacattaaacattgtaatactagttttttaaaagtccagcttttagtacaggagaactgaaatcattccatgttgatataaagtagggaaaaaaattgtactttttggaaaatagcacttttcacttctgtgtgtttttaaaattaatgttatagaagactcatgatttctatttttgagttaaagctagaaaagggttcaacataatgtttaattttgtcacactgttttcatagcgttgattccacacttcaaatacttcttaaaattttatacagttgggccagttctagaaagtctgatgtctcaaagggtaaacttactactttcttgtgggacagaaagaccttaaaatattcatattacttaatgaatatgttaaggaccaggctagagtattttctaagctggaaacttagtgtgccttggaaaaggccgcaagttgcttactccgagtagctgtgctagctctgtcagactgtaggatcatgtctgcaacttttagaaatagtgctttatattgcagcagtcttttatatttgacttttttttaatagcattaaaattgcagatcagctcactctgaaactttaagggtaccagatattttctatactgcaggatttctgatgacattgaaagactttaaacagccttagtaaattatctttctaatgctctgtgaggccaaacatttatgttcagattgaaatttaaattaatatcattcaaaaggaaacaaaaaatgttgagttttaaaaatcaggattgacttttttctccaaaaccatacatttatgggcaaattgtgttctttatcacttccgagcaaatactcagatttaaaattactttaaagtcctggtacttaacaggctaacgtagataaacaccttaataatctcagttaatactgtatttcaaaacacatttaactgttttctaatgctttgcattatcagttacaacctagagagattttgagcctcatatttctttgatacttgaaatagagggagctagaacacttaatgtttaatctgttaaacctgctgcaagagccataactttgaggcattttctaaatgaactgtggggatccaggatttgtaatttcttgatctaaactttatgctgcataaatcacttatcggaaatgcacatttcatagtgtgaagcactcatttctaaaccttattatctaaggtaatatatgcacctttcagaaatttgtgttcgagtaagtaaagcatattagaataattgtgggttgacagatttttaaaatagaatttagagtatttggggttttgtttgtttacaaataatcagactataatatttaaacatgcaaaataactgacaataatgttgcacttgtttactaaagatataagttgttccatgggtgtacacgtagacagacacacatacacccaaattattgcattaagaatcctggagcagaccatagctgaagctgttattttcagtcaggaagactacctgtcatgaaggtataaaataatttagaagtgaatgtttttctgtaccatctatgtgcaattatactctaaattccattacactacattaaagtaaatggacattccagaatatagatgtgattatagtcttaaactaattattattaaaccaatgattgctgaaaatcagtgatgcatttgttatagagtataactcatcgtttacagtatgttttagttggcagtatcatacctagatggtgaataacatattcccagtaaatttatatagcagtgaagaattacatgccttctggtggacattttataagtgcattttatatcacaataaaaattttttc

SEQ ID NO: 184982 - DNA, 2508 bp, Homo Sapiens
  misc_feature (1402)..(1411): n is a, c, g, or t
  misc_feature (2002)..(2051): n is a, c, g, or t
ttggctttaaaagagggcccaatagccaccacacccagcctaaaagagttaattttttatatgaatctcagtaaagcagttattaacaaacaaaaagatctgatatggtagaaaaaactattgtcattgcacatttccacttccattttctctaacttaatgatattgttagagaatatatagaggtgaagattgtgactttaattttcttttttcatagcactgttgcaagaattcaattccgtcttcctgatggttcttcctttacaaatcagttcccttctgatgctcctctagaagaggcaaggcagtttgctgcacagactgttggcaacacttacggtaatttttcgttagcaaccatgtttcccaggagggaatttaccaaagaagattataaaaagaagttactggatttggaacttgccccaagcgcttcggtggtactgttgccagcaggaagaccaactgcatccattgtacactcttccagcggagacatttggaccttgttgggaacagtgctttatccattccttgccatctggagattaattagcaatttcttgtttagtaatccgcctcccacacagacttcagtgagagtaacatcgtcagaacccccaaaccctgcatcatctagcaaatcagaaaaaagggaaccagtgagaaaaagagtgctggaaaaacgtggagacgactttaaaaaggaggggaaaatttatagattaaggactcaagatgatggtgaagatgaaaacaacacttggaatggaaattccactcaacagatgtagtgtgacaagtataatatgtgcaataatcattgtttctcttatgatttaattcaactaaaattctactggagaagtgggactgctttatattttccaactggtctataaaatgtctctttattcctgcttagtgggtgtgggttgaaggtgtttaactcagaaaagtaaagacaggaaataactctctgctaggtccttgcttatatggcaaccactgctagaaccctaaaagaaccaaaaatctgccacagcctgcctccatcagcttcttatttagtatttcatatgcccattagccctatgcttcagatgacacgttttgtttagagctactttgctccaagactcttaagcccaaagtaactggtatgtcactgagtaacttgactcggtgtcagagcattttaactagccactcagatgagaatttatgtttaacttctctttttactcatcagctgcaagcaaaatcttgtagtttttaatcttaaacactgaataaaaaaactttcccctaaattggaatgatcttagttttgctttgagttttgttatctagcatctttttgttgcacagggctctattgaggtcctatgtctctgannnnnnnnnnccccagtattgccctggagctgtctctggaaagtagctggcgaggttaccttaactatcactgaagaaagaaattttctgacacactgatggcatgtgacttgtctcctaagtcagtgaggcatcactttgtttgcataaagtatacggtttgttaaggcctttgttcttgtgagatgcaaaacagctgctagtctgcaacctagttttccctctcacctttaactgacgttttgtcctcaataattacacaaggacctagagtacctataggacaaaaagtatagaataaaaatatgcctttagtcatttggtttttcttaaaaagttgagattcttaatctgacttacatgttactttatccgtatgtctttgttagtggagaccgctaaactaatgatgtttgaaaacagttcctctgttttagattggaagatagcactctagagtggacatacggaaagactgtgactttattttgtaatgggaggaagaaattttctcagagcaaactttctattttttacctgtgaaataacagtgactttttaaaatggtgacagtgttggcaaggaaacagcaacacaggcnnnnnnnnnnnnnnnnnnnnnnnnnnnnnnnnnnnnnnnnnnnnnnnnnnatcagaaacttaaaatatttcataccgtttgatccagtagcttcttctaaatcataaatgcagacaatgtttaggtaaagacatactcattaagtgttatttattttactcaagaactggaaaccaactaaatgccttctatagaagtaatttttgatgaggagaaatggtacaatactaattaacaacttggtttaacatgtttactgagcatctgttaagtgttgggggaaaaagcagcaggatccagagctatagtacagtgtgatctcagctttgcaaacacattttctacatagatagtactagtattaatagatatgtaaagaaagaaatcacaccattaataatggtaagattggtttatgtgattttagtggtatttttggcacccttatatatgttttccaaactttcagcagtgatattatttccataacttaaaagtgagtttgaa

SEQ ID NO: 184983 - DNA, 1444 bp, Homo Sapiens
  misc_feature (504)..(513): n is a, c, g, or t
  misc_feature (1104)..(1153): n is a, c, g, or t
ttggaaatgtctctcttattacctgcttagtgggtgtgggttgaaggtgtttaactcagaaaagtaaagacaggaaataactctctgctaggtccttgcttatatggcaaccactgctagaaccctaaaagaaccaaaaatctgccacagcctgcctccatcagcttcttatttagtatttcatatgcccattagccctatgcttcagatgacacgttttgtttagagctactttgctccaagactcttaagcccaaagtaactggtatgtcactgagtaacttgactcggtgtcagagcattttaactagccactcagatgagaatttatgtttaacttctctttttactcatcagctgcaagcaaaatcttgtagtttttaatcttaaacactgaataaaaaaactttcccctaaattggaatgatcttagttttgctttgagttttgttatctagcatctttttgttgcacagggctctattgaggtcctatgtctctgannnnnnnnnnccccagtattgccctggagctgtctctggaaagtagctggcgaggttaccttaactatcactgaagaaagaaattttctgacacactgatggcatgtgacttgtctcctaagtcagtgaggcatcactttgtttgcataaagtatacggtttgttaaggcctttgttcttgtgagatgcaaaacagctgctagtctgcaacctagttttccctctcacctttaactgacgttttgtcctcaataattacacaaggacctagagtacctataggacaaaaagtatagaataaaaatatgcctttagtcatttggtttttcttaaaaagttgagattcttaatctgacttacatgttactttatccgtatgtctttgttagtggagaccgctaaactaatgatgtttgaaaacagttcctctgttttagattggaagatagcactctagagtggacatacggaaagactgtgactttattttgtaatgggaggaagaaattttctcagagcaaactttctattttttacctgtgaaataacagtgactttttaaaatggtgacagtgttggcaaggaaacagcaacacaggcnnnnnnnnnnnnnnnnnnnnnnnnnnnnnnnnnnnnnnnnnnnnnnnnnnatcagaaacttaaaatatttcataccgtttgatccagtagcttcttctaaatcataaatgcagacaatgtttaggtaaagacatactcattaagtgttatttattttactcaagaactggaaaccaactaaatgccttctatagaagtaatttttgatgaggagaaatggtacaatactaattaacaacttggtttaacatgtttactgagcatctgttaagtgttgggggaaaaagcagcagatccagagctataggtacagtgtgatctcagctttgcaacacattttc

SEQ ID NO: 184984 - DNA, 911 bp, Homo Sapiens
  misc_feature (723)..(734): n is a, c, g, or t
tttgtacaaaaaagttgggtttgatccagtaccttcttctaaatcataaatgcagacaatgtttaggtaaagacatactcattaagtgttatttattttactcaagaactggaaaccaactaaatgccttctatagaagtaatttttgatgaggagaaatggtacaatactaattaacaacttggtttaacatgttttactgagcatctgttaagtgttgggggaaaaagcagcaggatccagagctataggtacagtgtgatctcagctttgcaaacacattttctacatagatagtactaggtattaatagatatgtaaagaaagaaatcacaccattaataatggtaagattggtttatgtgattttagtggtatttttggcacccttatatatgttttccaaactttcagcagtgatattatttccataacttaaaaagtgagtttgaaaaagaaaatctccagcaagcatctcatttaaataaaggtttgtcatctttaaaaatacagcaatatgtgactttttaaaaaagctgtcaaataggtgtgaccctactaataattattagaaatacatttaaaaacatcgagtacctcaagtcagtttgccttgaaaaatatcaaatataactcttagagaaatgtacataaaagaatgcttcgtaattttggagtaggaggttccctcctcaattttgtatttttaaaaagtacatggtnnnnnnnnnnnnttcacaacagtatataagggctgtaaaatgagaattctgcccccctcacctcttaccccagtactattctccagaggtaatctattaaacaatttcttatgtaattttcagaaaatttgtatgcgtatataagccaatatgtaatctttatttttaaaataaatgggatcatattat

SEQ ID NO: 184985 - DNA, 1603 bp, Homo Sapiens
  misc_feature (1270)..(1279): n is a, c, g, or t
ttggagtagaggctgccaaagctgctgccttgctagaaaaacaggcagaaatggaagtcaagagggaatcttatgcaagagaaagaagcactgttgcaagaattcaattccgtcttcctgatggttcttcctttacaaatcagttcccttctgatgctcctctagaagaggcaaggcagtttgctgcacagactgttggcaacacttacggtaatttttcgttagcaaccatgtttcccaggagggaatttaccaaagaagattataaaaagaagttactggatttggaacttgccccaagcgcttcggtggtactgttgccagcaggaagaccaactgcatccattgtacactcttccagcggagacatttggaccttgttgggaacagtgctttatccattccttgccatctggagattaattagcaatttcttgtttagtaatccgcctcccacacagacttcagtgagagtaacatcgtcagaacccccaaaccctgcatcatctagcaaatcagaaaaaagggaaccagtgagaaaaagagtgctggaaaaacgtggagacgactttaaaaaggaggggaaaatttatagattaaggactcaagatgatggtgaagatgaaaacaacacttggaatggaaattccactcaacagatgtagtgtgacaagtataatatgtgcaataatcattgtttctcttatgatttaattcaactaaaattctactggagaagtgggactgctttatattttccaactggtctataaaatgtctctttattcctgcttagtgggtgtgggttgaaggtgtttaactcagaaaagtaaagacaggaaataactctctgctaggtccttgcttatatggcaaccactgctagaaccctaaaagaaccaaaaatctgccacagcctgcctccatcagcttcttatttagtatttcatatgcccattagccctatgcttcagatgacacgttttgtttagagctactttgctccaagactcttaagcccaaagtaactggtatgtcactgagtaacttgactcggtgtcagagcattttaactagccactcagatgagaatttatgtttaacttctctttttactcatcagctgcaagcaaaatcttgtagtttttaatcttaaacactgaataaaaaaactttcccctaaattggaatgatcttagttttgctttgagttttgttatctagcatctttttgttgcacagggctctattgaggtcctatgtctctgannnnnnnnnnccccagtattgccctggagctgtctctggaaagtagctggcgaggttaccttaactatcactgaagaaagaaattttctgacacactgatggcatgtgacttgtctcctaagtcagtgaggcatcactttgtttgcataaagtatacggtttgttaaggcctttgttcttgtgagatgcaaaacagctgctagtctgcaacctagttttccctctcacctttaactgacgttttgtcctcaataattacacaaggacctagagtacctataggacaaaagtatagaataaaaatatgcctttagtcatttggtttttcttaaaa

SEQ ID NO: 184986 - DNA, 1135 bp, Homo Sapiens
  misc_feature (194)..(243): n is a, c, g, or t
  misc_feature (973)..(984): n is a, c, g, or t
ctttgtacaaaaaagttggtctgttttagatctggaagatagcactctagagtggacatacggaaagactgtgactttattttgtaatgggaggaagaaattttctcagagcaaactttctattttttacctgtgaaataacagtgactttttaaaatggtgacagtgttggcaaggaaacagcaacacaggcnnnnnnnnnnnnnnnnnnnnnnnnnnnnnnnnnnnnnnnnnnnnnnnnnnatcagaaacttaaaatatttcataccgtttgatccagtagcttcttctaaatcataaatgcagacaatgtttaggtaaagacatactcattaagtgttatttattttactcaagaactggaaaccaactaaatgccttctatagaagtaatttttgatgaggagaaatggtacaatactaattaacaacttggtttaacatgtttactgagcatctgttaagtgttgggggaaaaagcagcaggatccagagctataggtacagtgtgatctcagctttgcaaacacattttctacatagatagtactaggtattaatagatatgtaaagaaagaaatcacaccattaataatggtaagattggtttatgtgattttagtggtatttttggcacccttatatatgttttccaaactttcagcagtgatattatttccataacttaaaaagtgagtttgaaaaagaaaatctccagcaagcatctcatttaaataaaggtttgtcatctttaaaaatacagcaatatgtgactttttaaaaaagctgtcaaataggtgtgaccctactaataattattagaaatacatttaaaaacatcgagtacctcaagtcagtttgccttgaaaaatatcaaatataactcttagagaaatgtacataaaagaatgcttcgtaattttggagtaggaggttccctcctcaattttgtatttttaaaaagtacatggtnnnnnnnnnnnnttcacaacagtatataaactgtaaaatgagaattctgccccctcacctcttaccccagtactattctccagaggtaatctattaacaatttcttatgtaattttcagaaaatttgtatgcgtatatagcaaatatgtaatctttatttttt

SEQ ID NO: 184987 - DNA, 3405 bp, Homo Sapiens
  misc_feature (836)..(918): n is a, c, g, or t
  misc_feature (2348)..(2358): n is a, c, g, or t
  misc_feature (2949)..(2998): n is a, c, g, or t
ttggcggacaccgacgggttgcgactgtgacgtgaggtgttctcgcgcgcgctagcgcgcgtctccgggtgccgctgacgggcgtgcgcgcttgtgcggagccggaggtgggggccgaaccagccaaggttgcgggggccgcagagccggacgaagacggagggcggagccggcttcgggactgcggagactacacaccgagcgagcgcctgggcccgaagggagcgatgctgtggttccagggcgccattccggccgccatcgcgacggccaaaaggagcggcgcggtcttcgtggtgttcgtggcaggtgatgatgaacagtctacacagatggctgcaagttgggaagatgataaagttacagaagcatcttcaaacagttttgttgctattaaaatcgataccaaaagtgaagcctgcctacagttttcacaaatctatcctgtagtgtgtgttccatccagtttctttattggagacagtggaattcccttggaagtaatagcaggaagtgtttctgcagatgaacttgttacaagaattcacaaggtccgacagatgcatttgctaaaaagtgaaacatcagtagcaaatggcagtcagtcagaaagttcagtgtctactccatctgcgtcatttgaacctaacaacacttgtgaaaactctcagtccagaaatgcagagctttgtgagataccacccacttctgatacaaagtcagatactgcaacaggaggagaaagtgcaggccatgccacttcctctcaggagcctagtggatgctcagatcagagacctgcagaggacctcaacatccgagtggaaagactaacnnnnnnnnnnnnnnnnnnnnnnnnnnnnnnnnnnnnnnnnnnnnnnnnnnnnnnnnnnnnnnnnnnnnnnnnnnnnnnnnnnnctggaaaagaaatgttggattataaaagaaaacaagaagaagaattaacaaaaagaatgctggaggaaagaaacagagagaaagcagaagatagggcagctcgagaacgtataaaacagcagattgcattggaccgtgcagagagagctgctcgttttgcaaagacaaaggaagaagtagaggctgccaaagctgctgccttgctagcaaaacaggcagaaatggaagtcaagagggaatcttatgcaagagaaagaagcactgttgcaagaattcaattccgtcttcctgatggttcttcctttacaaatcagttcccttctgatgctcctctagaagaggcaaggcagtttgctgcacagactgttggcaacacttacggtaatttttcgttagcaaccatgtttcccaggagggaatttaccaaagaagattataaaaagaagttactggatttggaacttgccccaagcgcttcggtggcaggaagaccaactgcatccattgtacactcttccagcggagacatttggaccttgttgggaacagtgctttatccattccttgccatctggagattaattagcaatttcttgtttagtaatccgcctcccacacagacttcagtgagagtaacatcgtcagaacccccaaaccctgcatcatctagcaaatcagaaaaaagggaaccagtgagaaaaagagtgctggaaaaacgtggagacgactttaaaaaggaggggaaaatttatagattaaggactcaagatgatggtgaagatgaaaacaacacttgggaatggaaattccactcaacagatgtagtgtgacaagtataatatgtgcaataatcattgtttctcttatgatttaattcaactaaaattctactggagaagtgggactgctttatattttccaactggtctataaaatgtctctttattcctgcttagtgggtgtgggttgaaggtgtttaactcagaaaagtaaagacaggaaataactctctgctaggtccttgcttatatggcaaccactgctagaaccctaaaagaaccaaaaatctgccacagcctgcctccatcagcttcttatttagtatttcatatgcccattagccctatgcttcagatgacacgttttgtttagagctactttgctccaagactcttaagcccaaagtaactggtatgtcactgagtaacttgactcggtgtcagagcattttaactagccactcagatgagaatttatgtttaacttctctttttactcatcagctgcaagcaaaatcttgtagtttttaatcttaaacactgaataaaaaaactttcccctaaattggaatgatcttagttttgctttgagttttgttatctagcatctttttgttgcacagggctctattgaggtcctatgtctctgannnnnnnnnnnccccagtattgccctggagctgtctctggaaagtagctggcgaggttaccttaactatcactgaagaaagaaattttctgacacactgatggcatgtgacttgtctcctaagtcagtgaggcatcactttgtttgcataaagtatacggtttgttaaggcctttgttcttgtgagatgcaaaacagctgctagtctgcaacctagttttccctctcacctttaactgacgttttgtcctcaataattacacaaggacctagagtacctataggacaaaaagtatagaataaaaatatgcctttagtcatttggtttttcttaaaaagttgagattcttaatctgacttacatgttactttatccgtatgtctttgttagtggagaccgctaaactaatgatgtttgaaaacagttcctctgttttagattggaagatagcactctagagtggacatacggaaagactgtgactttattttgtaatgggaggaagaaattttctcagagcaaactttctattttttacctgtgaaataacagtgactttttaaaatggtgacagtgttggcaaggaaacagcaacacaggcnnnnnnnnnnnnnnnnnnnnnnnnnnnnnnnnnnnnnnnnnnnnnnnnnnatcagaaacttaaaatatttcataccgtttgatccagtagcttcttctaaatcataaatgcagacaatgtttaggtaaagacatactcattaagtgttatttattttactcaagaactggaaaccaactaaatgccttctatagaagtaaatttttgatgaggagaaatggtacaatactaattaacaacttggtttaacatgtttactgagcatctgttaagtgttgggggaaaagcagcaggatccagagctataggtacagtgtgatctcagcctttgcaacacattttctacatagatagtactagggtattatagatatgtaaagaaagaaatcacaccatttaaaatgggtaagattgggttatgtgattttagtgggtatttttggcacccttatatatg

SEQ ID NO: 184988 - DNA, 980 bp, Homo Sapiens
ttggattttaacttgattgatttttcctcagatataagtatgagaaatgacagaaagaaacaacaactggaaaagaagcattgcataagaccaggatgtctctgaaatggacgtcagtctttctgctgatacagctcagttgttactttagctctggaagctgtggaaaggtgctagtgtggcccacagaatacagccattggataaatatgaagacaatcctggaagagcttgttcagaggggtcatgaggtgactgtgttgacatcttcggcttctactcttgtcaatgccagtaaatcatctgctattaaattagaagtttatcctacatctttaactaaaaattatttggaagattctcttctgaaaattctcgatagatggatatatggtgtttcaaaaaatacattttggtcatatttttcacaattacaagaattgtgttgggaatattatgactacagtaacaagctctgtaaagatgcagttttgaataagaaacttatgatgaaactacaagagtcaaagtttgatgtcattctggcagatgcccttaatccctgtggtgagctactggctgaactatttaacataccctttctgtacagtcttcgattctctgttggctacacatttgagaagaatggtggaggatttctgttccctccttcctatgtacctgttgttatgtcagaattaagtgatcaaatgattttcatggagaggataaaaaatatgatacatatgctttattttgacttttggtttcaaatttatgatctgaagaagtgggaccagttttatagtgaagttctaggaagacccactacattatttgagacaatggggaaagctgaaatgtggctcattcgaacctattgggattttgaatttcctcgcccattcttaccaatgttgattttgttggaggacttcactgtaaaccagccaaacccctgcctaagaaatggaagagtt

SEQ ID NO: 184989 - DNA, 1106 bp, Homo Sapiens
ttggagctgttttcatgggtaaggaagacccactacattatttgagacaatggggaaagctgaaatgtggctcattcgaacctattgggattttgaatttcctcgcccattcttaccaaatgttgattttgttggaggacttcactgtaaaccagccaaacccctgcctaaggaaatggaagagtttgtgcagagctctggagaaaatggtattgtggtgttttctctggggtcgatgatcagtaacatgtcagaagaaagtgccaacatgattgcatcagcccttgcccagatcccacaaaaggttctatggagatttgatggcaagaagccaaatactttaggttccaatactcgactgtacaagtggttaccccagaatgaccttcttggttggcccaaaaccaaagcttttataactcatggtggaaccaatggcatctatgaggcgatctaccatgggatccctatggtgggcattcccttgtttgcggatcaacatgataacattgctcacatgaaagccaagggagcagccctcagtgtggacatcaggaccatgtcaagtagagatttgctcaatgcattgaagtcagtcattaatgaccctgtctataaagagaatgtcatgaaattatcaagaattcatcatgaccaaccaatgaagcccctggatcgagcagtcttctggattgagtttgtcatgcgccacaaaggagccaagcaccttcgagtcgcagctcacaacctcacctggatccagtaccactctttggatgtgatagcattcctgctggcctgcgtggcaactgtgatatttatcatcacaaaattttgcctgttttgtttccgaaagcttgccaaaacaggaaagaagaagaaaagagattagttatatcaaaagcctgaagtggaatgactgaaagatgggactcctcctttatttcagcatggagggttttaaatggaggatttcctttttcctgtgacaaaacatcttttcacaacttaccttgttaagacaaaatttattttccagggatttaatacgtactttagttggaattattctatgtcaatgatttttaagctatgaaaaatacaat

SEQ ID NO: 184990 - DNA, 2004 bp, Homo Sapiens
ataggcctttttcttccgcttttgcctggactcaatcatgcgaacaatggcgtcctcttcataggtgtggccacacactttatttttcactggcttcttcatttcctcctttgtaatggggcaggtgaagttggtctgactttgggtcacaattatatcttcatccactccttctgttccgtcagcttctctgtcagcttgaagaccacattgcttctttagttctttcagctgttgtttaaactgtacaaatttttcattattttgaaagtctgcatcagaattcttgctctgtaaagccaaaaatttcttctctaccaataattttaaatctggtattttttctggacgttcttctttcacatgatttattgtagattgaacagcctttacataatggtttagttgccgatccaatgtagcaaattcaaccattgccttgtccatactatattcactactcacttcagtctgactttccacaagatccaaagcaacactagaagctgtgtccataccagagttgatacaggcttggaagtttttcaaggaggagagagcagactctacaccactgaaggagatgaaaccagttgaacctgaatttgaactggaacgtcctggcatcttgaaattagtacctcctttcctcagcccccttcgcctgccgctgaaaagtgagagcgggctcttgcgtcatcagccgtcgccggcgagtggtcacatgatgcccctccctgctcccagccgcttcggtcatgtgaccgcctggggggtcaggggcggaagtcggggtctgacccgctccaggtccgggactgcggatagaagaggaccgccgccttgagggaggggtggaaactgggtgccggctccgcgcgcgacctccggccctgcgcgtgcgccgtggcgcggcccggctgacagggtccagaattatgggaaagcaaactggatgctaagccagagctacaggatttagatgaagaatttcgtgaaaacaacatagaaattgtgaccagattttatttagcatttcaaagtgtacataaatatattgtagacttaaacagatatctagatgatctcaatgaaggggtttatattcagcaaaccttagaaactgtgcttctcaatgaagatggaaaacaacttctatgtgaagcactgtacttatatggagttatgctactggtcattgaccaaaagattgaaggagaagtcagagagaggatgctggtttcttactaccgatacagtgctgctcgatcttctgctgattcaaatatggacgatatttgtaagctgcttcgaagtacaggttattctagccaaccaggtgccaaaagaccatccaactatcccgagagctatttccagagagtgcctatcaacgaatccttcatcagtatggtcattggtcgactgagatctgatgatatttacaaccaggtctcagcgtatcctttgccggagcatcgcagcacagccctggcaaaccaagctgccatgctgtacgtgattctctactttgagccttccatccttcacacccatcaagcaaaaatgagagagatagtggataaatactttccagataattgggtaattagtatttacatggggatcacagttaatctagtagatgcttgggaaccttacaaagctgcaaaaactgctttaaataataccctggacctttcaaatgtcagagaacaggcaagcagatatgctactgtcagtgaaagagtgcatgctcaagtgcagcaatttctaaaagaaggttatttaagggaggagatggttctggacaatatcccaaagcttctgaactgcctgagagactgcaatgttgccatccgatggctgatgcttcatacagcagactcagcctgtgacccaaacaacaaacgccttcgtcaaatcaaggaccagattctaacagactctcggtacaatcccagggatcctcttccagctgctgttagatactgcacaatttga

SEQ ID NO: 184991 - DNA, 2378 bp, Homo Sapiens
aactttgtacaaaaaagttggcaacgaatccttcatcagtatggtcattggtcgactgagatctgatgatatttacaaccaggtctcagcgtatcctttgccggagcatcgcagcacagccctggcaaaccaagctgccatgctgtacgtgattctctactttgagccttccatccttcacacccatcaagcaaaaatgagagagatagtggataaatactttccagataattgggtaattagtatttacatggggatcacagttaatctagtagatgcttgggaaccttacaaagctgcaaaaactgctttaaataataccctggacctttcaaatgtcagagaacaggcaagcagatatgctactgtcagtgaaagagtgcatgctcaagtgcagcaatttctaaaagaaggttatttaagggaggagatggttctggacaatatcccaaagcttctgaactgcctgagagactgcaatgttgccatccgatggctgatgcttcatacagcagactcagcctgtgacccaaacaacaaacgccttcgtcaaatcaaggaccagattctaacagactctcggtacaatcccaggatcctcttccagctgctgttagatactgcacaatttgagtttatactcaaagagatgttcaagcaaatgctttcagaaaagcaaaccaaatgggagcattacaagaaagagggttcggagcggatgactgagcttgctgatgtcttttcaggagtgaaacccctaaccagagtggagaaaaatgaaaaccttcaagcttggttcagagagatctcaaaacaaatattgtctttaaattatgatgattctactgctgcgggcagaaaaactgtacaactgatacaagctttggaagaggttcaagaattccaccagttggaatccaatctgcaagtatgtcagtttcttgccgatactcgaaagtttcttcatcaaatgatcagaaccattaacattaaagaggaggttctgatcacaatgcagatcgttggggacctttctttcgcttggcagttgattgacagtttcacatccatcatgcaagaaagcataagggtaaatccatccatggttactaaactcagagctaccttcctaaagcttgcctctgccctcgatctgccccttcttcgtattaatcaggcaaatagccccgacctgctcagcgtgtcacagtactattctggagagttggtatcctatgtgagaaaagttttgcagatcatcccagaaagcatgtttacatctcttctaaagatcataaagcttcagacccacgacattattgaagtgcctacccgcctggacaaagacaagctgagggactatgctcagctaggcccacgatacgaggttgccaagcttactcatgctatttccatttttactgaaggcatcttaatgatgaaaacgactttggttggcatcatcaaggtggatccaaagcagttgctggaagatggaataaggaaagagcttgtgaagcgcgttgcctttgccctgcataggggactgatattcaaccctcgagccaagccaagtgaattgatgcccaagctgaaagagttgggagcgaccatggatggattccatcgttcttttgaatacatacaggactatgtcaacatttatggtctgaagatttggcaggaagaagtatctcgtatcataaattacaacgtggagcaagagtgtaataactttctaagaacgaagattcaagattggcaaagcatgtaccagtccactcatattccaatacccaagtttacccctgtggatgagtctgtaacgtttattggtcgactctgcagagaaatcctgcggatcacagacccaaaaatgacatgtcacatagaccagctgaacacttggtatgatatgaaaactcatcaggaagtgaccagcagccgcctcttctcagaaatccagaccaccttgggaacctttggtctaaatggcttagacaggcttctgtgctttatgattgtaaaagagttacagaatttcctcagtatgtttcagaaaattatcctgagagacagaactgttcaggacactttaaaaaccctcatgaatgctgtcagtcccctaaaaagtattgtcgcaaattcaaataaaatttatttttccgccattgccaaaacacagaagatttggactgcgtatctcgaggctataatgaagttgggcagatgcagattctgagacaacagattgccaatgaattaaattattcttgtcggtttgattctaaacatctggcagctgctctggagaatctcaataaactctcctagcagacattgaagcccactatcaggacccttcacttccttacccc

SEQ ID NO: 184992 - DNA, 1108 bp, Homo Sapiens
tttgtacaaaaaagttggcgtgctgcccctagaaagagctggctgcagtacttcccgctagctcagattcacttcgtcagtggcgagcgactcatcactgacccggccggcgagatggggcgagtccaggacttcctgggcattaagagattcatcacggacaagcacttctatttcaacaagaccaaaggattcccttgcttgaaaaaaacagaatcgagcctcctgcctcgatgcttgggcaaatcaaaagggagaactcatgtacagattgatcctgaagtgatagaccagctccgagaattttatagaccgtataatatcatttttttatgaaaccgttgggcaggacttcaggtgggaataagcccacgaaaggaaagggctctcaagggctcttctgctcatctcttccgtgagatttgctcccagaccctctgatctccctccaacaaaccctggctccagccccctttcccaacttgagttgcatcatcttggaaccaggaagcccagctaaagccaagagaccagagagtccctgccactagttttcatcagtctgttcaagcaaagttgatctgctcctggcacgtccagtaaattccagaatcattctcctttctgcccataaagggccttggagaattgctttaagaagagtgaatgttccaatgatgatagatattataagcgatgatggttctgttgctatgaacacagcagtcggtccctgtcattgtccacccaggagtggccttgttaattccaagtggcatgtatcttccctctgagcttcatttcttcagatgctctgggtggtgggatgggagaccatcctcacccctcctcagaccttatcaattcattgagagaatgcaaagctgaaagcacctccggccactcctgggagacagaccctttggtgatgaaataaaccaatgacttcagagcctatggtctcaactgtgcttgaaaaacactgtctctgaatacaagtttgtgattctccctgctccctgtggacaaaatcacataattctgctgttacgggtactttgctcatacaagcttccatgttcagcatgcaatggaattcatgcttgtc

SEQ ID NO: 184993 - DNA, 1289 bp, Homo Sapiens
  misc_feature (266)..(284): n is a, c, g, or t
ttggcactgctgttaacagtaatgtgtccctttcattttctggatcaagccttctcagcggtgggtctggatgtgggtaaactaaggtaaaggggatgatattccacaaactaattatgcacacagaaaatctgtggagcctatcagaccccaagtgtcttgaaatgtttgtagaaacccactaaaatgccccttctctgggtgtgggcccttattgcagctgtctcacagcctgagctgtggtacagagaaatgggggttctccnnnnnnnnnnnnnnnnnnnccccaatggcagcttttctcccgttgttttaccttcctatttcccaaacagttcctcttattttgtcttttgcaccagtttctggaggcccttgtcatttcaaaaaggatagtctcttttcttactctggcaaacctgtgagtgattccacaaagatacagtattacttagctatctgaattatgatagaaaaggtcctagttaggttcctatataaagcatttggaagatgaccttgttgcccttgaaacttgaaaatagggattctggggtgaggatacaaagacattgtcttgcatatccataagcaggtcttagagcattattccaaactctagctgtttcagtagttctatgaggattgcaagtcataggtgtgtgtggcatatcagtccatctccctcatctccattctcagtttcttccccacaaaatttggaatcaaagcttttatgacgtttgccaattgcagaacttcttcagctaaggttaatttgacgctatgataaaactgagagatgtcaaaaagcctcttagaaattttaatcttgaaagacttttcagggtatctcattttttaggtgggggtggcaggtgtatttcttttttaacaaataaaaggcatttaagtaaaactaaaatgaaaaaagtaggccttctgacattgtgtacttggtggttctgtccctctgcctgtaacaaatctcatttttgttaccaagaactgtatgaaagaagtaaatccaccccgattctgtatgattaattccatctgtgtttgtcatttctgactggaaaacttcttactccataccttgttcgatatggaggacaaataattggattgtctgataagtctgccaataaactatccagaaatagcaagtgtaatagtccccactatacgaattttatggtttgtataaacactaacattttccccttctgtagttgtatgaaaaaacaaatattgttagcatagtagataaattgttatgaaatacc

SEQ ID NO: 184994 - DNA, 4538 bp, Homo Sapiens
  misc_feature (4098)..(4116): n is a, c, g, or t
ttggctgctaacaacctcaccatgaactgttgtgagaactgtgggggttactgttacagtgggtcgggacaatgccacatgcttcagatagagggacagtctaagaagttttgtagttcatcgtgtatcacggcatacaagcagaaatcagccaaaattacaccgtgtgcgctttgcaaatcattgagatcctcagcagaaatgattgaaaataccaatagcttggggaagacagagcttttctgttctgttaattgcttatctgcttacagagttaaaatggttacttctgcaggtgtacaagttcagtgtaacagttgtaaaacctcagcaattcctcagtatcacctagccatgtcagatggaagtatacgcaacttctgcagctacagctgtgtggtagctttccagaatttattcaacaaaccaactggaatgaattcttcagtagtgcccttgtctcagggccaagtaattgtaagcatccccacaggttccacagtgtcagccggaggaggtagcacatctgctgtttctcccacctccatcagtagctctgctgcagctggtctccagcgtctcgctgcccagtcccagcatgttgggtttgcacgaagtgttgtgaaactcaaatgtcaacactgtaaccgtctttttgccacaaaaccagaacttcttgactataagggcaaaatgtttcagttctgtggcaagaattgttctgatgaatataagaaaataaataatgtaatggcaatgtgtgaatattgtaaaattgagaaaattttaaaggagactgttcggttctcaggtgctgacaagtcattctgtagtgaaggttgcaaattgctttataaacatgacttggcaaaacgctggggaaatcactgtaaaatgtgcagttattgtttacagacatctcccaaattggtacagaataatttaggagggaaagtggaagagttctgttgtgaagaatgcatgtccaaatatacagttttgttctatcagatggccaaatgtgatgcttgtaagcgacagggtaaactcagtgagtccttgaaatggcgaggggaaatgaaacatttctgtaacctgctttgtatcttgatgttctgtaatcagcaaagtgtatgtgacccgccttcacaaaataatgcagcaaatatttccatggttcaagctgcttcagcaggacccccatctctgagaaaagattcgactccagttatagccaatgtagtatcattggcaagtgcccctgctgctcagcctacagtgaattctaacagtgtcttacaaggtgcagttccaacagtaacagcgaaaatcatcggtgatgcaagtactcaaacagatgccctgaaactgccaccttcccaacctccaaggcttttgaagaacaaagctttattatgcaaacccatcacacagactaaagccacctcttgcaaaccacatacccaaaacaaagaatgccagacagaagacactccaagtcagccccagattattgtggtgccagttcccgtaccagtgtttgttcccatacctcttcacctttatactcaatatgctccagtcccatttggaattccagttccaatgcctgtccctatgcttattccatcttcaatggatagtgaagataaagtcacagagagtattgaagacattaaagaaaagcttcccacacatccatttgaagctgatctccttgagatggcagaaatgattgcagaagatgaagagaagaagactctatctcagggagagtcccaaacttctgaacacgaactctttctagacaccaagatatttgaaaaagaccaaggaagtacatacagtggtgatcttgaatcagaggcagtatctactccacatagctgggaggaagagctgaatcactatgccttaaagtcaaatgctgtgcaagaggctgattcagaattgaagcagttctcaaaaggggaaactgaacaggacctggaagcagattttccatcagactcctttgacccacttaataaaggacagggaatccaggcacgttcccgaacaagacgacgacacagagatggcttcccccaacccagacgaagaggacggaagaagtctatagtggctgtggagcccaggagtcttattcaaggagcctttcaaggctgctcagtgtccgggatgacactgaaatacatgtatggggtaaatgcttggaagaactgggttcagtggaaaaatgccaaggaagagcagggggatctaaaatgtggaggggttgaacaggcctcatctagcccacgttctgaccccttaggaagtactcaagaccatgcactctctcaagaatcctcagagccaggctgtagagtccgctctatcaagctgaaggaagacattctgtcctgcacttttgctgagttgagtttgggcttatgccagtttatccaagaggtgcggagaccaaatggtgaaaaatatgatccagacagtatcttatacttgtgccttggaattcaacagtacctgtttgaaaatggtagaatagataacatttttactgagccctattccagatttatgattgaacttaccaaactcttgaaaatatgggaacctacaatacttcctaatggttacatgttctctcgcattgaggaagagcatttgtgggagtgcaaacagctgggcgcttactcaccaatcgtccttttaaacaccctccttttcttcaataccaaatacttccaactaaagaatgttactgagcacttgaagctttcctttgcccatgtgatgagacggaccaggactctgaagtacagtaccaagatgacatatctgaggttcttcccacctttacagaagcaggagtcagaaccagataaactgactgttggcaagaggaaacgaaatgaagatgatgaggttccagtgggggtggagatggcagagaatactgacaatccactaagatgcccagtccgactttatgagttttacctgtcaaaatgttctgaaagtgtgaagcaaaggaatgatgtgttttaccttcaacctgagcgctcctgtgtcccgaatagccccatgtggtactccacattcccgatagaccctgggaaccctggacaccatgttaacacgtattctcatggtgagggaggtacatggaagaacttgccaaagccaaatctgaagactctgatgttgaattatcagattaaaacggaagtgaggttcttattttcatacatattggtatgcaccaaactgtgaatgcatccagctgttggaaaatgatgtataagtctaagtcctcttgacttgaccataagatcatggaaaacagatgacttgtgaaccccacagtgtggatgtgcaaatgaaaattgaaggaaagaatatgaactgagaaatgttctttggcagtgatatagttcttagacatcttcagaatgactaatttctccgagtggtgcataatcttattttgtttgggagtaacaaatcgtggaatatttttaaggaaaactgttgtataaaactttaccatagtaaccttagaccttagagaggtagctttggagtgaaactttggctgcaataggctactttggcaagccctccgtaaaagtcagaggagagatcagtacagagctaagagtgacatcaaatgaggactgtgggacccagatttgaagacccaataaaaatactcaactttttaaaaaagatagtgaagtggtcttgattgattttgattttcactgccaagccaatcatgtgaaggacagaagcttttgccatgggcccctcacatcagggaaaatgaccttcactgctgttaacagtaatgtgtccctttcattttctggatcaagccttctcagcggtgggtctggatgtgggtaaactaaggtaaaggggatgatattccacaaactaattatgcacacagaaaatctgtggagcctatcagaccccaagtgtcttgaaatgtttgtagaaacccactaaaatgccccttctctgggtgtgggcccttattgcagctgtctcacagcctgagctgtggtacagagaaatgggggttctccnnnnnnnnnnnnnnnnnnnccccaatggcagcttttctcccgttgttttaccttcctatttcccaaacagttcctcttattttgtcttttgcaccagtttctggaggcccttgtcatttcaaaaaggatagtctcttttcttactctggcaaacctgtgagtgattccacaaagatacagtattacttatctatctgaattatgatagaaaaggtcctagttaggttcctatataaagcatttggaagatgaccttgttgcccttgaaacttgaaaatagggattctggggtgaggatacaaaagacattgtcttgcatatcataagcaggtcttagagcatttattccaactctagctgtttcagtagttctatgaggattgcaagtcataaggtgtgtgtgcatatcagtcccatctccctcatctccattctcaagtt

SEQ ID NO: 184995 - DNA, 1721 bp, Homo Sapiens
  misc_feature (772)..(784): n is a, c, g, or t
  misc_feature (884)..(961): n is a, c, g, or t
gagcaatgctactttaaaatcgccaactttgtacaaaaaagttgggtctcgagctctcgctggccttcgggtgtacgtgctccgggatcttcagcacccgcggccgccatcgccgtcgcttggcttcttctggactcatctgcgccacttgtccgcttcacactccgccgccatcatggtgaagctcgcgaaggcaggtaaaaatcaaggtgaccccaagaaaatggctcctcctccaaaggaggtagaagaagatagtgaagatgaggaaatgtcagaagatgaagaagatgatagcagtggagaagaggtcgtcatacctcagaagaaaggcaagaaggctgctgcaacctcagcaaagaaggtggtcgtttccccaacaaaaaaggttgcagttgccacaccagccaagaaagcagctgtcactccaggcaaaaaggcagcagcaacacctgccaagaagacagttacaccagccaaagcagttaccacacctggcaagaagggagccacaccaggcaaagcattggtagcaactcctggtaagaagggtgctgccatcccagccaagggggcaaagaatggcaagaatgccaagaaggaagacagtgatgaagaggaggatgatgacagtgaggaggatgaggaggatgacgaggacgaggatgaggatgaagatgaaattgaaccagcagcgatgaaagcagcagctgctgcccctgcctcaaggatgaagacgatgaggatgacgaagatgatgaggatgacgatnnnnnnnnnnnnnagatgactctgaagaagaagctatggagactacaccagccaaaggaaagaaagctgcaaaagttgttcctgtgaaagccaagaacgtggctgaggatgannnnnnnnnnnnnnnnnnnnnnnnnnnnnnnnnnnnnnnnnnnnnnnnnnnnnnnnnnnnnnnnnnnnnnnnnnnnnnggaggaggaagaagaggaggaggaagagcctgtcaaagaagcacctggaaaacgaaagaaggaaatggccaaacagaaagcagctcctgaagccaagaaacagaaagtggaaggcacagaaccgactacggctttcaatctctttgttggaaacctaaactttaacaaatctgctcctgaattaaaaactggtatcagcgatgtttttgctaaaaatgatcttgctgttgtggatgtcagaattggtatgactaggaaatttggttatgtggattttgaatctgctgaagacctggagaaagcgttggaactcactggtttgaaagtctttggcaatgaaattaaactagagaaaccaaaaggaaaagacagtaagaaagagcgagatgcgagaacacttttggctaaaaatctcccttacaaagtcactcaggatgaattgaaagaagtgtttgaagatgctgcggagatcagattagtcagcaaggatgggaaaagtaaagggattgcttatattgaatttaagacagaagctgatgcagagaaaacctttgaagaaaagcagggaacagagatcgatgggcgatctatttccctgtactatactggagagaaaggtcaaaatcaagactatagaggtggaaagaatagcacttgggagtggtgaatcaaaaactctggttttaaggcaacctctcctacagtgcaaacagaagaaactctttcaggaagtatttgagaaagcaacttttatcaaagt

SEQ ID NO: 184996 - DNA, 1648 bp, Homo Sapiens
  misc_feature (1519)..(1551): n is a, c, g, or t
ccaactttgtacaaaaaagttggctttaacaaatctgctcctgaattaaaaactggtatcagcgatgtttttgctaaaaatgatcttgctgttgtggatgtcagaattggtatgactaggaaatttggttatgtggattttgaatctgctgaagacctggagaaagcgttggaactcactggtttgaaagtctttggcaatgaaattaaactagagaaaccaaaaggaaaagacagtaagaaagagcgagatgcgagaacacttttggctaaaaatctcccttacaaagtcactcaggatgaattgaaagaagtgtttgaagatgctgcggagatcagattagtcagcaaggatgggaaaagtaaagggattgcttatattgaatttaagacagaagctgatgcagagaaaacctttgaagaaaagcagggaacagagatcgatgggcgatctatttccctgtactatactggagagaaaggtcaaaatcaagactatagaggtggaaagaatagcacttggagtggtgaatcaaaaactctggttttaagcaacctctcctacagtgcaacagaagaaactcttcaggaagtatttgagaaagcaacttttatcaaagtaccccagaaccaaaatggcaaatctaaagggtatgcatttatagagtttgcttcattcgaagacgctaaagaagctttaaattcctgtaataaaagggaaattgagggcagagcaatcaggctggagttgcaaggacccaggggatcacctaatgccagaagccagccatccaaaactctgtttgtcaaaggcctgtctgaggataccactgaagagacattaaaggagtcatttgacggctccgttcgggcaaggatagttactgaccgggaaactgggtcctccaaagggtttggttttgtagacttcaacagtgaggaggatgccaaagctgccaaggaggccatggaagacggtgaaattgatggaaataaagttaccttggactgggccaaacctaagggtgaaggtggcttcgggggtcgtggtggaggcagaggcggctttggaggacgaggtggtggtagaggagccgaggaggatttggtggcagaggccggggaggctttggagggcgaggaggcttccgaggaggcagaggaggaggaggtgaccacaagccacaggaaagaagacgaagtttgaatagcttctgtccctctgctttcccttttccattgaaagaaggactctggggtttttactgttacctgatcaatgacagacccttctgaggacattccaggacagtatacagtcctgtggtctccttggaaatccgtttagttaacatttcaggggcaataccgtgttggttttgactggatattcatataaactttttaaagagttgagtgatagagctaacccttatctgtaagttttgaatttatattgtttcatcccatgtcaaaaaccattttttcctacaaatagtgtgggtttggtggtggtttcnnnnnnnnnnnnnnnnnnnnnnnnnnnnnnnnnggcgttcgtggggttgtaaaagaaaagaaagcagaatgttttatcatggtttttgcttcaggggctttaggacaaattaaaagtcaatttgggtgcc

SEQ ID NO: 184997 - DNA, 1906 bp, Homo Sapiens
  misc_feature (218)..(230): n is a, c, g, or t
  misc_feature (709)..(729): n is a, c, g, or t
  misc_feature (1201)..(1277): n is a, c, g, or t
  misc_feature (1374)..(1434): n is a, c, g, or t
aggaaatcaaaccaatatttcttttataaagcaggaaagtgcattaatgttaataaaacccttacatttcaatagacagaacataccctttacttttcccatccttgctgactaatctgatctccgcagcatcttcaaacacttctttcaattcatcctgagtgactttgtaagggagatttttagccaaaagtgttctcgcatctcgctctagattnnnnnnnnnnnnntgagctctgtggcctgaaaaaccaaaggtggggggcaacaacaaaaagaggggaaaaacacacatagctctattcaacaaataatttgagatcctataatgtacaaggctcggtgctaaatatggagatatagcagtgtcaacacacaagtggtccctccatgttgtcacagctgatgtcaaactctctgttaggtacactggagttcaacctagagtagacgcgcataacaaaaaaagtgaatgtaccaattcaaaacattacaactgtatatagggagtaattagggacctaatctagtttcagtgaagaaagatccctttacgttaatttaggtgcatctaataattcttgttctgtataaaagtgctcttgcttgcctaactcaggaatttacactataacactgacaagcagtgccaagtactcttgtaaacactgtagctcatttattcccacattaagaggaaaccaaaggnnnnnnnnnnnnnnnnnnnnnaagaggaaaccaagggaaatgggttacaaagcattttccctagcagtctagctcctgagttcattgcataatctcataaagccttacatacctttcttactgtcttttccttttggtttctctagtttaatttcattgccaaagactttcaaaccagtgagttccaacgctttctccaggtcttcagcagattcaaaatccacataaccaaatttcctagtcataccaattctgacatccacaacagcaagatcatttttagcaaaaacatcgctgataccagtttttaattcaggagcagatttgttaaagtttaggtttccaacaaagagattgaaagccgtagtcggttctgtgccttccactttctgtttcttggcttcaggagctgctttctgtttggccatttccttctttcgttttccaggtgcttctttgacaggctcttcctcctcctcttcttcctcctccnnnnnnnnnnnnnnnnnnnnnnnnnnnnnnnnnnnnnnnnnnnnnnnnnnnnnnnnnnnnnnnnnnnnnnnnnnnnnttcatcctcagccacgttcttggctttcacaggaacaacttttgcagctttctttcctttggctggtgtagtctccatagcttcttcttcagagtcnnnnnnnnnnnnnnnnnnnnnnnnnnnnnnnnnnnnnnnnnnnnnnnnnnnnnnnnnnnnngaggcaggggcagcagctgctgctttcatcgctgctggttcaatttcatcttcatcctcatcctcgtcctcgtcatcctcctcatcctcctcactgtcatcatcttcctcttcatcactgtcttccttcttggcattcttgccattctttgcccccttggctgggatggcagcacccttcttaccaggagttgctaccaatgctttgcctggtgtggctcccttcttgccaggtgtggtaactgctttggctggtgtaactgtcttcttggcaggtgttgctgctgcctttttgcctggagtgacagctgctttcttggctggtgtggcaactgcaaccttttttgttggggaaacgaccaccttctttgctgaggttgcagcagccttcttgcctttcttctgaggtatgacgacctcttctccactgctatcatcttcttcatcttctgacatttcctcatcttcaccaa

SEQ ID NO: 184998 - DNA, 965 bp, Homo Sapiens
  misc_feature (68)..(77): n is a, c, g, or t
  misc_feature (761)..(770): n is a, c, g, or t
gaaaaatattgctaaaagtgcatttaaggagattgggagacaattagcagaatggagaaagtaagtcnnnnnnnnnnccaaattattaattgtcctgtgtctatgtacctctagctgttcttttttgtacttttctggttccaaaccagtttattctgtggttctataataagttttgatataatcttggcttcttaaaaactgtgtatcattaaaatatatgttctgcaagaattaaaactgagtccatgaaaataccataggaagacataaaactttaaaaggcaactcaaagatgatggaaacgcacttacaagtggtgaccaaaatttttaggtgaagtcgagcactctaattagagaactggaggaaccacatataacacttaacttcccctaccctgcccctccccaaaagaaaccatgacaaacctagcttttaaaaaatattttaagaaagagaatgaactgtggaatttattggcagccaaggaatgtgtccaagacacatgctgaggttttgaataaaaagtgaacttttgtaatttgaattgggtcccgcttagttcttgaattgttatgaaaatcctatatctgtttgtatatttgcaaaccctttgtattataattgttgatattttccctttttaaaaaataccattgaaatcagcatgacaaaaataacactgttggcacttataggtaacgtgattgattcagtatcttagagtttacagtttgtgttttaaaaaaactgaaggnnnnnnnnnnaagtgcaacatttctgtatactgtaaaagttataataactgaactgtttggtcgagtctttgtgtgttatattccaaggaaaattgaaagtattcagaaattaaaatattatttgatatctgaaacctggctgtccccactcactgtctttacatctagaagagcccctgtgagctctcgcttagctggccgggc

SEQ ID NO: 184999 - DNA, 1167 bp, Homo Sapiens
  misc_feature (486)..(500): n is a, c, g, or t
  misc_feature (532)..(548): n is a, c, g, or t
  misc_feature (608)..(632): n is a, c, g, or t
  misc_feature (700)..(709): n is a, c, g, or t
ctttgtacaaaaaagttggcttcttcttctcccttacaagattttaaactttcttccagatgcctgtggtctctctgatgtagcccatgtggaaagcttgcaggaaaagtctcagtgtgctttggaagaatacgttaggagccagtaccccaaccagccgacgagattcggaaagcttttgcttcgcctcccttccctccgcaccgtctcctcctcagtcatagagcaattgtttttcgtccgtttggggtaaaacccccatcgaaaccctcatccgggatatgttactgtccggcagcagttttaactggccgtatatggcaattcaataaataaataaaataagaagggggagtgaaacagagaaagaaaaggcaaaaggctggtttgtttgcttaatttccttctgttaagaaaggatataaaaggatgttacaagtttgctaaaagaagagaggggaagaatttaatggactgtgaatttcnnnnnnnnnnnnnnngactgtcaaatgaacttttacagaatgcattnnnnnnnnnnnnnnnnnctcctgtgtcggtcaaaacaacttgctacttatcatttttgtataaaaaggaaattagtnnnnnnnnnnnnnnnnnnnnnnnnngaaaaatattgctaaaagtgcatttaaggagattgggagacaattagcaaaatggagaaagtaagtcnnnnnnnnnnccaaattattaattgtcctgtgtctatgtacctctagctgttcttttttgtacttttctggttccaaaccagtttattctgtggttctataataagttttgatataatcttggcttcttaaaaactgtgtatcattaaaatatatgttctgcaagaattaaaactgagtccatgaaaataccataggaagacataaaactttaaaaggcaactcaaagatgatggaaacgcacttacaagtggtgaccaaaatttttaggtgaagtcgagcactctaattagagaactggaggaaccacatataacacttaacttcccctaccctgcccctccccaaaagaaaccatgacaaacctagcttttaaaaaatattttaagaaagagaatgaactgtggcaatttattggcagccaaggaatgtgtccagacacatgctgaggttttgaataaaaagtgaa

SEQ ID NO: 185000 - DNA, 1901 bp, Homo Sapiens
  misc_feature (1482)..(1496): n is a, c, g, or t
  misc_feature (1528)..(1542): n is a, c, g, or t
  misc_feature (1578)..(1631): n is a, c, g, or t
  misc_feature (1694)..(1703): n is a, c, g, or t
tttcttcttctcctcctcctctccccgagttgcctcctttctccgggtgccgtactgccttttttcccctctttcattctttctctccgtctttttctcccccctctgcgcacgaaggatgtgcttctaggtggtgatctgccctcctctctctcttttatcatttctcccccgccgccggcgagttgactctttccctatgtgtgtgaggcggcggcggcagcagcagcagcacgccagcccagacggcggccggtggccagggcggccctggcggcccgggtagcgacaagcagcagcagcagcaacacatcgagtgcgtggtgtgcggagacaagtcgagcggcaagcactacggccagttcacgtgcgagggctgcaagagcttcttcaagcgcagcgtgcggaggaacctgagctacacgtgccgcgccaaccggaactgtcccatcgaccagcaccatcgcaaccagtgccagtactgccgcctcaaaaagtgcctcaaagtgggcatgagacgggaagcggtgcagaggggcaggatgccgccgacccagccgacccacgggcagttcgcgctgaccaacggggatcccctcaactgccactcgtacctgtccggatatatttccctgctgttgcgcgcggagccctatcccacgtcgcgcttcggcagccaatgcatgcagcccaacaacatcatgggtatcgagaacatttgcgaactggccgcgaggatgctcttcagcgccgtcgagtgggcccggaacatccccttcttccccgacctgcagatcacggaccaggtggccctgcttcgcctcacctggagcgagctgtttgtgttgaatgcggcgcagtgctccatgcccctccacgtcgccccgctcctggccgccgccggcctgcatgcttcgcccatgtccgccgaccgggtggtcgcctttatggaccacatacggatcttccaagagcaagtggagaagctcaaggcgctgcacgttgactcagccgagtacagctgcctcaagggcatagtcctgttcacctcagatgcctgtggtctctctgatgtagcccatgtggaaagcttgcaggaaaagtctcagtgtgctttggaagaatacgttaggagccagtaccccaaccagccgacgagattcggaaagcttttgcttcgcctcccttccctccgcaccgtctcctcctcagtcatagagcaattgtttttcgtccgtttggtaggtaaaacccccatcgaaaccctcatccgggatatgttactgtccggcagcagttttaactggccgtatatggcaattcaataaataaataaaataagaagggggagtgaaacagagaaagaaaaggcaaaagactggtttgtttgcttaatttccttctgttaagaaaggatataaaaggatgttacaagtttgctaaaagaagagaggggaagaatttaatggactgtgaatttcnnnnnnnnnnnnnnngactgtcaaatgaacttttacagaatgcattnnnnnnnnnnnnnnnctcctgtgtcggtcagaacaacttgctacttatcannnnnnnnnnnnnnnnnnnnnnnnnnnnnnnnnnnnnnnnnnnnnnnnnnnnnnatattgctaaaagtgcatttaaggagattgggagacaattagcagaatggagaaagtaagtcnnnnnnnnnnccaaattattaattgtcctgtgtctatgtacctctagctgttcttttttgtacttttctggttccaaaccagtttattctgtggttctataataagttttgatataatcttggcttcttaaaaactgtgtatcattaaaatatatgttctgcaagaattaaaactgagtccatgaaaataccataggaagacataaaa

SEQ ID NO: 185001 - DNA, 2926 bp, Homo Sapiens
ttggcaaagatgaggatgagggctgggaagccagagactcatcgccacatttccaggctgagcagcgtgttatgtcccgggtacactctctggagcggcgtctggaagctcttgctgctgaattttcctccaactggcagaaggaggccatgcggctggaacgtctggagctgcggcaaggggctcctggccagggaggtggtggtggcctgagccacgaggacaccctggcgctgctggaggggctagtgagccgccgtgaagctgccctgaaggaggatttccgcagggaaactgctgctcgcatccaggaagaactgtctgccctgagagcagagcatcagcaagactcagaagacctcttcaagaagatcgtccgggcctcccaggagtccgaggctcgcatccagcagctgaagtcagagtggcaaagcatgacccaggagtccttccaggagagctctgtgaaggagctgaggcggctggaggaccagctggccggcctgcagcaggagctggcggctctggcactgaagcagagctcggtggcggaagaagtgggcctgctgccccagcagatccaggccgtgcgggacgacgtggaatctcagttcccggcctggatcagtcagttccttgcccgaggtggagggggccgcgtggggctccttcagagagaggagatgcaagctcagctgcgagagctggagagcaagatcctcacccatgtggcagagatgcagggcaagtcggccagggaagccgcggcctccctgagcctgacgctgcagaaagaaggtgtgattggagtgacagaggagcaggtgcaccacatcgtgaagcaggccctgcagcgctacagtgaggaccgcatcgggctggcagactacgccctggagtcaggaggggccagcgtcatcagcacccgatgttctgagacctacgagaccaagacggccctcctcagcctcttcggcatccccctgtggtaccactcccagtcaccccgagtcatcctccagccagatgtgcacccaggcaactgctgggccttccaggggccacaaggcttcgccgtggtccgcctctctgcccgcatccgccccacagccgttaccttagagcatgtgcccaaggccttgtcacccaacagcactatctccagtgcccccaaggacttcgccatctttgggtttgacgaagacctgcagcaggaggggacactccttggcaagttcacttacgatcaggacggcgagcctattcagacgtttcactttcaggcccctacgatggccacgtaccaggtggtggagctgcggatcctgactaactggggccaccccgagtacacctgcatctaccgcttcagagtgcatggggagcccgcccactagccctgcttactggtgcctgctgccagccatctgggagtgggtgaacagcaccccgccgcttcccccacacgcttgctcggcgctctgacttctaggagcacaagagaggagcctgtggccccatgcagatgaaaaggacgggcagggtctcctgagcagcaggtggctcgaggcggttagcaggctccagcagctcccttcttccttccctctgtgcccgtggcgtctgcttcccatcctgggagtgtgtatatatgtagcatatcatgggggactgggaagttgggagaggtaggacctgactggtcttggctggggtcaggggctggtgcctgggagctgatgaagcaggtgccagggctgtgggaggggcaagctacggcctgggctaggtgagctgcctctgcccctgggcaaggaagcgaggccctctgggaggagggtgcttagctccagagcaggatgggacttccccaggcaggaagcacttgatggagagctgcccagctctcctacaaggttagtgccctccacctagggaagcatgaaccacagggtccctgagggccttcgacaaaagtgtgtatttgtcccggggagggtagcagtgggccatggggcttcttgtgccctaaaggggactggctgctgtgatcttctaaggggcccagggccaaccctgtaggcttcccctctgctggggacggtagttgcttttctctctcctgatgctgggttggggcccaccctgctccctgttcctgctagggcctgccagtgcccctgagcttgctttccacattctcccagggtatggagacctagacctgtctttggggccattagcatctggggttatagcaagaagagtggggagcatggaactcctgggctcttgtggggacgttcagggtatcggggtgcgaggtctgtctgcaccggcccccacatctaaccaggccctgatgtaggggtcgtccgctcaggctgcccccttgggctcttgcagctcttgttcaggtagtcgcccttctggtttgttctctgtggggcagttggtgggggctgggggaagaggctggcagaagttaccctggatagggaagggggaggaggggacttttagagccagcaggccccactgtattatgtatatatttttcaaggtctgtttttctaactgaaaagctaagggcttgattcctagccccgttctgtggggcactgggtgatactcagtttcttgttcctggccgtggagaggggcctggggcactggttccggctgtgtctggtggtctggctgcggggaaggggcaagaaggcgggcaggccttcactgcagcactgagcctcaaatccgctctggagcatgaggctggatgcagtggtggtgaggccgccccgctccatcccgaggcagccagggtttgttttgcgctctcctgtcccaaatgctgcactattggttcttagttttttatctccagatccctatttatgcctatgcaaaaaataatgacgcccca

SEQ ID NO: 185002 - DNA, 1414 bp, Homo Sapiens
  misc_feature (230)..(259): n is a, c, g, or t
tttctatcaaatgacttccaacactcttaagtctcaggtattcttaaatctgtatcatcaaacatgaagcttctcttgtttgttagagtaattaatctttctttggattaaagtttccctttgaaataaaaccacctacctaatctgactgctaaatttctagcttctttgttttaaatatgctcaggagtcaacccaaattctgcagcaaataagtttgcttattaacnnnnnnnnnnnnnnnnnnnnnnnnnnnnnngatgactaattctacagatagctgtaaggatgaattactcaagttcaaaatcaaattctgattctaaacacataacaattgtttacattcaggattaagatgtctttaagagttgaaacgactttggagatcatccagcccaacttccatccagatatcacgcctctcacatatagtagtcttctgaattataaaaatttataaagttacttccaaaaaaagctacataaataaaaattatctatttatagaaatatctatttagcagttccataatttaaaatattcaaatcaaattgggtaggactggtttgcctctcactcccacagactatatttatacctcagacacagcaagttacatttaaacaatgagtgtagtactacttaactaaaatggaaaaaatagtactcttaacataatccctaattttttcatgaacataaaactccaagtcatttatgtgaactatatctcaatgtagctgtaggaaaaataaaaacctgtgctaacctggactttggtctcatttaagatttggttctggaatgcaaatatggtttttgaaagcccaataaaattaattcttgtatagtctgtatatattgtttacaaggactacaaacactgcatcacaaatcggaggctttggcaaataactaagtgtccaacatagaaaataactatttggtcaaaagtataaaaggtctgaccttatttgaaatacgaaaaagctgagtacttggaagatacgtgaaaatactcagcatagatattatgaaaagctgaataacaaagtaaccttttttctcaaattatttcaggccacagtatataacggaacttattgctatttgaagtttcattaaaaataggttcatatatagaagaaattgtgtcagtaatacctcttcactaatataaaatatgccccttttagaagacgtgttctctagatctcatttctaaaactctgtatttttctcatttctaaaacttaagtatccaatcaaactgaccttactaaaatcccacaaattataagtcaattaatgttctgatttcattaattttggcttgtttcatttcgtcagcatttggttttttagttccaaaggctcctgctgcaagttctctctttttgttttgtccaa

SEQ ID NO: 185003 - DNA, 2320 bp, Homo Sapiens
  misc_feature (2058)..(2087): n is a, c, g, or t
ttggcttagagtgagaactcactcatcaccaaggggatagcactaagccactcaggagggatccaccgctatgagccatacaccttccacctccaggcccctcatccaactctggagattacatttcaacatgagatttggaggagatgaacatccaaacgatttcaatgatcaagaattaaaatttcacaatctgaacaagataccgtcttcctggctctcaagtaaaggatctagcattctacagagcaggctagaactgacttatattcccttttttgtcttcaaataatccaggaccagtttggacaacatataaaatcagatgtacacttgaatttttatgtttattatggtcctgatcgtattagagaaccggccttactttcaaaacaggatattgttttgactacgtataatattttaactcatgactatggaactaaaggagatagtccattacatagcataaggtggctaagagtgatcctggatgaaggacatgccatacgaaatccaaatgctcagcagacaaaagctgtacttgacttagaatcagaaagaagatgggttttgacaggtactccaatccagaattctttaaaggacttgtggtctcttctttcctttttaaaacttaaaccatttattgatagagaatggtggcatagaacaatacagcgtcctgtcacaatgggagatgaaggaggacttaggcgtttacagtccctaattaaaaatattacacttagaagaacaaagacaagcaaaattaaaggaaaacctgttttggagttaccagaacgtaaagtatttattcagcacattacactttcagatgaagagagaaagatttatcagtctgtgaaaaatgaaggcagagccactattggaaggtattttaatgaagggactgtcctggcacattatgcagatgtcctgggtcttttgcttagactgcggcaaatttgttgccatacttaccttcttacaaatgcagtgtcttccaatggcccctcaggaaatgatacacctgaagaactgagaaagaagttaataaggaagatgaagttaattctgagctcaggttcagatgaggaatgtgcaatttgcctggattctttaacagttcctgtgataacacattgtgcacatgtattttgtaaaccctgtatttgccaagtcattcagaatgagcagccacatgctaaatgccctttatgcagaaatgatatacatgaagataatttattagaatgtcctccagaagaattagcacgtgacagtgagaaaaagtctgatatggaatggacatccagttcaaagattaatgcgctaatgcacgcattgactgacttaagaaagaagaatcccaacataaaaagtttggttgtttctcagtttacaacattcctgtctttaatagaaataccacttaaagcctctggatttgtgtttactcgtttggatggttccatggcccaaaagaaaagagttgaatcaattcagtgttttcaaaacactgaagcaggatctccaactataatgcttctgtccttaaaagcaggtggagttggtttgaatctgtctgcagcttctcgagtgtttttaatggatccagcctggaatcctgctgctgaagatcagtgctttgacagatgccatagacttggtcagaagcaagaagttatcatcacaaaattcattgtaaaggactctgttgaagaaaatatgctgaaaatacaaaacaaaaagagagaacttgcagcaggagcctttggaactaaaaaaaccaaatgctgacgaaatgaaacaagccaaaattaatgaaatcagaacattaattgacttataatttgtgggattttagtaagaagactactatatgtgagaggcgtgatatctggatggaagttgggctggatgatctccaaagtcgtttcaactcttaaagacatcttaatcctgaatgtaaacaattgttatgtgtttagaatcagaatttgattttgaacttgagtaattcatccttacagctatctgtagaattagtcatcnnnnnnnnnnnnnnnnnnnnnnnnnnnnnngttaataagcaaacttatttgctgcagaatttgggttgactcctgagcatatttaaaacaaagaagctagaaatttagcagtcagattaggtaggtggttttatttcaaggggaaactttaatccaaagaaagattaattactctaacaaacagagaagcttcatgtttgatgatacagatttaagaatacctgagacttaagagtgtttggaagtcatttgataaaagatga

SEQ ID NO: 185004 - DNA, 1675 bp, Homo Sapiens
gaaaaaaagtgggttggaaggcgatctcgcaggacggtcttagagctgcccgcaggggcgcagcctcatctgagaagactgggcgcgggcgggagggcggcggggccgcaaagcgcctcctcgatgtcctccaggcagcccagcaggtccatgtcgcggagcacgcgtcccagcagctccagcgtggcctcgcgccgcggcgtgcgccgcctccaggtcgccagcatgctgtattgcgcctcgcgcaggcagcgcccgttctgcagctccagccgatcgatctcgtggtcgctcagccctaggcgccgcacgaattccttccagcgcaacgggggcacgttctccaccacggcgtacagcgtcgcggggtcatcagtgtctaggctctgtggcttgtgggcgctgtcctcccacttctgaagggggttggggatggggtcggaggcgagggctgtcgcaaggatggggtcagccccctgatagggtggtgccacctctctgcggggagccgcaaagttgggacagtcaccgggggtataggtggagctggaggtgaaggtggaactgggcacgggactgaagcccagggtgggggtgaagcctggagtgggactgaagcttgggtttggggccaggggcttagtagtagttccttcaagctccccctctttttcaggtgtcgatttcccacaaacaatggagtagagcttggacttccaccgttggtagcgatacattaaaccaatgaagaggagggataaaaggcaaagaccaaagaaaatgaccaggggcaacagcactgtggtgcctgagtcctcagtgcccttaacattctcaatctggggtaggcacaacttcgtgcactccaggcttttcttacagttactacaggagacacactcgttttctcttagaaagaaacctgcatggcaggtgcacacggtgttctgtttctcctggcaggagaggtgcacggtcccattgaggcagaggctgcaattgaagcactggaaaaggttttcactccaataatgccggtactggttcttcctgcagccacacacggtgtcccggtccactgtgcaagaagagatctccacctgacccatttcctttcggcatttggagcagctgaggcagtgtctgaggtggttttctgaagcggtgaaggagccgctctcacactccctgcagtccgtatcctgccccgggcctggacagtcattgtacaagtaggttcctttgtggcacttggtacagcaaatcgaattattttgagggtggatatattttccttggggacacacactatctctcttctccctgtcccctaggtgagggaccagtccaataacccctgaggggtatattcccaccaacagctccaggagcaccagcggcagcagcaggtcaggcacggtggagaggcccatgccagacagctatggcctctcactcccccatttgggctcagggcagtgtggcagcggcagtgctggggcttcccgggactcggtctgtccaggacgtcccaagtgccttggggtgacagttgagggttgagactcgggcatagagatcacggcctggtcccagtgatcttgaaccccaaaggccagaactggagcctcagtccggagaattctgccaacttttttgtacaaagttggctttt

SEQ ID NO: 185005 - DNA, 1708 bp, Homo Sapiens
tttccagaaaaaagtgggggtggaagggcgatctcgcaggacgggtccttagagctgcccgccaggggcgcagccctcatcctgagaagactgggcgcgggcgggagggcggcggggcccgcaaagcgcctcctcgatgtcctccaggcagcccagcaggtccatgtcgcggagcacgcgtcccagcagctccagcgtggcctcgcgccgcggcgtgcgccgcctccaggtcgccagcatgctgtattgcgcctcgcgcaggcagcgcccgttctgcagctccagccgatcgatctcgtggtcgctcagccctaggcgccgcacgaattccttccagcgcaacgggggcacgttctccaccacggcgtacagcgtcgcggggtcatcagtgtctaggctctgtggcttgtgggcgctgtcctcccacttctgaagggggttggggatggggtcggaggcgagggctgtcgcaaggatggggtcagccccctgatagggtggtgccacctctctgcggggagccgcaaagttgggacagtcaccgggggtataggtggagctggaggtgaaggtggaactgggcacgggactgaagcccagggtgggggtgaagcctggagtgggactgaagcttgggtttggggccaggggcttagtagtagttccttcaagctccccctctttttcaggtgtcgatttcccacaaacaatggagtagagcttggacttccaccgttggtagcgatacattaaaccaatgaagaggagggataaaaggcaaagaccaaagaaaatgaccaggggcaacagcactgtggtgcctgcagacaaagcaggtgttggtcagaggagcgggcagaggggggccgcagggatagatggatgggtgggagggatggacgggtgggggcaagaagagggagagggcaggtgagcatgggcaccaggtcacctctcctcacctgagtcctcagtgcccttaacattctcaatctggggtaggcacaacttcgtgcactccaggcttttcttacagctaaaagaagagacggcactggtgaacagaggccctaccattggaggaacacagaaaaacaaccacacagattgttggacatcctttctttacaaatatttttgctgtctcttgatataatttgttttgggaactgatgcagaagaatgaaacacagttaatcatagaatcatttaattttagaattggcagggatcttgaaaaggctgtgtagaaaatgtgaaaagcagtcagggtcagggtgtaaattccagttcattccttggctagcagtgtgaatctaggcaagccattaacccccaagcctcggtttcctcatcaccacagggatcgcccacctctcaggattgaggattaagcaaaatcattatgcctcatttaataagtgcttgagaaggtagccagctagctgttatgggattgttgtttcatcactgttttgctgataagaatcctttggcaaagagaggttaaagggctttttcttaaatgacactgctagttacagtacctgacttcggggagtcggggtcaaacatgcatgtgaaaaatttaaaaacacatgttactggggcagccagagagcaccctgtagaactagcagatcttccatgttgggagttgtcactggacagtgtggagtgatgggaactctatgccaacttttttgta

SEQ ID NO: 185006 - DNA, 931 bp, Homo Sapiens
ttggcactcttcccctcccaccttctctcccctcctctctgctttaattttctcagaattctctggactgaggctccagttctggcctttggggttcaagatcactgggaccaggccgtgatctctatgcccgagtctcaaccctcaactgtcaccccaaggcacttgggacgtcctggacagaccgagtcccgggaagccccagcactgccgctgccacactgccctgagcccaaatgggggagtgagaggccatagctgtctggcatgggcctctccaccgtgcctgacctgctgctgccgctggtgctcctggagctgttggtgggaatatacccctcaggggttattggactggtccctcacctaggggacagggagaagagagatagtgtgtgtccccaaggaaaatatatccaccctcaaaataattcgatttgctgtaccaagtgccacaaaggaacctacttgtacaatgactgtccaggcccggggcaggatacggactgcagggagtgtgagagcggctccttcaccgcttcagaaaaccacctcagacactgcctcagctgctccaaatgccgaaaggaaatgggtcaggtggagatctcttcttgcacagtggaccgggacaccgtgtgtggctgcaggaagaaccagtaccggcattattggagtgaaaaccttttccagtgcttcaattgcagcctctgcctcaatgggaccgtgcacctctcctgccaggagaaacagaacaccgtgtgcacctgccatgcaggtttctttctaagagaaaacgagtgtgtctcctgtaataactgtaagaaaagcctgagtgcacgaagttgtgcctaccccagattgagaatgttaaggcactgaggactcaagcaccacagtgctgttgcccctgtcatttctttggtctttg

SEQ ID NO: 185007 - DNA, 1022 bp, Homo Sapiens
gcttttttataatgccaactttgtacaaaaaagttggctctcccctcctctctgctttaattttctcagaattctctggactgaggctccagttctggcctttggggttcaagatcactgggaccaggccgtgatctctatgcccgagtctcaaccctcaactgtcaccccaaggcacttgggacgtcctggacagaccgagtcccgggaagccccagcactgccgctgccacactgccctgagcccaaatgggggagtgagaggccatagctgtctggcatgggcctctccaccgtgcctgacctgctgctgccgctggtgctcctggagctgttggtgggaatatacccctcaggggttattggactggtccctcacctaggggacagggagaagagagatagtgtgtgtccccaaggaaaatatatccaccctcaaaataattcgatttgctgtaccaagtgccacaaaggaacctacttgtacaatgactgtccaggcccggggcaggatacggactgcagggagtgtgagagcggctccttcaccgcttcagaaaaccacctcagacactgcctcagctgctccaaatgccgaaaggaaatgggtcaggtggagatctcttcttgcacagtggaccgggacaccgtgtgtggctgcaggaagaaccagtaccggcattattggagtgaaaaccttttccagtgcttcaattgcagcctctgcctcaatgggaccgtgcacctctcctgccaggagaaacagaacaccgtgtgcacctgccatgcaagtttctttctaagagaaaacgagtgtgtctcctgtagtaactgtaagaaaagcctggagtgcacgaagttgtgcctaccccagattgagaatgttaagggcactgaggactcagcaccacagtgctgttgcccctggtcattttctttggtctttgcctttatccctcctcttcattggtttaatgtatcgctaccaacggtggaagtccaagctctactccattgtttgt

SEQ ID NO: 185008 - DNA, 1515 bp, Homo Sapiens
ttggcccagcctgcctataaggttgggattagcatgcaatcccccttccccaatcctgtctttttaaaatctcaagtttgcacttaaccttgacaacagcaccctctcctactccagtcctagaactcagtggccttagagaatggggtcccctgcactgaaggtccccgccttgctcccagttccatcctggccaataggctgcgcctcaagaggtgaaagagaaaaaagggagggagggaggaagaattatttagaacaaaaggatggctcgagcacgttagaggcaagtgagaggcacgttggtgagaagagcatgtgcatgtttggggtagctggggcctactgtcccttcattagggaaggaggcttccagaagcggatgtcttctagaaagaaaaattgtgtgaaggctgaaaaggggcttggagttttgtctttgttgattagaaagaaggaagaagtcagctctgagtgtttcaggaagaagagagcaggtagaaagggaatttagtgatttaacacccaagggtccagccatagcaggttggaaaatcctccaaatttggccacagaaactggctaggaaaaaactgccactcattgggccacacgctgggtccccatcagttctcaatgaatggcattgatttacttagcagagagaagtcaccagccacaaaccaatctttgagtttgcaggccctgattccagaatatatgcatccagctcccgggttctcagctggttttgcccacttccctttgactgtccaatccaaagccagtctctcaagttgtatggctcaaagagcagtgaccacaatgggtcatacagtagggacccacctccacaaattagaaccagagttcagactccattgggcacatctgggaggaaggcaacctcctttgtcgtcttgttggtaccagtcattctcaagtatctctgacacctgtggtggttcagtttgctgagcctgccacctggtatgaattagattgggtgtgatgaacattcatccatggatataccctaccattttgcgttgccttataaccaaggcacactccccataagagtttactgcagagaaagaacagcaaaacagccaccctccttgaatttacaactcattatctgcaacaggttttctttaaatccaagacacaggatgggaaatgggtttccccaccaggtactcagaggtctgcaggaagtgactcccgggcaaggcagacttcagtaatccctgaagcgtgagcatgtggactgcatggctgggtggggactggtggatgtctctggagctccagaaccttggagaattcctcatggaattcccctcccagctcttagtgggctctgtgggggtcaggaggagcccttcctccaggttttccttctttcctcctcagcagagaaactggagaaaggacattaaactcagtgcagtcgatttgagtgctgaaatatttccagaatcaatggtggtgctaaactatctccatgtt

SEQ ID NO: 185009 - DNA, 3128 bp, Homo Sapiens
ttggctctgttgcagttggcagttcttttcggtttccctcctgctgtttgggggcatgaaagggcttcgccgccgggagtaaaagaaggaattgaccgggcagcgcgagggaggagcgcgcacgcgaccgcgagggcgggcgtgcaccctcggctggaagtttgtgccgggccccgagcgcgcgccggctgggagcttcgggtagagacctaggccgctggaccgcgatgagcgcgccgagcctccgtgcgcgcgccgcggggttggggctgctgctgtgcgcggtgctggggcgcgctggccggtccgacagcggcggtcgcggggaactcgggcagccctctggggtagccgccgagcgcccatgccccactacctgccgctgcctcggggacctgctggactgcagtcgtaagcggctagcgcgtcttcccgagccactcccgtcctgggtcgctcggctggacttaagtcacaacagattatctttcatcaaggcaagttccatgagccaccttcaaagccttcgagaagtgaaactgaacaacaatgaattggagaccattccaaatctgggaccagtctcggcaaaatattacacttctctccttggctggaaacaggattgttgaaatactccctgaacatctgaaagagtttcagtcccttgaaactttggaccttagcagcaacaatatttcagagctccaaactgcatttccagccctacagctcaaatatctgtatctcaacagcaaccgagtcacatcaatggaacctgggtattttgacaatttggccaacacactccttgtgttaaagctgaacaggaaccgaatctcagctatcccacccaagatgtttaaactgccccaactgcaacatctcgaattgaaccgaaacaagattaaaaatgtagatggactgacattccaaggccttggtgctctgaagtctctgaaaatgcaaagaaatggagtaacgaaacttatggatggagctttttgggggctgagcaacatggaaattttgcagctggaccataacaacctaacagagattaccaaaggctggctttacggcttgctgatgctgcaggaacttcatctcagccaaaatgccatcaacaggatcagccctgatgcctgggagttctgccagaagctcagtgagctggacctaactttcaatcacttatcaaggttagatgattcaagcttccttggcctaagcttactaaatacactgcacattgggaacaacagagtcagctacattgctgattgtgccttccgggggctttccagtttaaagactttggatctgaagaacaatgaaatttcctggactattgaagacatgaatggtgctttctctgggcttgacaaactgaggcgactgatactccaaggaaatcggatccgatctattactaaaaaagccttcactggtttggatgcattggagcatctagacctgagtgacaacgcaatcatgtctttacaaggcaatgcattttcacaaatgaagaaactgcaacaattgcatttaaatacatcaagccttttgtgcgattgccagctaaaatggctcccacagtgggtggcggaaaacaactttcagagctttgtaaatgccagttgtgcccatcctcagctgctaaaaggaagaagcatttttgctgttagcccagatggctttgtgtgtgatgattttcccaaaccccagatcacggttcagccagaaacacagtcggcaataaaaggttccaatttgagtttcatctgctcagctgccagcagcagtgattccccaatgacttttgcttggaaaaaagacaatgaactactgcatgatgctgaaatggaaaattatgcacacctccgggcccaaggtggcgaggtgatggagtataccaccatccttcggctgcgcgaggtggaatttgccagtgaggggaaatatcagtgtgtcatctccaatcactttggttcatcctactctgtcaaagccaagcttacagtaaatatgcttccctcattcaccaagacccccatggatctcaccatccgagctggggccatggcacgcttggagtgtgctgctgtggggcacccagccccccagatagcctggcagaaggatgggggcacagacttcccagctgcacgggagagacgcatgcatgtgatgcccgagatgacgtgttctttatcgtggatgtgaagatagaggacattggggtatacagctgcacagctcagaacagtgcaggaagtatttcagcaaatgcaactctgactgtcctagaaacaccatcatttttgcggccactgttggaccgaactgtaaccaagggagaaacagccgtcctacagtgcattgctggaggaagccctccccctaaactgaactggaccaaagatgatagcccattggtggtaaccgagaggcacttttttgcagcaggcaatcagcttctgattattgtggactcagatgtcagtgatgctgggaaatacacatgtgagatgtctaacacccttggcactgagagaggaaacgtgcgcctcagtgtgatccccactccaacctgcgactcccctcagatgacagccccatcgttagacgatgacggatgggccactgtgggtgtcgtgatcatagccgtggtttgctgtgtggtgggcacgtcactcgtgtgggtggtcatcatataccacacaaggcggaggaatgaagattgcagcattaccaacacagatgagaccaacttgccagcagatattcctagttatttgtcatctcagggaacgttagctgacaggcaggatgggtacgtgtcttcagaaagtggaagccaccaccagtttgtcacatcttcaggtgctggatttttcttaccacaacatgacagtagtgggacctgccatattgacaatagcagtgaagctgatgtggaagctgccacagatctgttcctttgtccgtttttgggatccacaggccctatgtatttgaagggaaatgtgtatggctcagatccttttgaaacatatcatacaggttgcagtcttgacccagaacagttttaatggaccactatgagcccagttacataagaaaaa

SEQ ID NO: 185010 - DNA, 911 bp, Homo Sapiens
  misc_feature (609)..(623): n is a, c, g, or t
ttggctactacttcagggcggaaagcgagtacacgttcgaaaggtggatggaagtgatccgcagtgccaccagctctgcctcgcgaccccacgtgttgagccacaaagagtctcttgtgtattgatggccggacacactcgtttccgcagtggctgctttcctggaagacgtttcctttcttctgtattaatgaagcctggtaaaattaacacctgtctgaaaatcaaaaacatggcttcccagcagctctcctgtctccacagccgcgttttttaaccccgacctctcagcgtctgaatgaacagcgctcccacctccagtcctggcatccgctgggggcgctgttctttagctagtgccagtattaaaacattgtcattacgagagtgccaaatgacatcttccctccaccctgcccctgaaaaacagtacacacacatccgttcaacacaagacagggcaagtgtttttcttcctaaaaaaagttctttcttttattattttcacctattggctgctgcattttacgaagtggacttcccggtgtttgtttgtttgcaatacactcagtgcagccttaagcaaatgagatcattttcagatttcannnnnnnnnnnnnnncagtctttctacttttgtaataataggaagttagtaggactcacttctctgattaataagcaatttgcagcacacagcgttccactgcggggtttcacgctcacctgaaaacacctgttcccaacctacttcttggtgcaagttgaccaaatcgttttaagtggtaactctttccaaccgtagcagggttgttttctgttaagcaaagccgagatccagtgcaatacctggactgtcaccgtcctgtgagtggtgtacacaatgggaagataataaaccgtggtgttt

SEQ ID NO: 185011 - DNA, 3313 bp, Homo Sapiens
  misc_feature (3109)..(3118): n is a, c, g, or t
ctttgtacaaaaaagttggcttagcaaaaaataaatacatacctcagcaagacgcactagaggacaaaatcgtggaatttcaccataaccacattggacaaacaccagcagaatcagatttccagctcctagagattgcccgtcggctagagatgtatggaatccggttgcacccggccaaggacagggaaggcacgaagatcaatctggccgttgccaacacgggaattctagtgtttcagggtttcactaagatcaatgccttcaactgggccaaggtgcggaagctgagcttcaagaggaagcgctttctcatcaagctccggccagatgccaatagtgcgtaccaggataccttggaattcctgatggccagtcgggatttctgcaagtccttctggaaaatctgtgttgaacatcatgccttctttagactttttgaagagcccaaaccaaagcccaagcccgtcctctttagccgggggtcatcatttcggttcagtggtcggactcagaagcaggttctcgactatgttaaagaaggaggacataagaaggtgcagtttgaaaggaagcacagcaagattcattctatccggagccttgcttcacagcctacagaactgaattcggaagtgctggagcagtctcagcagagcaccagccttacatttggagaaggtgccgaatctccagggggccagagctgccggcgaggaaaggaaccgaaggtttccgccggggagccggggtcgcacccgagccctgcgccgaggagaagccccgcgggtaacaagcaggcggacggagccgcctcggcgcccacggaggaagaggaggaggtcgttaaggataggacccagcagagtaaacctcagcccccgcagccaagcacaggctccctgactggcagtcctcacctttccgagctgtctgtgaactcgcaggggggagtggcccctgccaacgtgaccttgtctcccaacctgagccccgacaccaagcaggcctctcccttgatcagcccgctgctgaatgaccaggcctgcccccggacggacgatgaggatgagggccggaggaagagattcccaactgataaagcgtacttcatagctaaggaagtgtctaccaccgagcgaacatatctgaaggatctcgaagttatcacttcgtggtttcagagcacagtgagcaaagaggacgccatgccggaagcactgaaaagtctcatattcccgaattttgaacctttgcacaaatttcatactaattttctcaaggaaattgagcaacgacttgccctgtgggaaggccgctcaaatgcccaaatcagagattaccaaagaatcggcgatgtcatgctgaagaacattcagggcatgaagcacctggcggctcacctgtggaagcacagcgaggccttggaggccctggagaatggaatcaagagctcccggcggctggagaacttctgcagagactttgagctgcagaaggtgtgttacctaccgctcaacaccttcctcctgcggccactgcaccggctcatgcactacaagcaggtcctggagcggctgtgcaaacaccacccgccgagccacgccgacttcagggactgccgagccgctttggcagagatcacggagatggtggcacagctccacggtacgatgatcaagatggagaatttccagaagctgcacgaactcaagaaagatttgattggcattgacaatcttgtggttccgggaagggagttcatccgtctgggcagcctcagcaagctctcggggaaggggctccagcagcgcatgttcttcctgttcaacgacgtcctgctatacacgagccgggggctgacggcctccaatcagtttaaagtccacgggcagctcccgctctatggcatgacgattgaggagagcgaagacgagtggggggtgccccactgcctgaccctccggggccagcggcagtccatcatcgtggccgccagttctcggtccgagatggagaagtgggttgaggacatccagatggccattgacctggcggagaagagcagcagccccgcccctgagttcctggccagcagcccccctgacaacaagtcccctgatgaagccaccgcggctgaccaggagtcagaggatgacctgagcgcctcgcgcacatcgctggagcgccaggccccgcaccgcggcaacacaatggtgcacgtgtgctggcaccgcaacaccagcgtctccatggtggacttcagcatcgcagtggagaatcagttgtctggaaacctgctgaggaaattcaaaaacagcaacgggtggcagaagctgtgggtggtgttcacaaacttctgcctgttcttctacaaatcacaccaggacaatcatccccttgccagcctgcctctgctcggctactcgctcaccatcccctctgagtccgagaacatccagaaagactacgtgttcaagctgcacttcaagtcccacgtctactacttcagggcggaaagcgagtacacgttcgaaaggtggatggaagtgatccgcagtgccaccagctctgcctcgcgaccccacgtgttgagtcacaaagagtctcttgtgtattgatggccggacacactcgtttccgcagtggctgctttcctggaagacgtttcctttcttctgtattaatgaagcctggtaaaattaacacctgtctgaaaatcaaaaacatggcttcccagcagctctcctgtctccacagccgcgttttttaaccccgacctctcagcgtctgaatgaacagcgctcccacctccagtcctggcatccgctgggggcgctgttctttagctagtgccagtattaaaacattgtcattacgagagtgccaaatgacatcttccctccaccctgcccctgaaaaacagtacacacacatccgttcaacacaagacagggcaagtgtttttcttcctaaaaaaagttctttcttttattattttcacctattggctgctgcattttacgaagtggacttcccggtgtttgtttgtttgtttgcaatacactcagtgcagccttaagcaaatgagatcattttcagatttcannnnnnnnnncagtctttctacttttgtaataataggaagttagtaggactcacttctctgattaataagcaatttgcagcacacagcgttccactgcggggtttcacgctcacctgaaaacacctgttcccaacctacttcttggtgcaagttgaccaaatcgttttaagtggtaactctttccaaccgtagcacggttgtttt

SEQ ID NO: 185012 - DNA, 1755 bp, Homo Sapiens
taggtgaaaattccttataaatccaggattggctctgagagaactggctaagattcaggaagaaacaaaaaattcagaatcctacaaggttttgatgacaattagggccaaaattttaggaggagatgtaggatgcaggagaaaattaaagtgttttctttatatcagaggaggaaatagtagaggtcagtgaaggtctggggtagggaaacattcagactgtccattgcatggctgtggagtgagactgcccttagcctgggtcagccttcctgggccataaattgggcatccgtgatgctaggtaactgtgggaacaaaatgacagcttagagcagccatgggtgatgtttggtggtaaaaaacctacaggcgtttggggtcccatgattgttccagaccatgactcttcctggttgtgggtttgttacagagcaggagaagcagaggttatgacagttatgcagactttccccctcctttttctcttttctcttccccttgcttttccactgtttcttcctgctgccacctgggccttgaattcctgggctgtgaagacatgtagcagctgcagggtttaccacacgtgggagggcagcccagtactgtccctctgccttccccactttgagaatatggcagcccctttcattcctggcttggggtaggggagaccattgaagtagaagcctcaaagcagacttttccctttactgtgtgtactccaggacgaagaaggaagatcatgcttgatacttagattggttttcccagggaagagggcggagcagagcaaagtcactgtgaaccctgggccaggccctggctgggccagctcctgagagcgtctcgtgttgcagacccttgcccacttcacccacctgcaccttctccccctctcacagtgtcactgctgctaatggtcaaagtcaaatgtgtggccacatgggatgggccaggtcctctcaggctactttctggatgtcatttttaaaatatggaaacatgcaggtgccttcccaaagaggcttggactggtatatccaacgagaaacaaataagctaaagaaagtttaaactcaagaagaaagatgttgacagtctatgtaacagctggaaagtttataggcacccacctttgggacaacccagtgattatgaacatgtgatatctactatttaaaagaaatgttctcaccttgggttgattgtggtataccatgtgttatgaaaattgttgagctgaagctttgaatcgatttagttgagtctgactcacttgctttggttcctgtgtattttactacccctcttgtcagtgaccttccttccccaccccacccagagtgaatttgtagcatgattgtataaacctctatgtagaaaatggagatttcttgctctgaaatgttaagctctaactgatccatttctgtgtcctttagcctagtatgtctgaacttccattcttgttatatatttaaactttccctctatattatagggttttgtggcatccacggacaggtgtagaggaagctgccccttgcagaactgtactgtaatatttgtcttttataaatattttcacaggactgattgtacacagggcttgtaataaaattttaacactgtgctgtgaaacaactatggggaatctccattgaagggctacttcatggggccctgaaagtggagtgttatagctatgactttctatttcttgtttctaagtaaataaacctaattttc

SEQ ID NO: 185013 - DNA, 2038 bp, Homo Sapiens
  misc_feature (138)..(148): n is a, c, g, or t
  misc_feature (962)..(997): n is a, c, g, or t
ttggatttgacaccaatatgggcaaaattagataaccttttggttaatataaatgattttgatttggaggcctaatttgtagattgtgaaagcagcttttagtttaacttattcacagaccccttataattaccatgnnnnnnnnnnncttcctaaatctcttggttcagcttgtgaatcttacgtgcccgtaaagttgggatgttgaattggctcttctttgttctggcagtgagtcaagtgtccagcattttttcataagtgttttttaaaattgttctccagcattttatggctcctccctcccatgtcctcagacccagcaaaagcgtagaggcagaattagaggcctctccaggccagctcctctgcccacatgtcatacaaggtgtgaatttgagcacagtccagaaatggagacatcccacccccagttgaataatggcccattcatgccaaccttgccaacacggagagggcagagatgcactagaagaccttcatcctccccttcctctgccccaagtcactacagttggttctattgaagccagtctttaagaaacctgggttaaagacaccagcacttctgcttgctgggctggctggacctgtgaagccatgggcaggtagtgccctcttgagagtcattttatttggccaccttcaggtgagactatccatagacacatgctaggataggccccgctgggagggcagttacaggagagagtaggtggtggtgacgtgagggctgtgaaggatccagagacaagacttagatgtttcggttcattcactcactcattcagttactcctaagacttttcagtttcataaggaagagtgttgcctgaggccctagggaatattggggaatagaagggattgaggaaacattaataatagttattcaaaagacccaaatgcttatacttctctctcccttcttctctctctgnnnnnnnnnnnnnnnnnnnnnnnnnnnnnnnnnnnngtgcacattcctcccttacatgctcatttgtgccttaaatgtgccttataggtaaatccaggatgactgaggaatccctcgtcactgggagattttgtatatattcttttattattagattgagttgggtgtggggaaaaatttttttctgaaggctcaaaagtggtttcctaaaagtgagccactatcagatttgcacatcaggagaaaagaaatagggttacgtccattaggaaaatcccagtttgcaggagtgcaatcacatcaaaaaaacaaccagccaggattaaaggtattataaatcctcatagcggaacatttctcagggcaaaggaacctggctcatttgaagattaatgttccatgcctttgtggtcaaacggtcagcacttaacacaggaaaaaactaggtgttgttttgttttgttattttggacaacataaaattcaggaatgttttatttagccttggtttctagaaggaagggaaataatatttcttgagcatttactagggtgttgcgtgctgtgctaagtaaattttaagtctttcagttttatagatacggaaaacaagggtgactctttaccacaggatgaataaagaactaagtaatatgggaatgcagcaatttctggactagctgagccgattccttcctgtgagcacactgtaagctttcaagttctctgggcaggaattacagcacctgtcccctgcaatggccctgctgtgtgatgctcatcgcttcccttcgtgctggagcagtcccccaggtgtccatctcctatctttttgttccaatcttctgtgagttccagctagcaggctttacatctggggaaaggaaaaccaggggttttagctctgttctctgctcccatccttcgctcaccagctgagtgagaacatgaactttttgcaccatgtacccatggcttacactacttagaaaatcacctttcagataaaacagtttatgagttcatagagaacaccagcactctttgacaaaactgtgagtgaccctttttaaacaa

SEQ ID NO: 185014 - DNA, 1152 bp, Homo Sapiens
  misc_feature (101)..(112): n is a, c, g, or t
  misc_feature (925)..(960): n is a, c, g, or t
ttggggttaatataaatgattttgatttggaggcctaatttgtagattgtgaaagcagcttttagtttaacttattcacagaccccttataattaccatgnnnnnnnnnnnncttcctaaatctcttggttcagcttgtgaatcttacgtgcccgtaaagttgggatgttgaattggctcttctttgttctggcagtgagtcaagtgtccagcattttttcataagtgttttttaaaattgttctccagcattttatggctcctccctcccatgtcctcagacccagcaaaagcgtagaggcagaattagaggcctctccaggccagctcctctgcccacatgtcatacaaggtgtgaatttgagcacagtccagaaatggagacatcccacccccagttgaataatggcccattcatgccaaccttgccaacacggagagggcagagatgcactagaagaccttcatcctccccttcctctgccccaagtcactacagttggttctattgaagccagtctttaagaaacctgggttaaagacaccagcacttctgcttgctgggctggctggacctgtgaagccatgggcaggtagtgccctcttgagagtcattttatttggccaccttcaggtgagactatccatagacacatgctaggataggccccgctgggagggcagttacaggagagagtaggtggtggtgacgtgagggctgtgaaggatccagagacaagacttagatgtttcgttcattcactcactcattcagttactcctaagacttttcagtttcataaggaagagtgttgcctgaggccctagggaatattggggaatagaagggattgaggaaacattaataatagttattcaaaagacccaaatgcttatacttctctctcccttcttctctctctgnnnnnnnnnnnnnnnnnnnnnnnnnnnnnnnnnnnngtgcacattcctcccttacatgctcatttgtgccttaaatgtgccttataggtaaatccaggatgactgaggaatctctcgtcactgggagattttgtatatattcttttattattagatttgagttgggtgtggggaaaaatttttttctgaaactcaaaagtggtttcctaaaagtgagccactatcaga

SEQ ID NO: 185015 - DNA, 775 bp, Homo Sapiens
gtacaaaaaagttgggtcttctgctagggaggatgtcgggttcgtcgctgcccagcgccctggccctctcgctgttgctggtctctggctccctcctcccagggccaggcgccgctcagaacgagccaaggattgtcaccagtgaagaggtcattattcgagacagccctgttctccctgtcaccctgcagtgtaacctcacctccagctctcacacccttacatacagctactggacaaagaatggggtggaactgagtgccactcgtaagaatgccagcaacatggagtacaggatcaataagccgagagctgaggattcaggcgaataccactgcgtatatcactttgtcagcgctcctaaagcaaacgccaccattgaagtgaaagccgctcctgacatcactggccataaacggagtgagaacaagaatgaagggcaggatgccactatgtattgcaagtcagttggctacccccacccagactggatatggcgcaagaaggagaacgggatgcccatggacattgtcaatacctctggccgcttcttcatcatcaacaaggaaaattacactgagttgaacattgtgaacctgcagatcacggaagaccctggcgagtatgaatgtaatgccaccaacgccattggctccgcctctgttgtcactgtcctcagggtgcggagccacctggccccactctggcctttcttgggaattctggctgaaattatcatccttgtggtgatcattgttgtgtatgagaagaggaa

SEQ ID NO: 185016 - DNA, 1880 bp, Homo Sapiens
  misc_feature (1113)..(1122): n is a, c, g, or t
  misc_feature (1282)..(1322): n is a, c, g, or t
ctttgtacaaaaaagttggctagggaggatgtcgggttcgtcgctgcccagcgccctggccctctcgctgttgctggtctctggctccctcctcccagggccaggcgccgctcagaacgagccaaggattgtcaccagtgaagaggtcattattcgagacagccctgttctccctgtcaccctgcagtgtaacctcacctccagctctcacacccttacatacagctactggacaaagaatggggtggaactgagtgccactcgtaagaatgccagcaacatggagtacaggatcaataagccgagagctgaggattcaggcgaataccactgcgtatatcactttgtcagcgctcctaaagcaaacgccaccattgaagtgaaagccgctcctgacatcactggccataaacggagtgagaacaagaatgaagggcaggatgccactatgtattgcaagtcagttggctacccccacccagactggatatggcgcaagaaggagaacgggatgcccatggacattgtcaatacctctggccgcttcttcatcatcaacaaggaaaattacactgagttgaacattgtgaacctgcagatcacggaagaccctggcgagtatgaatgtaatgccaccaacgccattggctccgcctctgttgtcactgtcctcagggtgcggagccacctggccccactctggcctttcttgggaattctggctgaaattatcatccttgtggtgatcattgttgtgtatgagaagaggaagaggccagatgaggttcctgacgatgatgaaccagctggaccaatgaaaaccaactctaccaacaatcacaaagataaaaacttgcgccagagaaacacaaattaagtactgcttacaatatctttaggttcctgaaactggtggcaacatgacctgctaaaattttctgcttggacctctttggttctctcccctttcaagtgagcaacaccacaatgactgtctaaagcatgccttatttagcctctcctgtaagggtgatctagccaggtacattttaaacaatgcttcagtgtagaaggtgtaaactattttgggcttgatgtgctgtgaatgttgcnnnnnnnnnncctttgttaaaatatttaaatagaagtgaaaaggtcctctgaggatcagatcatgcatgcgccattttttacttaatgcagctgttaaattggcaaagctctaaaatgcactgctgccatctagtgatacacttttgtaaagtacagcaaaacctacagnnnnnnnnnnnnnnnnnnnnnnnnnnnnnnnnnnnnnnnnnttttgggggtgggagaaatccaaaataaagtaaatgcttgtttcatttttaagctgctgatattcattccttattgtatgttgtcagatgaggaaattgtgcagttctggtacataaagatgagtaatataaactgaaatctataattttaagggcttaacctgtgactttaataagctggaacagtccactgaatgggtataatgaattgcagtatatacgtatgattgctttttaagtgattatcttttcttctgttaagtcatgtaaattcataaatccttttgcactgatgtgttgaaccttattcttgtacattcattcaatcaaggcaaacttttataatttttcttttgtttccaatgaccttgaaatgttatagcatggtaaatattctatgcaactatagttatactttttggtttgacactgtatttttttcacattgatttactgggttgatgatagattttataacctaacgggttctcatgcggtgcgtaattgtaaatgcatgtacttgtgtgttttgtgtaattattgaaggggcaatgatgt

SEQ ID NO: 185017 - DNA, 2107 bp, Homo Sapiens
ttggctgcgtcctcggccgcggcccgggtccctcgcaaagccgctgccatcccggagggcccagccagcgggctcccggaggctggccgggcaggcgtggtgcgcggtaggagctgggcgcgcacggctaccgcgcgtggaggagacactgccctgccgcgatgggggcccggggcgctccttcacgccgtaggcaagcggggcggcggctgcggtacctgcccaccgggagctttcccttccttctcctgctgctgctgctctgcatccagctcgggggaggacagaagaaaaaggagaatcttttagctgaaaaagtagagcagctgatggaatggagttccagacgctcaatcttccgaatgaatggtgataaattccgaaaatttataaaggcaccacctcgaaactattccatgattgttatgttcactgctcttcagcctcagcggcagtgttctgtgtgcaggcaagctaatgaagaatatcaaatactggcgaactcctggcgctattcatctgctttttgtaacaagctcttcttcagtatggtggactatgatgaggggacagacgtttttcagcagctcaacatgaactctgctcctacattcatgcattttcctccaaaaggcagacctaagagagctgatacttttgacctccaaagaattggatttgcagctgagcaactagcaaagtggattgctgacagaacggatgttcatattcgggttttcagaccacccaactactctggtaccattgctttggccctgttagtgtcgcttgttggaggtttgctttatttgagaaggaacaacttggagttcatctataacaagactggttgggccatggtgtctctgtgtatagtctttgctatgacttctggccagatgtggaaccatatccgtggacctccatatgctcataagaacccacacaatggacaagtgagctacattcatgggagcagccaggctcagtttgtggcagaatcacacattattctggtactgaatgccgctatcaccatggggatggttcttctaaatgaagcagcaacttcgaaaggcgatgttggaaaaagacggataatttgcctagtgggattgggcctggtggtcttcttcttcagttttctactttcaatatttcgttccaagtaccacggctatccttatagctttttaattaaatgaagccaagtgggatttgcataaagtgaatgtttaccatgaagataaactgttcctgactttatactattttgaattcattcatttcattgtgatcagctagcttattcttgtgtactttttttaaactgtgggttttcctagtaaatttaatttacagaaatcaatggtagcatttagtaatctacaaaggaaatatcaaagtgtttttcaagcctgttatattcagtgtgtgccacaggattgaaataaatgacaatgtaattatgaattcatgttttagagctgtttactcattagtaaaggaccgcaatgttagtaaagaaaacctatgaaatgtatgttaaagattcttagtattgtacagggataaagcaaatgcatgaaaatatgtcatgtactgaaaattaaacttacttcagtttcagttataaaggacgtgcactgttacgaatagtgttttgttattaattataactagataaaggtatataggacagggaactggatgaatggtacctacaatttggatgcctaaccaaggactagagctccttcttgagatctaaatctaaagtaaatgtgcattaaagcagtgtgcttcaaaggcatcagacgatgaaagcaacataccacaactaggagttatttctcaaacttaaatgtcctctgggaatccagacttaaaaataagagcaaacttaacacactatccattttcgagcaaacttaacccactatatccattttgctcatgtgttttatgcaaccagctttccatcaaatcctcaatccttgaatccaggtaaaacgttaattatcctacgattagtgaatgattcaatgaagctttcttgaaaacaaacataggagtgtaatgtactattatgtttgtatcctgttta

SEQ ID NO: 185018 - DNA, 1668 bp, Homo Sapiens
  misc_feature (1235)..(1245): n is a, c, g, or t
ttggctctgggtcccagattctacgtctctgcaaattccaacaaaagaaaaccaagattgctcagtttctagagtctgttgccaacatgtttgcagctgctcagcagctctcgcagaacatcagttcagaaactgcacaactcctcctggtagtctctgatgggcgaggccttttccttgagggcaaagaaagagtcctggcagcagttcaggctgcccggaatgcaaatatctttgtcatctttgttgtattggacaatcccagttcacgggattctatcttggacattaaagtaccgatatttaaaggacctggagagatgcctgaaatccgatcctacatggaagagttcccattcccatactatatcattcttcgagatgtaaacgcacttcctgagacactcagcgatgccctcagacagtggtttgagttggtgacagcctctgaccacccatagaacagaaagaagagtccaaagtgagacttaactgtggtcagaaggtcacattgcttacccaggtgctcccttttggacaactacaaaaaattttattgtaatatttttattttacaacgtgatcttacagcctacagaatgctctctggctcccggctttgcctgggctgaggtttttataccaaacctggaagcagcagcaggtgcctgaactcgtaactagagaagagttatccttcttccctgccttggaagccctggcctgggaggaggtcataccccaccgttggagcccagctgcctgttttcttttgcaggggatctgggcacctgtgccttgaggagatgctgccaggagcatgggactctgacagtcctttgtataaaggactaaagggagctgcccttttgaccctgttctaagctctgccttgccaagcccatagtgtgtgcccaaaagctgtcaagtggccaagacagctcgtttctggagagtatgagggtgtgttttcttattgtgaaaggaactaccttctcttagagggtaggaagaatgtggtgtgtgtgtgttctcataaagcaactggacattataggtgcccaggtcatctataaaaacgatccttgggctgtgtaaaaatgaagtggcttttcagtatcctctttcacacttgctgcttcgggagactatgcaatgatgggaaggtgattgcccctttatttcattcagtgccatggtccctgttgttgtagtaatttatttgtttagttcannnnnnnnnnncttaacagtcaaggggaagagtgattcctcacactgctttcaagctggactgagccagtctcattctgggaaagaaacgctgtgtccagaactcagcagctccatctattttttccagtcgaaagaaactgatctttaggcagtttttacttggccagaaagcagtgctgaatacttgaaactgtgtgctctgttctacttaatgttctgtcagaatgttcttttgtaggcagtatgtcatgatgtaatcatctatctccttgtctgtttccaagttacactgtgaagtctgcgacccttttgaggtggtcatcaaagacacagattccttgtttaaccaagtgtcccaaagcatgtacctgaagttatatcattttttattctaaaaagctatgcagcttatattctgaaaactattaaaac

SEQ ID NO: 185019 - DNA, 913 bp, Homo Sapiens
ttggccacaagctgccatatacctgaggttacatgaggactggcattaaataatttataaatgtatttttgactgacagacttttatcataaggattcatgtgtttacaaaagcaaaatccaacctctccagagctagaaagtgggaaggtgcccgggctgcaagcacagccttgggggaggatgaggccacataattctctctgcccacactctcagaatgccccaagaagttagtagctacacaaagccaagccttgggggaaaacctggtccgtggtgtggactctccaaaatgcagacccaaccggaggccgggcccgcctttccatctggaggcactgcagggcttctgaaagcggcccatcccaggagcctggcaaacacccccagagaccctcaggatgcgccagccccggggctttgtcctgagaagctggagctccgtggcccagcttgtggatgggtgcccagggggcaggccccatgccctcagcacgtgctgacacgctccctccggctccaacaaccacaccagaaccttccgtagaacatttaagtaatgaagtctcaacattacagtaaaaaggtgcaaagggtctcttttacaaatatttatgtacagccaagatcttgttgagttcagtacagcatgctgcgcgtacacatacgcagtgtgcacacggattcagggaactgagcggcacactgaagacgagatcacacgtgtgcacacggattcggggaactgagtggcacgctggaagacgagatcacacatgatgctattttacttttgatcccatgtgctttcctgggcatgatattttagatggaactttttctggtctgtgatctttggtagaaaaaaggtctctaggtttaaaaggtaaaaatgttgccaacttttttgt

SEQ ID NO: 185020 - DNA, 1086 bp, Homo Sapiens
actttgtacaaaaaagttggcccagacacaagtcttcactccttcctgcgagccctgaggaagccttctttccccagacatggccaacaagggtccttcctatggcatgagccgcgaagtgcagtccaaaatcgagaagaagtatgacgaggagctggaggagcggctggtggagtggatcatagtgcagtgtggccctgatgtgggccgcccagaccgtgggcgcttgggcttccaggtctggctgaagaatggcgtgattctgagcaagctggtgaacagcctgtaccctgatggctccaagccggtgaaggtgcccgagaacccaccctccatggtcttcaagcagatggagcaggtggctcagttcctgaaggcggctgaggactatggggtcatcaagactgacatgttccagactgttgacctctttgaaggcaaagacatggcagcagtgcagaggaccctgatggctttgggcagcttggcagtgaccaagaatgatgggcactaccgtggagatcccaactggtttatgaagaaagcgcaggagcataagagggaattcacagagagccagctgcaggagggaaagcatgtcattggccttcagatgggcagcaacagaggggcctcccaggccggcatgacaggctacggacgacctcggcagatcatcagttagagcggagagggctagccctgagcccggccctcccccagctccttggctgcagccatcccgcttagcctgcctcacccacacccgtgtggtaccttcagccctggccaagctttgaggctctgtcactgagcaatggtaactgcacctgggcagctcctccctgtgcccccagcctcagcccaacttcttacccgaaagcatcactgccttggcccctccctcccggctgcccccatcacctctactgtctcctccctgggctaagcaggggagaagcgggctgggggtagcctggatgtgggccaagtccactgtcctccttggcggcaaaagcccattgaagaagaaccagcccagcctgccccctatcttgtcctggaatatttttggggttggaactc

SEQ ID NO: 185021 - DNA, 1211 bp, Homo Sapiens
gcccaggtcatcaaataatgaccattctaggaacatggtaggaccaaagacaatgacaaagccaagcagaaggattagcaaaaataacttataaaagctccagggaatcttgctaatgaatgtgccagtgtcttgaggcaaagaaagtttatccacatcgactagttttatgtcttcccactgactggtatcaaagttcttcattaaagggcttgcaggcaaattagagggaggtaaaggagtttccttgattactttgattttctctctaaactcctgcatctgttgcagaaatacaatgggttctgacacatctttgaaagctcagcaatgttaaaggccatccgttgctcctgcaagatggtgttgagtttgttgatctctgggtcatatgcttgcataacagcaagtttcatggtctcaaagtcagacagaatttcattcttcttttgatccagtgtgtgttgtaacttctcaaaaaattccttcactttatctgaatctttagtcagtaactgtagggatttcctcttactagtttccaaggtatccaagcgagaaagagcatctccccgacgccaggtctcaaagctctggaagagggactcaaaggcatccctttcctgagcataggcatcttcaatagaacagaagacatgtttggtgtgctccccacgagtagcacagatcccacaaatcagctgcatatcagtcaggcagaaaatgttgagaggctgccccaagtgtcctttgcatactggcattttgggagagatcttgatcttgttatacttttccacaatacccttcagggagtaattaacctgcaggctattaattccagtagctgaagtttccttacggcatgtaggacacttgaatggagctggtctccacaaggaattccgcacactcccttctaagataccttctaagcattttttgcagaagttgtgggagcaaggcaaaacccgtggatcatcaaacagactacaacaaatagggcatgtgagatcttcttcaagcagctccatcacatcctctgtctcctacaagctgatgtatttggcagggttactatttcccagggcaaagcaggtcttttttttcacgttttgactaacgaactagaggctactccggctagtgggaaaggccgcgcgaccgcccgtcctccaactacagggaccgcacggtacgcgccaagccaa

SEQ ID NO: 185022 - DNA, 1568 bp, Homo Sapiens
tcttactgccaggaaagagactcgagggatggtgtcgcttcagctgaaccataagatcctctttctctccttcctctggtggttctgatgaaatgagaacttgagcttgtttgtgggtcagcacagcttctgtccgctgcacatgtctcttcagcagctgagaacttccaatctgactggacttctgggcagaggtcactgtggtcactttggtcttgggactggaggtggggctgctggacacactggagagatcctctgagcctgagggtgaggcgggcagcttggcagctggggaggcaggtcgactgccccgctcagggacttcaaaggccaagtctctgcgggccacatcgcggggcttcttcttcttctcagcatcctgatcccgaggttcagagcccatgtgaccctcagcacgagtgagcactccagtcagaaagtccacaatctcatcctgaatacatctgtccaccatgctctgagtcaacccttctgatttcttctttgctttgcttattctgagattgtcatcagctcccccaaccaccaccaagctgttctcagctcgaatcttctcccggaagtcctccatggcttcagggtgacattgaagggaattctgaccaatgacaaagaggactggagtcttcatatccaagaggggatcatctacatcccctctggggccatccacagtaagcagaggaaacccaaggcagacaactgcagtgacatactccattactgacacatgacaggccaccaaagctcctgtgttccagccaatcaagataatgggtttgtgtgggaaatggctgtgaatctccagcactttgcttctcactgccccaatcatatgctcgagacactgtagaactcctaccccactgccattgttcagcagatgggtggctacagggatgaccttgcccaagcaggacagctgagattgccagaagcggtggcggcgtgaagtgggaaacacagagctggagggaccagaggaggcgatgagaatcagcggagagccagggagtttgcttggtttgttatgagaaagcacacccacagcagggtcccagggcctcttcagtaggagagacaaggcctcagctcctgcagccccagtctttgtgttggatgacacaagcatccggtcaatcaaggttgggatctacaaagaagaaagagcaaagatgactccagtgtaaagcaggagaccttccaccaccagcaatcaagcagaagaacagagccccactataagccatagacagacttcaactaagcctctgaaaacctcctaaggatcaagaatatatataaataagcgggtgaaaagtatgctcccaccatgaaaagtgaatgtgtacaatcctttggaaagcagtctggatatgcagcaagggacttaaatgtattcccatcccttttccaaatgtttctacttctgagaacctttccaaagaaaacgtatcagaaacaaaaacacacacaaaaggatggggacaattatgcacagagacaaattaactatgaataataataaagtaaaaacaatccaa

SEQ ID NO: 185023 - DNA, 2288 bp, Homo Sapiens
ctgactgccggctgcttccctgggctgggcgtcagccgccaccggcagcagcagcaccaccggacgatggttctgttatatcccccagagaccaagggttggccctttatgcttattaggaaagaaggattatgaccaacacttgcatcctgggtacaccagaggatcgcttcctggcagaatttgggagctgtttattgcagcactgttgtgccctctgatgatgttacagtggtttatcaaaatgggttacctgtgatatctgtgaggctaccatcccggcgtgaacgctgtcagttcacactcaagcctatctctgactctgttggtgtatttttacgacaactgcaagaagaggatcggggaattgacagagttgctatctattcaccagatggtgttcgcgttgctgcttcaacaggaatagacctcctcctccttgatgactttaagctggtcattaatgacttaacataccacgtacgaccaccaaaaagaggtacgaattgagattagcagaaaagctgacaagaggaccactttggtgctatggggtggccttgcctacatggccacacagtttggcattttggcccggcttacctggtgggaatattcctgggacatcatggagccagtaacatacttcatcacttatggaagtgccatggcaatgtatgcatattttgtaatgacacgccaggaatatgtttatccagaagccagagacagacaatacttactatttttccataaaggagccaaaaagtcacgttttgacctagagaaatacaatcaactcaaggatgcaattgctcaggcagaaatggaccttaagagactgagagacccattacaagtacatctgcctctccgacaaattggtgaaaaagattgatctgcaaaaagcctctgaatcctggcagaaggaacacctgtttgcctttttaattaaagcattgcaggtggaagctgggagccatgtggggggtagagcgtttttacctttaattataaaacaaaaacagaaaggatctgagggaagaagggaatgttaaaacctgaggatcaggcattgtggaatataagctcaaagggcttagtgaatattgtcttaaccaagtatctcagtttctggatgaaaatgatgcagttatatagttgagagattcataaagagaaaacaatgctgggggtgttcgtttcttgcatcttctttgcagagtcagcaaaagagtaacacaccagcaccccactcgactctatttgtttttaatttaactgtccctatttttgacataggagtaaataaatatactagaaaagcaaattctcatgatatgctaaaatatcattagcatttattttaaattggacccagtctctgcagagttaccaggaatctttccttccagcatccctttactgaccacctacctgtacctcttggttacactcattttttccatttgataattggaaccaacttataactgtttaataattgacactttagattatctcttaataccttcttaaatgtctatatatcccagtgctctggatcagtgtctaaaaatcactggcaacactgcatgaggttgttggttttgttttgttttattaattagtctttcacaggaggaataattgccctcctttatatacttatctattgataatcccctctccctccagaacacaaatcagagggaaagggggtgttcagctgtactaccaaatcaggaagatgtaaggtttacaaattggctaagaatcatggctctgtagccatttcaaccagaataattttattgctaatctgctttgtgtgacagcattccaggccagccagatgggactgccttgtctggaggctttgttcatctcgaaggacacacacttccacactgtttgtgagccctcccacctccacaacttcagttgtaaatcaagtgtgtggatctcaaagggtgcaatttatctttatataggaatacatttctagggcttccttcaagcccactctcttcaccctattttttcttatcttaaattgagagaaagagaattaatcttatactttgtcaaaacattttctacccatatttccagatgacatctgcgcttgaagagtcaaggaatctgtgtctatatcctgtttttaactgctgtaaggggcaagatggaaaagatgatgggggctgccacaccactgattggcctttccttcacgtgattcatccttcctcattgtggccaaggagtttctttccccttttttttcc

SEQ ID NO: 185024 - DNA, 981 bp, Homo Sapiens
ttggcaatttgatagaattttgactttaacgttaatcgtatttttagatattggttagcatattttatgttaggttattttcatttgattttatctagttgtacgtagaagatactgtcatcttttaggacaaagtattgtaaaattatctgttttagcccatgttctgatgacccacagctctgtcacctttgagcatcatctccccattctaagtttttttcccacttaattcctaaccctgcctctttgaggaagcccattgacggggcaattaaaaccttctcattgctcctgagaccagaacggcaagatgtttcctttcagaagctgagagccacaaggaggacagcagtgagcatctgcacagaaacgagctcagagacgcccgtgttcagtggagcacgccgatggggtgggcgccctggctctagacgctctcctaacacacctgtgctttgatgacagtctgcaggagctgcctggtgaagtacctggaggagaacaacacctgccccacctgcaggattgtgatccaccagagccaccccctgcagtacatcggtcatgacagaaccatgcaagatattgtttacaaattggtaccaggcctccaagaagcggaaatgagaaagcagagggagttctatcacaaattgggcatggaggtgccgggagacatcaagggggagacctgctctgcaaaacagcacttagattcccatcggaatggtgaaaccaaagcagacgacagttcaaacaaagaggccgcggaggagaagccggaggaggacaacgactaccaccgcagcgacgagcaggtgagcatctgcctggagtgtaacagcagcaaactgcgcgggctgaagcggaagtggatccgctgctcagcccaggcgaccgtcttgcatctgaagaagttcatcgccaaaaactcaacctttcatcctttaacgagctggacattttatgcaacgagga

SEQ ID NO: 185025 - DNA, 1495 bp, Homo Sapiens
  misc_feature (129)..(139): n is a, c, g, or t
  misc_feature (1287)..(1300): n is a, c, g, or t
cccccgctctgcagaagctgcatttcagctgaatctgtgtttcagcctcagttggttgcaccgttagcccctctcctcccggatggtcatgtttttgtcacattagagaataaacagccacacacacannnnnnnnnnncctttaaaacagtaacttggaaatatgaaaaggccagaaggaggagcaagggctgttttctggagtggttgaggtgtgtcctgcagttgtcatgtcttctccaccgggctgttcccatttatttcctgtggaactgaatccctcctccctccactccttgggagcccaggtggtccttggccaccattcaggctttccaagaagccaaccaccttggagattttttttcttgaatttcgctgttttcttctgcttcctttagataaaaagcagctcaagagaccttatcttagggatgagaaaaacatgcatattaattccatctgagtgattgtcagtgtaaggccttttaaaacaaaagcaagttctttgttaggaattggtcaaaattcatctctttctttaagcccatcaactcccaggacggtttgagttactcagttacctaagcttgctattcatccaaatcattttctagagtcactgtataagggtctatgagtagctgtgtatgaataaatattacctgtctacctcaaaatacacatactgctgaagcattctgtacaaccgtgtgttatcacagtgcagttttaagtgtaacgttagaacttaggcattttcctgtgtggcggaataagaaaggattaaacagttacaagcctccaaattcaaataaaattaaatcacagttcagatgaaactgaatatcattgtaataatctcataatatatatttgtaactttgtagctatctttgaaatcacttgactttgcaatggtgctaagctgatagatttaaatacacagacgggcgagtggcgcccgtgtcgatgtcttcagccagtggtgaccctgcttttgtaaccgcgttaacctgacaaaacctcagcagcagaagtccctatttttctaggagttcatcgtgcagacagtcttcactacaggactcggccctggggcctctgcctctcgtctgaccttgcagccttagtcgttggaggctggagcgcaatggccctgccgtctgtggagcctctgggcggccttctttcctttctgtcaacctctcatttcacagaaaaaggctgaatttcattttttccagcatgaaagccaggatcggttagtggttggattctattggnnnnnnnnnnnnnnaaacagatggagttactgtgaagaagttttcacaactatttatgctggtaaaacaaatgctgttaaatcaccttatgcgtcgttttcaacagcagtggggctaattacccggaatacggtctcaccgatgcagttttcatggacatagaaaattcaaatagaatatataatattgaatttaggatttggggggtt

SEQ ID NO: 185026 - DNA, 2064 bp, Homo Sapiens
  misc_feature (1693)..(1702): n is a, c, g, or t
ttggataaacaggttttcagataaggtatgtaagattctttttctgcagtgttgaagtcaaagcagatgtctgatctcaaaaaggtcagcagtcctagattgaggaattagtgaaatatgtctaaggaagcctccagaaccgtccgggggaaccctcctgctgcgctctcaccagcgtcctttcccgcaggtgagcatctgcctggagtgtaacagcagcaaactgcgcgggctgaagcggaagtggatccgctgctcagcccaggcgaccgtcttgcatctgaagaagttcatcgccaaaaaactcaacctttcatcctttaacgagctggacattttatgcaacgaggagatcctgggcaaggaccacacactcaagttcgtggttgtcactaggtggagattcaagaaggcgccgctcctgctgcactacagacccaagatggacttgctgtgaatggtgccacacagcgcccacagactgggccctcgcacccttgggtgctcccggccgccgcgcttaagaacattgcctctgggtgtcatgtggaccagacttctgaatagagaatatttataacttttgtatgagagagaattcacactcaacaagacactaccagcaccacgtttacagaggatgaaaacacttcacagtctcccagagccgatcgtcctctcccccgccccaccccgtgcttcagccttgcagggagagtgatgctccaggcaacacggttctgagtcaccttctgacacgagctccctctgcttgctttccaggtcttgaaaatctgaattcacttcagtttagtttatgaattttaggtttcatgataagcctcaagtgtagttggacttttattgaatccttcctaagttattgaaaaaatgtcttttcatggtgaatgacaatatttatgttgcctttagcttcttgaagatttagaagttatataaaaaattaatttaaaagcaaaccaaaagaggtttccattaacattatgatttaaccattgtatttaatttcccaccttatgaaacacaacagcagctccctgactggttcgcctttcattgtgtgaggtcggcacttggactcactcagaactgtcgctcacctgtggctgacacacccagccctggaaacggggccccagacgccacgtcgggatttctgacatgctcagcaggtagaccagaggccgtgtgaccagctcagtgctggtttacggaacaactcttacttttaaaaattacttgttcccccaaattgttgagtgccgccgtttggtttcctatgttttctttccctgttttgattttgctgaagggagaggtggtggtggttaggatcagagctctcctggcatccgtggggaggatttgctggtggtggcttcgggctcatgcccagacacactcactgccccgtctgtccaaggcctccccttcccctttgctggtgggaggagctcgtgtgctccttggccgcttactggaagggcgtttttcagagctgcagggacagggtgagcagctgaagggctaggagggaagccggcccccgctctgcagaagctgcatttcagctgaatctgtgtttcagcctcagttggttgcaccgttagcccctctcctcccggatggtcatgtttttgtcacattagagaataaacagccacacacacannnnnnnnnnccttttaaacagtaacttggaaatatgaaaaggccagaaggaggagcaagggctgttttctggagtggttgaggtgttgtcctgcagttgtcattgtcttctccaccgggctgttcccatttatttcctgtggaactgaatccctcctccctccactccttgggagcccaggtggtccttggccaccattcaggctttccaagaagccaaccaccttggagattttttttcttgaatttcgctgttttcttttgcttcctttagataaaaagcagctcaagagaccttatcttagggatgagaaaaacatgcatattaattccatctgagtgattgtcagtgtaaggccttttaaaacccaa

SEQ ID NO: 185027 - DNA, 1834 bp, Homo Sapiens
  misc_feature (606)..(614): n is a, c, g, or t
cacatactgctgaagcattctgtacaaccgtgtgttatcacagtgcagttttaagtgtaacgttagaacttaggcattttccttgtgtggcggaataagaaaggattaaacagttacaagcctccaaattcaaataaaattaaatcacagttcagatgaaactgaatatcattgtaataatctcataatatatatttgtaactttgtagctatctttgaaatcacttgactttgcaatggtgctaagctgatagatttaaatacacagacgggcgagtggcgcccgtgtcgatgtcttcagccagtggtgaccctgcttttgtaaccgcgttaacctgacaaaacctcagcagcagaagtccctatttttctaggagttcatcgtgcagacagtcttcactacaggactcggccctggggcctctgcctctcgtctgaccttgcagccttagtcgttggaggctggagcgcaatggccctgccgtctgtggagcctctgggcggccttctttcctttctgtcaacctctcatttcacagaaaaaggctgaatttcattttttccagcatgaaagccaggatcggttagtggttggattctattggnnnnnnnnnaaaacagatggagttactgtgaagaagttttcacaactatttatgctggtaaaacaaatgctgttaaatcaccttatgcgtcgttttcaacagcagtggggctaattacccggaatacggtctcaccgatgcagttttcatggacatagaaaattcaaatagaatatataatattgaatttaagattttgggggttaaaaaagaaaacttaactttataaaattatttattctattttaagccttctatcatattttcccatccaattgtttggtttcagtggtccagctttatttacaggcatataaaatgaaattgtgagatgttttgcaagcttctttttactttgagtagcttttaatttgtatgtttttatgtggatgaagagcattttttatgcttttgtgcaataggttccaatatgcatttattagacatctgtttaaatggtaatgtagcatttattttgctaaattgaaagggaacatagatggaattccaaaatatgtacattcagctgtttggtttttcgtttttcattgttattattgtgagaatgctgttattggggttgtgtgtgagtgcccgtcagccagtgatgcctcgggccacgctgtgggccacctcagtcctgcctgggtcctggtgccttggaccccacgtgcttgtggccaggctgcccctgggcagggccatgtggcctcagaccacaagagcggagctgccctggcccaagcactgcagctgcctgcacccccgggcttcgcagccttgcttgttttctctgaacagcaacagaacagtgttcacagcgattcaaagggtggcattgggttggacgttctgggtacaagccaacctagtcccacgttgtacgtgaatgtttaatgtgctctcaaaacatggaaaataagtttagtgcacatagctaaatcacaaaacatccaatttctctgtttcctcaggaagtcattactgcgccaccacatcacatgaccttaacatgatcaatgtatttctctgccttgacatttaaatacataaattgagataagtagattagaaaatcattcaaatgataccataatttgtacgggacagggtgcgggcaatggccacgtggccaaggccccgcaggaacgcgccgaggtctccctcaccctccaggtgtccttcgcacccaacagtgcgtctgaggaacgagctgcagtttgagccaa

SEQ ID NO: 185028 - DNA, 1213 bp, Homo Sapiens
  misc_feature (817)..(838): n is a, c, g, or t
ttggggtacatatcatgtaattatgaactgttaaaaatggttttataagtatgttccatgatgtaaaaatgtcaacacttagaaaaagcacatggacatcctgctttattacatgattacacctgaaggttgtgctgccatgcacattaatatgtaatgcgggcgttgtttatggggttctttgcagcaccagatgcctctcttccggaagaagatggtgtgggaaatccttcatcagcagttgctgtgagaaaactttgcctggtccctctagctgctggtggttctttcacagacatttccatatacctcatgcattgtgggttaaaaagtccctgcatcacttctgttctcacaggtactgagctgtcaaaagtgcatgaaggcctctcactgtactctagtcctgacttggggtgcagagggctgcttgcaatcctgtttgtaaggctgtgcctgctcagagctttggactgttcaacccacacaagaacaaacgctaactaatattttttttaagagattcttttccctatgaatgtgggaaatgcaggatttattctgtgaattgtttgtttctgtgtgtttgttcagcgtattcattcactcactcgtttgcaaacataatgggcagtggtcatttactgctgctcttttacagttagctctaaattacttgtttgaactatttatttctgaaaggaatgttactcaagctgccactccctgctgaagagcaggagggaactctcactgggggcggaaggaagtggagctggagcagtaactgccaacatgaagctggagggtttgggannnnnnnnnnnnnnnnnnnnnngaggctcaaaaaatgctgggagaaatgaaaatgctgtgggatagggctcctgttgcctttcagaggaagtctgacactacagcgttggcacagtgccgtgaacagtggaactgtgcccaagggactctgactatccaagcatcttccgaagagtgttgtggtcaccttaaagagacttccctttctggaaatgtggtgacttggcttagtcttcaaactggattcatggatttgaagtaactgtaaaccctaaatcttcattttcatcccagatctggtgagtataaacctcagaatttgtaggggctggcctgagctgtttatttcaaaggatactattcaatttaaagctatttttcttcagagtttttgttt

SEQ ID NO: 185029 - DNA, 1694 bp, Homo Sapiens
  misc_feature (58)..(97): n is a, c, g, or t
  misc_feature (483)..(544): n is a, c, g, or t
  misc_feature (1195)..(1207): n is a, c, g, or t
tgtacaaaaatccattttagtgccaaacgaggaactttcgatggtgatgagctctaannnnnnnnnnnnnnnnnnnnnnnnnnnnnnnnnnnnnnnncgttcattgcactcagtatcagaagaacgcacagatgaaatgacacataaagaaacaaatgagcaggaagaaagattgctcgccacagcttccttcactaaatcatcccgcagcagcaggactcggtctagcaaggccatcttgttgccggacctttctgaaccaaacaatgagcctttattttctccagcgtcagaagttccaaggaaagcaaaagctaaaaaaatagaggttcctgcacagctgaaagaattagtttcggatttatcttctcagtttgtcatctcacctcctgctttaaggagcagacaaaaaaacacatccaataagaacaagcttgaagatgaactgaaagatgatgcacaatcagtagaaactctgggaannnnnnnnnnnnnnnnnnnnnnnnnnnnnnnnnnnnnnnnnnnnnnnnnnnnnnnnnnnnnngaaagtgcttggtcacctcctcccatagaaattcggctgatttcccccttggctagcccagctgacggagtcaagagcaaaccaagaaaaactacagaagtgacaggaacaggtcttggaaggaacagaaagaaactgtcttcctatccaaagcaaattttacgcagaaaaatgctgtaatttcttgggaagattttaatgtacacctatttgtaaagtcatcagaatagtggggattattaaatatctagtttggaagaaaataatttatataaattattgtaaatttttatgtaaacagaaggtcttcaataagtaaagtaactccatatggagtgattgtttcagtccaggcaatttttctattttatattaagacttcatacatttatatatgtaaatatggcttattaatggaatgttaaataaaatgtatacttcacagtcgtttgtgtcttggatttttgaaagggaggggatatctgtttaaatagttttatatgctcattggtctcattttctctataattaaaatactagaccagtcttaaaatggggatgattgaagtattgatatttctttttacagttactattttataatttatgcactttgattctgtgattcagatttctaatcagaaaatgtannnnnnnnnnnnnggctgttactatgttaaaattgaattatgggcatgtcattttgccatctttgtagtttcacaaattttgtgtaatctacctcaaatgaataatccaagtattggttaactataatgttggcatctcttattcggcaagcttaaaggctctttaaagtcttaattagtcaaagactaatccaggttagattgaccggttcactgctcacttgcaaccttatcaaagggtttgacaaagggaaatgtaaaataaatctgtttatggatattgagtgcatcttgtatgtgcctaatattgataggatgagatgtctgaacaaatttttataatattgctgtgaaggagcttgctattgaaccacagaaatcccttaatattcagttttaaaactggcaaattctcacaggacctcagcacagattattgaggttgggagagagtgagtagatgtagaaaaggagaaaaacaacacacgccctgttctcta

SEQ ID NO: 185030 - DNA, 1251 bp, Homo Sapiens
  misc_feature (1104)..(1143): n is a, c, g, or t
ttggcaagaagtaaagaaattacttcagatacaatggaacagtccattcatgaaacaatacctttagtgagccaaaacataatgtgtcccactaaattggtcaaatctgcatttaagactgctcaggaaacaagcacaatgactatgaatgtcagccaggttgatgacgtggtttcctccaaaactcgtacgagaggtcaacgtatccaaaacgtgaatgtcaaatcagcacaacaggaagcatcagcagatgttgctactcctaagatgccagggcagtcagtcaggaagaaaactaggaaggcaaaagaaatttctgaagcttctgaaaacatctattctgatgtcagaggactatctcagaaccagcaaatacctcaaaattctgttacgcctaggagaggaaggagaaagaaagaagttaatcaggacatactagaaaacaccagttctgtggaacaagaattacagatcactacaggtagggaatcaaaaagattaaaatcatctcagctgttggaaccagcagttgaagaaactactaaaaaagaagttaaggtttcatctgttacaaaaaggactcctagaagaattaaaagatctgtagaaaatcaggaaagtgttgaaattataaatgatctaaaagttagtacggtaacaagtcctagcagaatgatcagaaaattgagaagtactaatttagatgcttctgaaaatacaggaaataagcaagatgataaatccagtgacaagcagctgcgtattaaacatgttagaagggtcagagggagagaagttagtccatcagatgtgagagaagactccaaccttgagtcatctcagttgactgttcaagcagaatttgatatgtctgccatacctagaaaacgtggtagaccaagaaaaatcaatccatctgaagatgtaggatctaaggctgttaaggaagagagaagccccaagaagaaagaagctcccagcattagaaggagatctacaagaaataccccagctaaaagtgaaaatgttgatgttggaaaaccagctttaggaaaatccattttagtgccaaacgaggaactttcgatggtgatgagctctaannnnnnnnnnnnnnnnnnnnnnnnnnnnnnnnnnnnnnnncgttcattgcactcagtatcagaagaacgcacagatgaaatgacacataaagaaacaaatgagcacgaagaaagattgctcgccacagcttccttcactaaatcatcc

SEQ ID NO: 185031 - DNA, 1483 bp, Homo Sapiens
  misc_feature (673)..(712): n is a, c, g, or t
  misc_feature (1125)..(1163): n is a, c, g, or t
ttggctagaaaacaccagttctgtggaacaagaattacagatcactacaggtagggaatcaaaaagattaaaatcatctcagctgttggaaccagcagttgaagaaactactaaaaaagaagttaaggtttcatctgttacaaaaaggactcctagaagaattaaaagatctgtagaaaatcaggaaagtgttgaaattataaatgatctaaaagttagtacggtaacaagtcctagcagaatgatcagaaaattgagaagtactaatttagatgcttctgaaaatacaggaaataagcaagatgataaatccagtgacaagcagctgcgtattaaacatgttagaagggtcagagggagagaagttagtccatcagatgtgagagaagactccaaccttgagtcatctcagttgactgttcaagcagaatttgatatgtctgccatacctagaaaacgtggtagaccaagaaaaatcaatccatctgaagatgtaggatctaaggctgttaaggaagagagaagccccaagaagaaagaagctcccagcattagaaggagatctacaagaaataccccagctaaaagtgaaaatgttgatgttggaaaaccagctttaggaaaatccattttagtgccaaacgaggaactttcgatggtgatgagctctaannnnnnnnnnnnnnnnnnnnnnnnnnnnnnnnnnnnnnnncgttcattgcactcagtatcagaagaacgcacagatgaaatgacacataaagaaacaaatgagcaggaagaaagattgctcgccacagcttccttcactaaatcatcccgcagcagcaggactcggtctagcaaggccatcttgttgccggacctttctgaaccaaacaatgagcctttattttctccagcgtcagaagttccaaggaaagcaaaagctaaaaaaatagaggttcctgcacagctgaaagaattagtttcggatttatcttctcagtttgtcatctcacctcctgctttaaggagcagacaaaaaaacacatccaataagaacaagcttgaagatgaactgaaagatgatgcacaatcagtagaaactctgggaaagccaaaagcgaaacgaatcaggacgtnnnnnnnnnnnnnnnnnnnnnnnnnnnnnnnnnnnnnnngtgcttggtcacctcctcccatagaaattcggctgatttcccccttggctagcccagctgacggagtcaagagcaaaccaagaaaaactacagaagtgacaggaacaggtcttggaaggaacagaaagaaactgtcttcctatccaaagcaaattttacgcagaaaaatgctgtaatttcttgggaagattttaatgtacacctatttgtaaagtcatcagaatagtgtggattattaaatatctagtttggaagaaaataatttatataaattattgtaatttttatgtaaaccgaaggtcttcaataagtaaagtaac

SEQ ID NO: 185032 - DNA, 3566 bp, Homo Sapiens
ttggggtttgtgaagtcgtggcccgttagcaggaagcctaacagtcgccccgacgctagtgagggacccaatctgagtccccggccagccgaatccaagccgtgtgtactgcgtgctcagcactgcccgacagtcctagctaaacttcgccaactccgctgcctttgccgccaccatgcccaaaacgatcagtgtgcgtgtgaccaccatggatgcagagctggagtttgccatccagcccaacaccaccgggaagcagctatttgaccaggtggtgaaaactattggcttgagggaagtttggttctttggtctgcagtaccaggacactaaaggtttctccacctggctgaaactcaataagaaggtgactgcccaggatgtgcggaaggaaagccccctgctctttaagttccgtgccaagttctaccctgaggatgtgtccgaggaattgattcaggacatcactcagcgcctgttctttctgcaagtgaaagagggcattctcaatgatgatatttactgcccgcctgagaccgctgtgctgctggcctcgtatgctgtccagtctaagtatggcgacttcaataaggaagtgcataagtctggctacctggccggagacaagttgctcccgcagagagtcctggaacagcacaaactcaacaaggaccagtgggaggagcggatccaggtgtggcatgaggaacaccgtggcatgctcagggaggatgctgtcctggaatatctgaagattgctcaagatctggagatgtatggtgtgaactacttcagcatcaagaacaagaaaggctcagagctgtggctgggggtggatgccctgggtctcaacatctatgagcagaatgacagactaactcccaagataggcttcccctggagtgaaatcaggaacatctctttcaatgataagaaatttgtcatcaagcccattgacaaaaaagccccggacttcgtcttctatgctccccggctgcggattaacaagcggatcttggccttgtgcatggggaaccatgaactatacatgcgccgtcgcaagcctgataccattgaggtgcagcagatgaaggcacaggcccgggaggagaagcaccagaagcagatggagcgtgctatgctggaaaatgagaagaagaagcgtgaaatggcagagaaggagaaagagaagattgaacgggagaaggaggagctgatggagaggctgaagcagatcgaggaacagactaagaaggctcagcaagaactggaagaacagacccgtagggctctggaacttgagcaggaacggaagcgtgcccagagcgaggctgaaaagctggccaaggagcgtcaagaagctgaagaggccaaggaggccttgctgcaggcctcccgggaccagaaaaagactcaggaacagctggccttggaaatggcagagctgacagctcgaatctcccagctggagatggcccgacagaagaaggagagtgaggctgtggagtggcagcagaaggcccagatggtacaggaagacttggagaagacccgtgctgagctgaagactgccatgagtacacctcatgtggcagagcctgctgagaatgagcaggatgagcaggatgagaatggggcagaggctagtgctgacctacgggctgatgctatggccaaggaccgcagtgaggaggaacgtaccactgaggcagagaagaatgagcgtgtgcagaagcacctgaaggccctcacttcggagctggccaatgccagagatgagtccaagaagactgccaatgacatgatccatgctgagaacatgcgactgggccgagacaaatacaagaccctgcgccagatccggcagggcaacaccaagcagcgcattgacgaatttgagtctatgtaatgggcacccagcctctagggacccctcctccctttttccttgtccccacactcctacacctaactcacctaactcatactgtgctggagccactaactagagcagccctggagtcatgccaagcatttaatgtagccatgggaccaaacctagccccttagcccccacccacttccctgggcaaatgaatggctcactatggtgccaatggaacctcctttctcttctctgttccattgaatctgtatggctagaatatcctacttctccagcctagaggtactttccacttgattttgcaaatgcccttacacttactgttgtcctatgggagtcaagtgtggagtaggttggaagctagctcccctcctctcccctaccactgtcttcttcagggtcctgagatttacacggttggagtgttatgcggtctagggaatgagacaggacctaggatatcttctccaggatgtcaactgacctaaaatttgccctcccatcccgtttagagttatttaggctttgtaacgattgggggataaaaagatgttcagtcatttttgtttctacctcccagatcggatctgttgcaaactcagcctcaataagccttgtcgttgactttagggactcaatttctccccagggtggatgggggaaatggtgccttcaagaccttcaccaaacatactagaagggcattggccattctattgtggcaaggctgagtagaagatcctaccccaattccttgtaggagtataggccggtctaaagtgagctctatgggcagatctaccccttacttattattccagatctgcagtcacttcgtgggatctgcccctccctgcttcaatacccaaatcctctccagctataacagtagggatgagtacccaaaagctcagccagccccatcaggactcttgtgaaaagagaggatatgttcacacctagcgtcagtattttccctgctaggggttttaggtctcttcccctctcagagctacttgggccatagctcctgctccacagccatcccagccttggcatctagagcttgatgccagtaggctcaactagggagtgagtgcaaaaagctgagtatggtgagagaagcctgtgccctgatccaagtttactcaaccctctcaggtgaccaaaatccccttctcatcactcccctccaaagaggtgactgggccctgcctctgtttgacaaacctctaacccaggtcttgacaccagctgttctgtcccttggagctgtaaaccagagagctgctggggattctggcctagtcccttccacacccccaccccttgctctcaacccaggagcatccacctccttctctgtctcatgtgtgctcttcttctttctacagtattatgtactctactgatatctaaatattgatttctgccttccttgctaatgcaccattagaagatattagtcttggggcaggatgattttggcctcattactttaccacccccacacctggaaagcatatactatattacaaaatgacattttgcccaaattattaatataagaagctttccagtattagtgatgtcatcttgtcactataggtcatacaatccaatcctaagtacttgttatttgttttaatattactgtttg

SEQ ID NO: 185033 - DNA, 1376 bp, Homo Sapiens
ttgggggaaagttctgatcaaaatacacaaagacacaagccaggtccccaccgcgcttggcgatgcatccatagcagccttggtgctgtggacactccctggggcccagcgaaggggagagtttgctcccaaaggcgcaccaatgaccaacatttgccccccggaggaaagaactggaaccagcctctgacctgtccaggtgccctgtccagctgactgcaaggacagagaggagtcctgcccagctcttggatcagtctgctggccgaggagcccggtggagccaggggtgaccctggagcccagcctgccccgaggaggccccggctcagagccatgccaggtgtctgtgatagggcccctgacttcctctccccgtctgaagaccaggtgctgaggcctgccttgggcagctcagtggctctgaactgcacggcttgggtagtctctgggccccactgctccctgccttcagtccagtggctgaaagacgggcttccattgggaattgggggccactacagcctccacgagtactcctgggtcaaggccaacctgtcagaggtgcttgtgtccagtgtcctgggggtcaacgtgaccagcactgaagtctatggggccttcacctgctccatccagaacatcagcttctcctccttcactcttcagagagctggccctacaagccacgtggctgcggtgctggcctccctcctggtcctgctggccctgctgctggccgccctgctctatgtcaagtgccgtctcaacgtgctgctctggtaccaggacgcgtatggggaggtggagataaacgacgggaagctctacgacgcctacgtctcctacagcgactgccccgaggaccgcaagttcgtgaacttcatcctaaagccgcagctggagcggcgtcggggctacaagctcttcctggacgaccgcgacctcctgccgcgcgctgagccctctgccgacctcttggtgaacctgagccgctgccgacgcctcatcctggtgctttcggacgccttcctgagccgggcctggtgcagccacagcttccgggagggcctgtgccggctgctggagctcacccgcagacccatcttcatcaccttcgagggccagaggcgcgaccccgcgcacccggcgctccgcctgctgcgccagcaccgccacctggtgaccttgctgctctggaggcccggctccgtgactccttcctccgatttttggaaagaattgcagctggcgctgccgcggaaggtgcggtactggccggtggaaggagacccccaaacgcagctgcattattacaaggaccccatgctgattcttcaaggccgagtccctgagggccgggccctggactcaga

SEQ ID NO: 185034 - DNA, 2006 bp, Homo Sapiens
ttggctacacgggacccagcaatgcaacggcagggatggagacggagggcagctgcctggagaaccccaagtattacaactatgtggccgtgctgtccctcatcgccaccatcatgctggtgcaggtcagccacatggtgaagctcacgctcatgctgctcgtcgcaggcgccgtggccaccatcaacctctatgcctggcgtcccgtctttgatgaatacgaccacaagcgttttcgggagcacgacttacctatggtggccttagagcagatgcaaggattcaaccctgggctcaatggcactgacaggctgcccctggtgccttccaagtactctatgacggtgatggtgttcctcatgatgctcagcttctactacttctcccgccacgtagaaaaactggcacggacacttttcttgtggaagattgaggtccacgaccagaaggaacgtgtctatgagatgcgacgctggaacgaggccttggtcaccaacatgttgcctgagcacgtggcacgccatttcctggggtccaagaagagagatgaggagctgtatagccagacgtatgatgagattggagtcatgtttgcctccctgcccaactttgctgacttctacacagaggagagcatcaacaatggtggtattgagtgtctgcgtttcctcaatgaaatcatctcggattttgactctctcctggacaatcccaagttccgggtgatcaccaagatcaaaaccattggcagcacgtatatggcggcttcaggagtcacccccgatgtcaacaccaatggctttgccagctccaacaaggaagacaagtccgagagagagcgctggcagcacctggctgacctggccgacttcgcgctggccatgaaggatacgctcaccaacatcaacaaccagtccttcaataacttcatgctgcgcataggcatgaacaaaggcggggttctggctggggtcatcggagcccggaaaccacactacgacatctggggcaatacagtcaatgtagccagcaggatggagtccacgggggtcatgggcaacattcaggtggtagaagaaacccaagtcatcctccgagagtacggcttccgctttgtgaggcgaggccccatctttgtgaaggggaagggggagctgctgaccttcttcttgaaggggcgggataagctagccaccttccccaatggcccctctgtcacactgccccaccaggtggtggacaactcctgaatggcctcgagcctgcaacagtccaaaccggaagggagaatttattttttgaaactgaaggaagtcccgaccttcctggattgaagtgcacactcatggactttaggtttagaaacctcctcagccttcatttgttcgtggatgtgtgagctctgagggtggccctgctattcctctgtgtgcctgtagtgtccccagcataggggtcttaggcatagggctgaacagtccttccagagccctcgttccaatccctgccgtccttgcccctgaggggccctgaccactgtgagcaggagggtggcagagctgggacaaagctgcctttgccgctgggctttccgggactgtggagggagcacaggcggggaagctccacttcagacagggcttggtggggcaggacatggctcccattttgaagggaggtctccatgtggtccgagtgaggtgagacggccctcgtcctggtgttcctgatcatcttgaaaggttcttctggaactcctgtccccttagtcatgagaacagaaagtgcaatatttcctttcacctggcaggggaggggggatttatttctgaaagaaaaatatataaacagatcttctacatttatatttttaatcttctgttaaatacactttccgatattgccttgccttttgagctcttgctacagtcgcctttgctactgctttaagagaatttacaggtattgataaagaacaagactgttttattaaaagctttattcaa

SEQ ID NO: 185035 - DNA, 1851 bp, Homo Sapiens
  misc_feature (381)..(438): n is a, c, g, or t
  misc_feature (867)..(892): n is a, c, g, or t
ttgggggaagcctcacccactgtgcagcccaggcgccgggcgctgcctctacagctgtgtgtaggcctgggggcgagggtcttcggaacgtagcgctggctgcggccccgcccgcctacccacccgcccgtccggcagccggctcccgccgcctccgcgctctgtctggggccagccacctggcgggccgctccggtgcgcctgcccgcgcttttcactgacaggcgctgttccccacagccagcgccgcccgccacgtcccagctctcggccaacggagctgcgcggcgggtgacctttccgagcccagcgcgatgacggctccttgctcccagccggcgcagcttcctggacgccgccagctcgggctggtgccgttcnnnnnnnnnnnnnnnnnnnnnnnnnnnnnnnnnnnnnnnnnnnnnnnnnnnnnnnnnntggcgccggcgcgcggctgggagagcggagacctggagttgtttgacttagtggaggaggtgcagctcaacttctaccagttcctcggggtgcagcaggatgcatcatctgcagacatcagaaaagcatatcgtaagctttcactaactttacatccagacaagaataaagatgaaaatgcagaaactcagtttagacaattggtggccatttatgaagttttaaaggatgatgaacgaaggcagaggtatgatgatattctgatcaatggacttccagattggcgacagcctgtattctactacaggcgggtgagaaaaatgagcaatgctgagctggcattactcttgttcattattctcacagtgggtcattatgctgtggtttggtcaatctacctggaaaaacaactggatgaactactaagtnnnnnnnnnnnnnnnnnnnnnnnnnngactggcagcaagagtgtggatgtatcaaaactcggtgcttcagaaaaaaatgaaagattgctgatgaaaccacagtggcatgatttgcttccatgcaaactggggatttggttttgccttacactaaaagcattacctcacctcatccaggatgctgggcagttttatgctaaatataaagaaacaagattgaaggaaaaggaagatgcactgactagaactgaacttgaaacacttcaaaaacagaagaaagttaaaaaaccaaaacctgaatttcctgtatacacacctttagaaactacatatattcagtcttatgatcatggaacttccatagaagaaattgaggaacaaatggatgattggttggaaaacaggaaccgaacacagaaaaaacaggcacctgaatggacagaagaggacctcagccaactgacaagaagtatggttaagttcccaggagggactccaggtcgatgggaaaagattgcccacgaattgggtcgatctgtgacagatgtgacaaccaaagccaagcaactgaaggattcagtgacctgctccccaggaatggttagactctccgaactcaaatcgacagttcagaattccaggcccatcaaaacggccaccaccttgcccgatgacatgatcacccagcgagaggacgcagagggggtggcagcggaggaggagcaggagggagactccggtgagcaggagaccggggccactgatgcccggcctcggaggcggaagccagccaggctgctggaggctacagcgaagccggagccagaggagaagtccagagccaagcggcagaaggactttgacatagcaaacaaaacgagtccagcgacgaggagagcctgagaaaagagagagctcggtctgcagaggagccgtggactcaaaatcaacagaaacttctggaactggcgttgcagcagtaccc

SEQ ID NO: 185036 - DNA, 1019 bp, Homo Sapiens
ctttgtacaaaaaagttggggaaaaggaagatgcactgactagaactgaacttgaaacacttcaaaaacagaagaaagttaaaaaaccaaaacctgaatttcctgtatacacacctttagaaactacatatattcagtcttatgatcatggaacttccatagaagaaattgaggaacaaatggatgattggttggaaaacaggaaccgaacacagaaaaaacaggcacctgaatggacagaagaggacctcagccaactgacaagaagtatggttaagttcccaggagggactccaggtcgatgggaaaagattgcccacgaattgggtcgatctgtgacagatgtgacaaccaaagccaagcaactgaaggattcagtgacctgctccccaggaatggttagactctccgaactcaaatcgacagttcagaattccaggcccatcaaaacggccaccaccttgcccgatgacatgatcacccagcgagaggacgcagagggggtggcagcggaggaggagcaggagggagactccggtgagcaggagaccggggccactgatgcccggcctcggaggcggaagccagccaggctgctggaggctacagcaaagccggagccagaggagaagtccagagccaagcggcagaaggactttgacatagcagaacaaaacgagtccagcgacgaggagagcctgagaaaagagagagctcggtctgcagaggagccgtggactcaaaatcaacagaaacttctggaactggcgttgcagcagtacccaaggggatcctctgaccgctgggacaaaatagccagatgtgtcccgtccaagagcaggaagactgtatcgctaggtacaagttgctggttgaactggtccaaaaaaaaacaagctaaaagctgaatattctgggagatgatgttcacttcattttccaaaatggatatcttaaaatcttatgcgaaaatttggcattttggacctcaatattttcacgtcatggtgcccttaatt

SEQ ID NO: 185037 - DNA, 1525 bp, Homo Sapiens
ctttgtacaaaaaagttgttggcgctggagcccgggtcgagaggacgaggtgccgctgcctggagaatcctccgctgccgtcggctcccggagcccagccctttcctaacccaacccaacctagcccagtcccagccgccagcgcctgtccctgtcacggaccccagcgttaccatgcatcctgccgtcttcctatccttacccgacctcagatgctcccttctgctcctggtaacttgggtttttactcctgtaacaactgaaataacaagtcttgatacagagaatatagatgaaattttaaacaatgctgatgttgctttagtaaatttttatgctgactggtgtcgtttcagtcagatgttgcatccaatttttgaggaagcttccgatgtcattaaggaagaatttccaaatgaaaatcaagtagtgtttgccagagttgattgtgatcagcactctgacatagcccagagatacaggataagcaaatacccaaccctcaaattgtttcgtaatgggatgatgatgaagagagaatacaggggtcagcgatcagtgaaagcattggcagattacatcaggcaacaaaaaagtgaccccattcaagaaattcgggacttagcagaaatcaccactcttgatcgcagcaaaagaaatatcattggatattttgagcaaaaggactcggacaactatagagtttttgaacgagtagcgaatattttgcatgatgactgtgcctttctttctgcatttggggatgtttcaaaaccggaaagatatagtggcgacaacataatctacaaaccaccagggcattctgctccggatatggtgtacttgggagctatgacaaattttgatgtgacttacaattggattcaagataaatgtgttcctcttgtccgagaaataacatttgaaaatggagaggaattgacagaagaaggactgccttttctcatactctttcacatgaaagaagatacagaaagtttagaaatattccagaatgaagtagctcggcaattaataagtgaaaaaggtacaataaactttttacatgccgattgtgacaaatttagacatcctcttctgcacatacagaaaactccagcagattgtcctgtaatcgctattgacagctttaggcatatgtatgtgtttggagacttcaaagatgtattaattcctggaaaactcaagcaattcgtatttgacttacattctggaaaactgcacagagaattccatcatggacctgacccaactgatacagccccaggagagcaagcccaagatgtagcaagcagtccacctgagagctccttccagaaactagcacccagtgaatataggtatactctattgagggatcgagatgagctttaaaaacttgaaaaacagtttgtaagcctttcaacagcagcatcaacctacgtggtggaaatagtaaacctatattttcataattctatgtgtatttttattttgaataaacagaaagaaattttgggttttt

SEQ ID NO: 185038 - DNA, 1683 bp, Homo Sapiens
ttggcgctgttcggggcccggcctgctccgggccctcccagcgtcgccgctagctgacttagggctcccgcccacactgcgcacggccttgctgagggccggctcgtagtgggaggcttcgcgttcacctgaacatttccgcctcctctggatgggggatgagaggcggggctgatgcatcgcagcagtcctggaccctgacttcggacttggagaagaaacgccgaggaggaacgggagttagggggttagcagcttggcgcgctgggagccggccacccctggtctccggacttcacttcccaggaggcctcgcgcgcgactggaagtgctgcgagcctataagaaggcgaggcggcacccgccgctctgctctggggcggcattgccagccggctgtaggcattcagggcagtgtcttctgcatctcctaggaacctcgggagcggcagctccggcgcctggtagcgagaggcgggttccggagatcccggcctcacttcgtcccactgtggttaggggtgagtcctgcaaatgttaagtgatttgctcaaggtgcccatttcgcaggaattggagcccaggccagttctctgagcctatcattagggctaaaggagtgcgtgatcagaatggtgtctggacggttctacttgtcctgcctgctgctggggtccctgggctctatgtgcatcctcttcactatctactggatgcagtactggcgtggtggctttgcctggaatggcagcatctacatgttcaactggcacccagtgcttatggttgctggcatggtggtattctatggaggtgcgtcactggtgtaccgcctgccccagtcgtgggtggggcccaaactgccctggaaactcctccatgcagcgctgcacctgatggccttcgtcctcactgttgtggggctggttgctgtctttacgtttcacaaccatggaaggactgccaacctctactcccttcacagctggctgggcatcaccactgtcttcctcttcgcctgccagtggttcctgggctttgctgtcttcctcctgccctgggcgtccatgtggctgcgcagcctcctaaaacctatccacgtcttttttggagccgccatcctctctctgtccatcgcatccgtcatttcgggcattaatgagaagcttttcttcagtttgaaaaacaccaccaggccataccacagcctgcccagtgaggcggtctttgccaacagcaccgggatgctggtggtggcctttgggctgctggtgctctacatccttctggcttcatcttggaagcgcccagagccggggatcctgaccgacagacagctgctgctacagctgaggcctggatcccggcctttccctgtgacttacgtgtctgtcaccggcaggcagccctacaaatcctggtgacctgctctcccaagaacagagcctgtccccagatgtcccagtagcgatgagtaacagaggtggctgtggacttcctctacttctctttgctggatcagggccttcctgcctcccgctgggcaggtctggccttgctctcttggcagggccccagcccctctgaccactctgcagctcaccttgcagctgatgccaaagttgtggtggtccagtgtgcagcagccctgggagccacctgccacccttcagaggggttcct

SEQ ID NO: 185039 - DNA, 1286 bp, Homo Sapiens
gacttgcccagcgggaggcaggaaggccctgatccagcaaggagaagtagaggaagtccacagccacctttgttattcatcgctactgggacatctggggacaggctctgttcttgggagagcaggtcaccaggatttgtagggctgcctgccggtgacagacacgtaagtcacagggaaaggccgggatccaggcctcagctgtagcagcagctggaagaggtggagccgcacggtcacaatacatgcagacacagagcagcaatacgaaacagaacagctcagagcggtcagctcctcagcagaagctgcgtgggccgccactccccctttctgcaatcaccccatgatgtctccaccccacctcacatccagatggggctggatggcagagcagatgaagcctgctctgtggcggggcagcctaactgaaatgcacacctttatgggggaagtggacggacacctcacctccctcatgtttcacaccgtggactgcacttgagtcccagctcttcaccacatccctaggagtcttaagaggaaatcagtctgatttcttcagacaggagcagcaagagcggccagagcgaggaggacctcgtgtgaatggaggacctgagaggctgacgccaaggagtgcagaagccaaagccaccaaggaaagcagacaggcagcaagcagccagagaaggcaggcccagcacccaggcaaagccaccaaggaaagcagacaggcagcaagcggccggagagggcaggcccagcacccaggcaaagccaccaaggaaagcagacaggcagcaagcggccggagagggcaggccagcacccaggcaagaagtctgggcccagcattggaagaaagtcgcctgctgaaaccagccgggagccctgggaagagcagagcttctgaggggagcacaggctgcaccaccaggagctcttgggagccccttcctgctgcttcactccccatcatgcagcaggggctgtctgtcggtcaggatccccggctctgggcgcttccaagatgaagccagaaggatgtagagcaccagcagcccaaaggccaccaccagcatcccggtgctgttggcaaagaccgcctcactgggcaggctgtggtatggcctggtggtgtttttcctgaagatgacaaaacaatgtgagccctcgagagatttttccacctatttttgtttagtgggagactcgatgtcactaacagagggtgagaaaaccttcccgggtccatatgtgatttagaattttaacaccctttc

SEQ ID NO: 185040 - DNA, 1336 bp, Homo Sapiens
ttggctccatcatctccgtgcagctgctcatcactgtggccatcattgctatcttcacctttgtggaacctgtcagcgcctttgtgaggagaaatgtggctgtctactacgtgtcctatgctgtcttcgttgtcacctacctgatccttgcctgctgccagggacccagacgccgtttcccatggaacatcattctgctgaccctttttacttttgccatgggcttcatgacgggcaccatttccagtatgtaccaaaccaaagccgtcatcattgcaatgatcatcactgcggtggtatccatttcagtcaccatcttctgctttcagaccaaggtggacttcacctcgtgcacaggcctcttctgtgtcctgggaattgtgctcctggtgactgggattgtcactagcattgtgctctacttccaatacgtttactggctccacatgctctatgctgctctgggggccatttgtttcaccctgttcctggcttacgacacacagctggtcctggggaaccggaagcacaccatcagcccggaggactacatcactggcgccctgcagatttacacagacatcatctacatcttcacctttgtgctgcagctgatgggggatcgcaattaaggagcaagcccccattttcacccgatcctgggctctcccttccaagctagagggctgggccctatgactgtggtctgggctttaggcccctttccttccccttgagtaacatgcccagtttcctttctgtcctggagacaggtggcctctctggctatggatgtgtgggtacttggtggggacggaggagctagggactaactgttgctcttggtgggcttggcagggactaggctgaagatgtgtcttctccccgccacctactgtatgacaccacattcttcctaacagctggggttgtgaggaatatgaaaagagcctattcgatagctagaagggaatatgaaaggtagaagtgacttcaaggtcacgaggttcccctcccacctctgtcacaggcttcttgactacgtagttggagctatttcttcccccagcaaagccagagagctttgtccccggcctcctggacacataggccattatcctgtattcctttggcttggcatcttttagctcaggaaggtagaagaaatctgtgcccatgggtctccttgcttcaatcccttcttgtttcagtgacatatgtattgtttatctgggttagggatgggggacagataatagaacgagcaaagtaacctatacaggccagcatggaacagcatctcccctgggcttgctcctggcttgtgacgctataa

SEQ ID NO: 185041 - DNA, 2750 bp, Homo Sapiens
ctttgtacaaaaaagttggagaaatgtgacatctccctgcaattcttcttgcctttctcacttggcaaggaagatggaagtggggacagaggagatggcccctttcgcttaggtggccatgggccttcctttccactaaaaggaattaccgaacagcaaaaagaaggtcttgagatagtgaaaatggtgatgatatctttagaaggtgaagatgggttggatgaaatttattcattcagtgagagtctgagaaaactgtgcgtcttcaagaaaattgagaggcattccattcactggccctgccgactgaccattggctccaatttgtctataaggattgcagcctataaatcgattctacaggagagagttaaaaagacttggacagttgtggatgcaaaaaccctaaaaaaagaagatatacaaaaagaaacagtttattgcttaaatgatgatgatgaaactgaagttttaaaagaggatattattcaagggttccgctatggaagtgatatagttcctttctctaaagtggatgaggaacaaatgaaatataaatcggaggggaagtgcttctctgttttgggattttgtaaatcttctcaggttcagagaagattcttcatgggaaatcaagttctaaaggtctttgcagcaagagatgatgaggcagctgcagttgcactttcctccctgattcatgctttggatgacttagacatggtggccatagttcgatatgcttatgacaaaagagctaatcctcaagtcggcgtggcttttcctcatatcaagcataactatgagtgtttagtgtatgtgcagctgcctttcatggaagacttgcggcaatacatgttttcatccttgaaaaacagtaagaaatatgctcccaccgaggcacagttgaatgctgttgatgctttgattgactccatgagcttggcaaagaaagatgagaagacagacacccttgaagacttgtttccaaccaccaaaatcccaaatcctcgatttcagagattatttcagtgtctgctgcacagagctttacatccccgggagcctctacccccaattcagcagcatatttggaatatgctgaatcctcccgctgaggtgacaacgaaaagtcagattcctctctctaaaataaagaccctttttcctctgattgaagccaagaaaaaggatcaagtgactgctcaggaaattttccaagacaaccatgaagatggacctacagctaaaaaattaaagactgagcaagggggagcccacttcagcgtctccagtctggctgaaggcagtgtcacctctgttggaagtgtgaatcctgctgaaaacttccgtgttctagtgaaacagaagaaggccagctttgaggaagcgagtaaccagctcataaatcacatcgaacagtttttggatactaatgaaacaccgtattttatgaagagcatagactgcatccgagccttccgggaagaagccattaagttttcagaagagcagcgctttaacaacttcctgaaagcccttcaagagaaagtggaaattaaacaattaaatcatttctgggaaattgttgtccaggatggaattactctgatcaccaaagaggaagcctctggaagttctgtcacagctgaggaagccaaaaagtttctggcccccaaagacaaaccaagtggagacacagcagctgtatttgaagaaggtggtgatgtggacgatttattggacatgatataggtcgtggatgtatggggaatctaagagagctgccatcgctgtgatgctgggagttctaacaaaacaagttggatgcggccattcaaggggagccaaaatctcaagaaattcccagcaggttacctggaggcggatcatctaattctctgtggaatgaatacacacatatatattacaagggataatttagaccccatacaagtttataaagagtcattgttattttctggttggtgtattattttttctgtggtcttactgatctttgtatattacatacatgctttgaagtttctggaaagtagatcttttcttgacctagtatatcagtgacagttgcagcccttgtgatgtgattagtgtctcatgtggaaccatggcatggttattgatgagtttcttaaccctttccagagtcctcctttgcctgatcctccaacagctgtcacaacttgtgttgagcaagcagtagcatttgcttcctcccaacaagcagctgggttaggaaaaccatgggtaaggacggactcacttctctttttagttgaggccttctagttaccacattactctgcctctgtatataggtggttttctttaagtggggtgggaaggggagcacaatttcccttcatactccttttaagcagtgagttatggtggtggtctcatgaagaaaagaccttttggcccaatctctgccatatcagtgaacctttagaaactcaaaaactgagaaatttactacagtaattagaattatatcacttcactgttctctacttgcaagcctcaaagagagaaagtttcgttatattaaaacacttaggtaacttttcggtctttcccatttctacctaagtcagctttcatctttgtggatggtgtctcctttactaaataaaaaataacaaaccccttattctcttttttcatgtcctcatacttgcctttgagttccaattcctctttggtgtacagacttcttgggtacc

SEQ ID NO: 185042 - DNA, 2212 bp, Homo Sapiens
  misc_feature (1228)..(1245): n is a, c, g, or t
  misc_feature (1415)..(1424): n is a, c, g, or t
ttggggcaacatctttttgagagcagcattggaccacaccccacaatctcaaatgattgaaattcatgaacatctaggatcccgtgaaggtcactggaccctgttttttctacttcaaatcctgtagtagcctactgaatgagaaaacatattctgacccattgggatcaaatcaaaggcacagtgaactcctcatagcatcttctttggaattactcaggaaccagaactttttacacaaatgtaagaaattctaccaaggagtccccttacctaacagcatctcacaaggctgcaccagattccagaaaaggcttctcttgatacatcaagcattttgtgaccgacttattcttagatcattggttttccaaaggctttgtggccatgaagccctttgagtgaaaactgtgcagaagcccagagtaaaagtgaagctgctctggatgaagtagtgaagcaagagtaggggcctgaatcctgctacaactatcttcctttaccaccgtggtgacacctaaggggacttccttacaacaccttgaactcttccgaacacagtttgaaaaccactgccccagacagcaatatgtttgacctgaatggcattccaatcttttctgtacctccactcagcacagttcatgttcagtagatgctgaacattcttagaaatactgtgtgtgaacttagaaaagtgcaagaagacaggcatgtctttgaccccaggaatgatcatttgctgaagatggtgtcaagtgaacctagattaacagccctccactccagatggatatccagtgattcctagaatgggatatagccagagaacaattctatgcaccctacactgacagactcccttaagcaacaccagatgctctactggtacttgaagtacatgactttgaagtcttgaccctccatgaatacctgaattatcagcaagcgggttttgaagctggtgcctcattgaggccatattagagcaacttgtacatttgacctcttgttatcagccatggtactctacttcgtgtgcaagagataactatgaaagccaaattcaaatactggcaacatttcctaaaggggctcaatatctatcattcgtcttcttttccaaactacacatcactgtatgactcaaccagtagcagttatattgccccttggtttttattcagtttaactactgtttccaagataaatgagctaataagctttnnnnnnnnnnnnnnnnnnggctgaattcttttttcttcatcactggcatatctgcctattctccagaattattatgactattcagctcactttaacagttgaacttcaagcgacaatctttgaacaccccttctcatgtgatttaaaatgaaaccatttggaaaagtttcttctagccagtaatagannnnnnnnnnaattgctctgccttgtgccgagagatgttcttttaagatgaatcttttgatgtctgataccaccaaatataggtggtagggagagttggaggctggccctttgagcaggccattagcttacttgctgggcatttccgatagcttattgcctacctttttgctggaaacaaactgatttgaaaaacaaaatctatgaagactgcagctaaggattttatcggtagacttaagagcttttgtccttgtggatattttagtggaaccacatcagtctcaatactgtcattttacactgactcagagcagctgacttcattccttgccatgatatatatttaaggcaggcattgtaacagacataaagacaacttatctgtttcagcaggaaggattcagtttatgaactctcagaccagatcatgttgaacaaggagactttgatgtgtgtcatgagaaaactcattctttacttcccagtcaatttaaaggccagctatcctgagctactcgaatgaatgcactggttaaacattggaaatagtttgtttatatccttgtctctctctacgccaattgtgattacatgactcgactctacatctcgtcaaacaaggcctaggtctggttgctgtagactgctcgccctcaacaaataaaatctggttgactagcctccttgtatatacaactattatttgttaagaagaattatcgtcaattttctactacccttccaattgtcagctcttttttttcctctctggtttttcctatactttacagaaaaa

SEQ ID NO: 185043 - DNA, 1819 bp, Homo Sapiens
gatgagcaatgcttttttataatagccaactttgtacaaaaaagttgggtcaatttaaaggccagctatcctgagctactcgaatgaatgcactggttaaacattggaaatagtttgtttatatccttgtctctctctaggccaattgtgattacatgactcgactctacatctcgtcaaacaaggcctaggtctggttgctgtagactgctcgccctcaacaaataaaatctggttgactagcctccttgtatatacaactattatttgttaagaagaaattatcgtcaattttctactaccttccaattgtcagctctttttttcctctctggtttttcctatactttacagaaaaagacattgatctatactgccattccctctaatcctgccatactcagtcaaaaggaatgacttaagatgaagatgatcatctgctcgagtctaaaatatacattgtatataagaattggtgattagaaaagcaaaaaacctaaaacttaaatctaggagtctgtatactgtctccatgtctccatgcctcagatctcatctaaatctttgaacagcaccattcaaccaatctgaggccttgacttgcttgtaagatgattctcagagatcggctgagttaaaaaagatgacgacttgattaccaaagaaagtagggccaactttgacaaatctggctctgctgaccctgtcactcccagatgtagcatagactcctaaacagaacctcaagtctgattgaggataaggccttctcctgagctgaaagttctttggcagatgagcaagaaactgaaagctgatgtacctgactggctctgtaagatcagaaaactgtatccagaataagccctatggattaacccctgagtacccagagtaaaaactaatttacagaacttccttattgatctgctggttcttccagatcatattctggctattggtatggctggcctttctgaaggtaccctgcttgtctattttcctgactcagctcttgcctgcctttttcacatgttgctgcaattagactcaccgtgaggactacagtcaatttcagtctatcttgtgcccaatacaacaaggatttttaatagtaacaacccacacctcacccactaggactcaatgttcacaacaggaaggaccattgctgcatactccttgaccagcaacttttttgaagatatttttaagtgcagagtaggcctctattcctgtatgtaattgttcattttcagcacctggaacctcatctatcgggtctggaaggaatacagcagttcgaaagccgcgtccatttctctccttcagtagtgcagaaatgagtccgattcaccagtacacacagaactgtaccagttcaacctagcaaaagaagaaaagtttccactgtacttaaaatttacagctgactcaaattgcctcacagaattatttgatgtagaaggctagttgtcttacttcagatcagcaggacagttgggctctcagactcatgaccactgagtttgcttgtgttgaaactgtggtttcatccaacatatgctattggacatgattattattccattcaatggattacagacttcttgaggacaggacaaacttatctctcatggtgtttttttagaatacttttataaccaaggaagaaaccatgccagctgttaccattcaacttcttaagcagagattaagctttttcatatctgttcttatcctggacatcagtagtttttaattgcccagcatccgttccatcttgtaacaactccctgatgtttcttaaacacctctt

SEQ ID NO: 185044 - DNA, 1434 bp, Homo Sapiens
  misc_feature (1042)..(1101): n is a, c, g, or t
ttggctgtgtctcacgagaagcagcgttccagggactccgttcccgccacccgttcagcaaccctctacacctggacccgacctcctcgccttggaggaagaatataagcgtttaaatgcagaattgcaggcaaaaacagctgacgtggttcaacaagctaaggaaataataagagatcggcaagaagtacgatctaggcctgtttcaacacaaatgaaatcatgtgatgacgaagatgattacagtttaagaggtctgttaccatctgaagggatagttcatcttcattcagaaactaagccaaagaccaaaaacattgatcctgtaaacaaggttcaaaacaaattacactctgcaaataaaggaaggaaaacaaattcaagtgttaaattgaaatactctgatgtccaaactgccgacgatgttgccattccagaggatttctcagacttttcccttgcaaaaacaattagcaaaattgaagggcaactggaggaagaaggcttacctgaatatatagatgatattttttctggtgttagtaatgacattggaacagaagcacagatcagatttctaaaggccaaactccatgttatgcaggaggaattggataatgttgtatgtgaatgcaataaaaaggaggatgaaattcagaatttaaagtctcaagtaaaaaattttgaagaagattttatgagacagcagcgaacaattaatatgcaacagtctcaagtagaaaaatacaaaactcttttcgaagaagcaaacaaaaagtatgatggattacagcaacagttgtcttcagtagaaagggaattagaaaataaaagaagactgcaaaaacaggctgcaagtagtcaaagtgccacagaggttcgcttgaatagagctctagaagaagcagaaaagtataaactggagttaagtaaattaaggcaaaataacaagggtaatgctgcctttattaaatgaacttccaaatcattcttctggagaagctcaactttcagataagtttttgtagggacatagcaaatnnnnnnnnnnnnnnnnnnnnnnnnnnnnnnnnnnnnnnnnnnnnnnnnnnnnnnnnnnnnggagaattaatgatagggttcaagaaacagttaaaattaattgatgttttaaaaaggcaaaagataagaaaactaaggctcagagaaaaagccaaaactagtacttgcatgacacctagtcaagtcctagtagtattcgactttcattttgtggatcaatttttatttggaaaatagcagcaattctcgtacgagtcagattaaaacgtctacaactaccttgaataacttcaactatcacgataattaaaactgcaaaccactggacaaacaggacattgtttgtgctactttctttttcaaaggacagcgctatatggcttagcaaatgaa

SEQ ID NO: 185045 - DNA, 1122 bp, Homo Sapiens
  misc_feature (76)..(117): n is a, c, g, or t
ttggggcaaatgttaatcactttctttccatagggcaaataggaggtgcttttcttatttaattacgctgataaannnnnnnnnnnnnnnnnnnnnnnnnnnnnnnnnnnnnnnnnnggagttgagagtaactttaatttttatgtgtattcatgctgtgtatttatggctacaagtcaaactgatttcatatgtatgcatacatatagtctaatagagatgattgtaattcattataatcttgagttttttaaattagtaagatggctactattgctgttttggggtttttaaggttagatatatatcatgtttaactttttcccctatctttttatctttacttctttgttctctacatgctgtgtttaaacctttctgctctcttcacctgaacacatcgtgtttgacatcatctttgtgttgatgtttattacatagtaccacaaagcctgctccacacctggatggggtgcatgtagtctttggactggttatttctggttttgaagtaatcgaacaaattgaaaatctgaagaccgatgctgcaagcagaccatatgcagatgtgcgagttattgactgtggagtacttgccacaaaatcaataaaagatgtttttgagaaaaaaaggaagaaaccaactcattcagaaggctcggattcctcttccaattcctcctcttcttcagaatcatcttcagaaagtgaacttgaacatgagagaagcagaaggaggaaacataagaggaggccaaaagttaaacgttctaaaaagaggcgaaaggaagcaagcagttcagaagagccaaggaataaacatgcaatgaacccaaaaggtcactctgagaggagtgataccaatgaaaaaaggtcagttgattccagtgctaaaagggaaaaagctgtggtccgcccagaagagattcctccagtgcctgagaaccgatttttactgagaagagatatgcctgttgttactgcagaacctgaaccgaagattcctgatgttgcacccattgtaagtgatcagaaaccatctgtatcaaagtctggacggaagattaaaggaaggggcacaattcgctatcacacacctccaagatcaagatcctgttctga

SEQ ID NO: 185046 - DNA, 1610 bp, Homo Sapiens
ttggctgcagaacagaacactttctcatgtccagggtcagattacaagagcactcaagactttactgacgaaaactcaggaaatcctctatcacaaagaggtttggcaactaaactaagacattaaaaggaaaataccagatgccactctgcaggttgcaataactactacttactggatacattcaaaccctccagaatcaacagttatcaggtaaccaacaagaaatgcaagccgtcgacaacctcacctctgcgcctggtaacaccagtctgtgcaccagagactacaaaatcacccaggtcctcttcccactgctctacactgtcctgttttttgttggacttatcacaaatggcctggcgatgaggattttctttcaaatccggagtaaatcaaactttattatttttcttaagaacacagtcatttctgatcttctcatgattctgacttttccattcaaaattcttagtgatgccaaactgggaacaggaccactgagaacttttgtgtgtcaagttacctccgtcatattttatttcacaatgtatatcagtatttcattcctgggactgataactatcgatcgctaccagaagaccaccaggccatttaaaacatccaaccccaaaaatctcttgggggctaagattctctctgttgtcatctgggcattcatgttcttactctctttgcctaacatgattctgaccaacaggcagccgagagacaagaatgtgaagaaatgctctttccttaaatcagagttcggtctagtctggcatgaaatagtaaattacatctgtcaagtcattttctggattaatttcttaattgttattgtatgttatacactcattacaaaagaactgtaccggtcatacgtaagaacgaggggtgtaggtaaagtccccaggaaaaaggtgaacgtcaaagttttcattatcattgctgtattctttatttgttttgttcctttccattttgcccgaattccttacaccctgagccaaacccgggatgtctttgactgcactgctgaaaatactctgttctatgtgaaagagagcactctgtggttaacttccttaaatgcatgcctggatccgttcatctattttttcctttgcaagtccttcagaaattccttgataagtatgctgaagtgccccaattctgcaacatctctgtcccaggacaataggaaaaaagaacaggatggtggtgacccaaatgaagagactccaatgtaaacaaattaactaaggaaatatttcaatctctttgtgttcagaactcgttaaagcaaagcgctaagtaaaaatattaactgacgaagaagcaactaagttaataataatgactctaaagaaacagaagattacaaaagcaattttcatttacctttccagtatgaaaagctatcttaaatatagaaaactaatctaaactgtagctgtattagcagcaaaacaaacgacatccaattgtcatgctgcatgcaaactacacagattcatgttttgcagagttttgcccaaaatgagtaatcatatatatttactgtaatttttaaaatacattatcgttcacaattttattttttc

SEQ ID NO: 185047 - DNA, 1084 bp, Homo Sapiens
  misc_feature (142)..(154): n is a, c, g, or t
ttggctcttgaagactatttctgactttctcagcacaaattaagataataggagatggaggctccatttgaaaaacattttggttgtataatggttagcataaaacatacttttttcaagttaactcaggtactagagtatnnnnnnnnnnnnnaaatgtactgcagcattaatgaaaactagagctgggagaatgtgtttttccttgagtaaattgcaaatgcctgtgcaccgcatttgaccaggagggaagaatgagaggccctggtagcaaagccagtggaagaagttttactaggagcagttgtatcattcgtgtactttttttgtgtcatacaagtgagagtaaaatggtccatgtctgtgttttgaggaattttttgcctttcttttcagaaactaattctgaagcaagcccttatagttgtgctgcagtggtgtttcaatcacaattttagtgttcgactgtatgctttagttgctcttaagaaactctggactgtgtgtaaagtgttaagtgttgaagaatttgatgccctgactcctgtgattgaatccagcctccatcaagtggaaagcatgcacggagcagggaatgccaagaagaattggcaacgcattcaggagcatttcttttttgcaacatttcacccactcaaggattattgtctagagaccatattttacatccttccacgcctttcaggccttattgaagatgaatggatcaccattgataaatttaccagattcactgatgttcctttagctgcgggatttcagtggtacctttctcaaactcaacttagtaaactaaaaccaggtgactggtctcagcaagacataggtactaatttggttgaagcagataaccaagcagagtgggaccgacgttcagaagaagattatcccgtggaacagtcgtgtttccgacttagacctggagctcctgtttcaggatcgtgctgccagacttggaaagtcaattaggtagactcatcgttgtggcctcgctcatcgacaaaccgaccaaatttaaggaggactgtgcaggaacctggtgagggtatttggggcttcagtg

SEQ ID NO: 185048 - DNA, 1475 bp, Homo Sapiens
  misc_feature (1194)..(1224): n is a, c, g, or t
ctttgtacaaaaaagttggcgctcttttccctgtcctaggtgtaagccctgatcccgcccagtgcatccccgaggccccaagcaactctcctccaactgtctttagggataaccctgagcgggcagccgctctactctatacctaactttatccgtaccagatacctagcctcactcagggccccccttacctggcggtgccgggatcaacaaatgaaattgtgacgggaagtcctggcccttggcccaacctcctgctgtccccggtctgagggcccaagccccgcgtctccgccttgccgtccagcctgtccttggtgtggggtgcttggaagtgtgagcaccctctctggctctttgccggccccaagggtcgttgcggcggcccccgggcccagtcatcagccctcttttccggtgccggaactatcgtactggtgccctagtttcccagccggcaggcggagtgaggaggaagcggaggcgagaccgcgctcaacactggggaaaggaaggaggcgggccctgcgcgcagcattttgggaaagagtggaattctgggtgttaggcccgccattcgcttgactcacgccttcgccgtagcatctttcgcagcggaccgaagagaagaaaagtaggccagagccgaactctcttcctgccaagatgtctattggtgtgccgattaaagtactgcatgaggccgagggccacattgtgacatgtgagacgaacaccggtgaggtatatcgggggaagctcattgaagcagaggacaacatgaactgccagatgtccaacatcacagtcacatacagagatggccgagtggcacagctggagcaggtatacatccgtggcagcaaaatccgctttctgattttgcctgacatgctgaagaacgcacccatgttaaagagcatgaaaaataaaaaccaaggctcaggggctggccgaggaaaagctgccattctcaaggcccaagtggccgcaagaggaagaggacgtggaatgggacgtggaaacatctttcaaaagcgaagataattttctaagttgaacagaactttgtccttttttctttcaggttatctgagttcattggagtgggtgcttgtgcatatatgctaggtatcttttgccatctttctctttagatcaggggaaatgtttaagctaaataaatctgggggnnnnnnnnnnnnnnnnnnnnnnnnnnnnnnngagaaaataaggactttgtgttcatttgaagtttgctttggctaaattttgacaccctgggggatgtcctgggagaatgccagtactttgaaatagcacagctattgatgagattttaagctgctgttcctggccagttgcaattaagccccagaaaagttcaccttggagaagctccgagaacacacagattgtgtctcattcatcttcagacacaggcacatagtgtggcactttgttcagttaacatt

SEQ ID NO: 185049 - DNA, 1447 bp, Homo Sapiens
caaaaaagttgggttaatgggtagatgttttaaaaagctcactctgactgcgacagaaaaatagatcagaggggtgggacaagtagttgaaaaggcccaggtgagaggagaaagtgccacgggtgagggtggggcaatggagaagcagaaatatcagtggtagtgagaaagttttaaaagccatgatctgatagagacaatgcttaataacacagaaattgtcagtttatgtttggtgtttttaaaatatttaaatattttgtaaaatactagggactcaacaatggtgggtagaagtgtgaaaagtaaacaagttaattacaaacatctagttaggctttatattaattcatattaatttatggtaacctttcattttagcccaaacgttggatagtgccttatagtttctaatgcttagttttttatctcttagagcaaattaggaatttttttccacaaaactaaatgttttcttctctttctgatactagctcctgaaattcttagttatgatcctataagcatggcaacagatatgtggtaagagttattaatgaaaaattgatcaaattagtttcaagaaatgagtatggtactaaatttttcttgcattttctttctaatttaggagcattggagtgttaacatatgtcatgcttacaggaatatcacctttcttaggcaatgataaacaagaaacattcttaaacatctcacagatgaatttaagttattctgaggaagaatttgatgttttgtctgagtcggctgttgatttcatcaggacacttttagttaagaaacctgaagatcgagccactgctgaagaatgtctaaagcacccctggttgacacagagcagtattcaagagccttctttcaggatggaaaaggcactagaagaagcaaatgccctccaagaaggtcattctgtgcctgaaattaattcggataccgacaaatcagaaaccgaggaatccattgtaaccgaagagttaattgtagttacttcatatactctaggacaatgcagacagtctgaaaaagagaaaatggagcaaaaggccatttccaaacgatttaaatttgaggaacctttgctacaagaaattccaggagaatttatctactgagcaatatttccctttagaacttcaagatttctacactgaaaatgttaatattatttatggacctctggccaaatggtacatgtactggaagtggataaccagtatcacttacacaaacaaaaataactttgtcaaatttgtggagttaggtggaagccagattttaaaagttgccaaccaggatatttaacaggtacagttacccgtttcaatgttatttttaagaagggagatgttggcacctttgaattctacatcctgtttctccagaatgagaatttgtgtacaaagatatttgtattcactttctt

SEQ ID NO: 185050 - DNA, 2304 bp, Homo Sapiens
  misc_feature (2024)..(2053): n is a, c, g, or t
gcttttccaattctaaggaattactctgcccaaaataaggtttaaaataaaaatacataaaatggcttagtttatcctaatctgatataaatttgtgattgattgacagcaagaatataatgggaacgtacataaatgaagcaaagcagtcatcacattcttatgaactagaaataacatcataaaaacatgttcattttcataaaattttacatttttgtacatacactcctcctaagtttgtacttttgatatgttcagaatgtggctatactatttacttatggggcagtaaatctttagagccagtataattacatcaattagccaaaagagggcgcagaaacaacaccagtagatatgcttagcaaactgccagttggtttttctctagtagtctaataagaattaacaaaacccacaggagagttaggtacgctaactggggaatactgaaagttacagtgttaagtatatatagatatactgtaatatacattcttatgtatatatactgatagatagcatttctgcattcaaataaaataagtgtatgcttttctagtatattagtttgtagtccaataatttaggtgaactgagtacagagggatcaggaccaggaaaggtaaagaggaagagggaaaagaatatgccctagatgaggtaaatctaggaaaaataagagcacaaatcatcagagtgggaaagagaccctgcccagtacccactgctactacatgaagtataaattagccacaaagttctttaggtgatcttcacttggctctgctgttttctcaaggtctttatttgaaaggaatgtatacaatataaggcattcaactgatatctacctaccttatctatatattacttccttatgaacagttctgtcaccaggccaaatgccaaattagcttgcacaaaatccaaacccttgtgcctgacatgaacattctaattttgtgtttcactaagctttataaatatatttcttctatttaatttactacgtctcttttcagtaccaataaatatgttcgtctgctgtatttctgttcgtatttctgagtttgtaagtaataaagtattctaattagaacatgaaaaacatgatattaacatctctgagaagaacttactctattatttcagaatatgctacaagatatttacaatttctgaaagaactaaccacagtatagccaactggctgacaatggtaaccttctgtttaattatttcccaggtattgttccttactttcaaaactagctaaaaggaaaatgttagcatggtttatgaacagtagactttttcaatcttctcttcaagggaaagactgtgagtacataaattttttaaaaagatatatgggttttgcagtattctaatggaaaaaaactaaaagctgagtttttttcaaagcatactaaatgtcttttcatacaaatgttctatgccttgcaaaagaacatcactattagtaatttacatttgtacaaggctaatgataaacacagatcattatattttcttattttaggttcacttcctaacactagctactagtaaaaggtctctcaatgcaaattacagccagccaattaaaatttaattttaatttagggattataggtacacaaagttagtgactttttttagtagtagcttcctataaataaaatttctatatgagttggccaatatatataaaccttcaatgtgaaattttacatctactagtacataaataaaagtaaaaagtatactcttttcaaaagcacaatattcctctttatactgtacattatatactatctagttatactagcattttaaaaacatatgcattctaatataactgcactagaaaaggtaattgtgaagttattgcaaattctctcccctttttgctcattaaaatcttaggataaaataggaatacatgcccactggtcaggagttctcctgggagcaaatattttaatcacaatcaataattacaacagtaatagtgnnnnnnnnnnnnnnnnnnnnnnnnnnnnnnttaacatttcctttatagtaaggtaggtagttggtgttttacttcagtggtactttcatgttggttttggtgaagaaaaaagaagaaaacgtaagcaagccactcctaagaaaccaatgcccgttttgtgttgctgttgttcactcctatgctgctgcatttttaaaaacgttgcagcacatttaaaaggaaaggttattttaaattggatttgaaaaagaaaatttacctatactataagaaggtgccaa

SEQ ID NO: 185051 - DNA, 1273 bp, Homo Sapiens
ccaactttgtacaaaaaagttgggtgagagtccgtaaggagcagcttccaggatcctgagatccggagcagccggggtcggagcggctcctcaagagttactgatctatgaaatggcagagaatggaaaaaattgtgaccagagacgtgtagcaatgaacaaggaacatcataatggaaatttcacagacccctcttcagtgaatgaaaagaagaggagggagcgggaagaaaggcagaatattgtcctgtggagacagccgctcattaccttgcagtatttttctctggaaatccttgtaatcttgaaggaatggacctcaaaattatggcatcgtcaaagcattgtggtgtcttttttactgctgcttgctgtgcttatagctacgtattatgttgaaggagtgcatcaacagtatgtgcaacgtatagagaaacagtttcttttgtatgcctactggataggcttaggaattttgtcttctgttgggcttggaacagggctgcacacctttctgctttatctgggtccacatatagcctcagttacattagctgcttatgaatgcaattcagttaattttcccgaaccaccctatcctgatcagattatttgtccagatgaagagggcactgaaggaaccatttctttgtggagtatcatctcaaaagttaggattgaagcctgcatgtggggtatcggtacagcaatcggagagctgcctccatatttcatggccagagcagctcgcctctcaggtgctgaaccagatgatgaagagtatcaggaatttgaagagatgctggaacatgcagagtctgcacaagactttgcctcccgggccaaactggcagttcaaaaactagtacagaaagttggattttttggaattttggcctgtgcttcaattccaaatcctttatttgatctggctggaataacgtgtggacactttctggtacctttttggaccttctttggtgcaccctaattggaaaagcaataataaaaatgcatatccagaaaatttttgttataataacattcagcaagcacatagtggagcaaatggtggctttcattggtgctgtccccggcataagtccatctctgcagaagccatttcatgagtacctggaggctcaacggcagaagcttcaccacaaaagcgaaatgggcacaccacagggagaaaactggttgtcctgcatgtttgaaaagttggtcgttgtcatggtgtgttacttcatcctatctatcattaactccatgg

SEQ ID NO: 185052 - DNA, 1713 bp, Homo Sapiens
  misc_feature (1250)..(1258): n is a, c, g, or t
  misc_feature (1535)..(1567): n is a, c, g, or t
ctttgtacaaaaaagttgggtggctttcattggtgctgtccccggcataggtccatctctgcagaagccatttcaggagtacctggaggctcaacggcagaagcttcaccacaaaagcgaaatgggcacaccacagggagaaaactggttgtcctggatgtttgaaaagttggtcgttgtcatggtgtgttacttcatcctatctatcattaactccatggcacaaagttatgccaaacgaatccagcagcggttgaactcagaggagaaaactaaataagtagagaaagttttaaactgcagaaattggagtggatgggttctgccttaaattgggaggactccaagccgggaaggaaaattcccttttccaacctgtatcaatttttacaacttttttcctgaaagcagtttagtccatactttgcactgacatactttttccttctgtgctaaggtaaggtatccaccctcgatgcaatccaccttgtgttttcttagggtggaatgtgatgttcagcagcaaacttgcaacagactggccttctgtttgttactttcaaaaggcccacatgatacaattagagaattcccaccgcacaaaaaaagttcctaagtatgttaaatatgtcaagctttttaggcttgtcacaaatgattgctttgttttcctaagtcatcaaaatgtatataaattatctagattggataacagtcttgcatgtttatcatgttacaatttaatattccatcctgcccaacccttcctctcccatcctcaaaaaagggccattttatgatgcattgcacaccctctggggaaattgatctttaaattttgagacagtataaggaaaatctggttggtgtcttacaagtgagctgacaccattttttattctgtgtatttagaatgaagtcttgaaaaaaactttataaagacatctttaatcattccaaaattgtgtccgttttcttgagcgttttgattttttacttttagcttataccagctgaatggcagccttgcctaatccacctacaacaagaatttcttaagctttcttttatttgcatgagagagccactaccaaggcatgttttgttatgctgaaactgggctgctgcatactgctaaatggcacctctgggattggcctacctggggatttcttggtttgtgaaaacaggagaggagaaatatctcatacaagtgaaaggatactggagagagaaattacccatttctnnnnnnnnnccacactctgtcgtatctgtgttaatgttttctagcatgtactctggtttcaacagacacaaatttatatgttaacccagttttcttgccgttctgtaagtgttttattcttagtgtgatttttttccattgggatgtttttgattgaacttgttcattttgttttgcttgggaggaaaataaacaattttacttttttcctttaggagcattatgagcattatgtcagaatagaatagaattggggttcgatcttaacaggccagaaatgcctggnnnnnnnnnnnnnnnnnnnnnnnnnnnnnnnnnatcaaatcctgcctgactgtctgcttgttttgcctaccatcgtgacatctccatggctgtaccacccttgtcggggacagcactggaagcagggtacagtagcccaaagaaaaagacacatttgggaagaaagcaggaaaaacgtt

SEQ ID NO: 185053 - DNA, 1283 bp, Homo Sapiens
ctttgtacaaaaaagttgggtctcccaaagttctgggttcacagacgtgagccaccatgcccacgtagaatgaagtttcttaaatacactagttaattattgaaacatatgcagtattgagtgctgggattacagatgtgagccaccgcgcccggccagagcactgttttttttaatggccttgcactcttcttatggacctttgctgccctcagttgaccaaacatgacatcagaaacagatacatttgtgtgttttaaaaacagctcctaatactggaacaaaaatatttaactgtcttgacaatactcatgagtatctgcatggcgacttcagagttgagtttaatcaaagagtttattcttaggtcctagtagaagagctaacctcacactcatcccattctaaactatgtgattcaacactgattttacatccaacaaagtgaaatcttgatagttgggtgtaaaaaggagagtaatggagatttcagagtagttggggttgcttacttttcatttttaattctttaggttttgtaagttacacacttcaagcattatagatgatcctctttttactactgaactaatgaagcctttttcattgcattgttctgcatttatttctacagggagaaaactggttgtcctggatgtttgaaaagttggtcgttgtcatggtgtgttacttcatcctatctatcattaactccatggcacaaagttatgccaaacgaatccagcagcggttgaactcagaggagaaaactaaataagtagagaaagttttaaactgcagaaattggagtggatgggttctgccttaaattgggaggactccaagccgggaaggaaaattcccttttccaacctgtatcaatttttacaacttttttcctgaaagcagtttagtccatactttgcactgacatactttttccttctgtgctaaggtaaggtatccaccctcgatgcaatccaccttgtgttttcttagggtggaatgtgatgttcagcagcaaacttgcaacagactggccttctgtttgttactttcaaaaggcccacatgatacaattagagaattcccaccgcacaaaaaaagttcctaagtatgttaaatatgtcaagctttttagcttgtcacaaatgattgctttgttttcctaagtcatcaaaatgtatataaattatctagattggataacagtcttgcatgtttatcatgttacaatttaatattccatcctgcccaacccttcctctcccatcctcaaaaaa

SEQ ID NO: 185054 - DNA, 1215 bp, Homo Sapiens
  misc_feature (944)..(1003): n is a, c, g, or t
aatatacattaatttacacaaaatggcttgtacaaaaagctgtaggttagggggagaagacacctctgtgagagggttgagatgagcagaaagggcagaaaaggggaaagatacccccatttctcctagtcccttaacaaagcctttccagccaccccaaggcataaaggggggctttggcaggcaggggaggagcagagctgtgccaaaggaccttcatggagccaggctagtgagcagggtagtgaattgcagggcctgccctgccagttctgttacacactgcaccatctcttggatggcagggctggatgggtagcccagggcagctcccttgacagccagcacagtggcccgcaatgcctggcccagtgctgtacctgcagccctgacctgtgctctcagaggggcagaggctgccagccggcccagggtgtccccaacaaacaccaggcgatgagcagccaccaccaccctcttgctgtggggcacgaaaaggcgcgggggctgattagcctgggtactggacatcagggctgccacggctgcctgcagggctgagtagtggctctggcattgcccagcatagaagtacaggagttgtagatctccggtggacacaaccagtggctcccctggggacagggcctcctgcggcgccggcatccccctctcgggcagttcaggatcccctgtgcaggcctgatccgggggcctagatccctgagctttgtccatgcccttcaggtggacatagtcatactcctcggccatcggaatgccctcgtactcattgtggtgtcctgctgggtcatcctccatctccctgccctctggatccccctcgaccttggggcctccataaccaggcaggcggggtgggggtgggggcagaggccggtcctggatgctgcccttccggcctggggcaggagagggcactnnnnnnnnnnnnnnnnnnnnnnnnnnnnnnnnnnnnnnnnnnnnnnnnnnnnnnnnnnnntcagctgaggggagccggggcctgtgtgggggtggggggcttctggccagaagctgggccagggtgtcctggtcatgggaggccaaggctccagggggctctggagaagggggagcctctggccccagcagaggcacatcgtagatcccctcatcagtgcccccgccctccccgtctgccagcagttcctcgggtggttcatacaaatccaa

SEQ ID NO: 185055 - DNA, 1000 bp, Homo Sapiens
ttggtttcccaccctctgacccgggttgccccgcagccccctggagaggatgatgctccctatgatgtgcctctgaccccaaagccacctgcagagctggaaccagatctggagtgggaaggaggccgggagccggggccccccatctatgctgccccctccaacctgaaacgagcgtcagccttactcaatttgtatgaagcaccctgcctgccaaagcccccctttaggccttgggtggctggaaggctttgttaagggactaggagaaatgggggtatctttcccctttcctgccctttctgctcatctcaacctctcacagaggtgtcttctccccctaacctacagctttttgtacaagccattttgtgtaaattatttatatttaatattattccctgctttgtcaggagcaggtactaggctctggggcagtgaggaactagatccttctctcctcagcctagggtggaggtcactgcactaccacccacctctggaagactggctgtgaaaagtcaggtggcagaaacctggggccacatagagcctctctcttttcctgtttcttggctctagaagatcagcactgcactgttagctgagagtgcgggcaagacataaactgtccagagtttgaaggttctcggaaagaccggagggcttctccccacagaaggcggagagagctggggctcagacatgggtgtgcaccttaataaaccctgctgtctgcctccctgactctgcttcttgggagcatggtgagcagccctggtgctcagcagccatacctatgggacacacactacgaaaaggatgcctttagggtttgggggagattttactcctttcttcaacaactattcactggacaagttctctgctcccatgatgcgccaggcacagttctgcaagtatattgtgaatgtattgttctagtgggatacacaaataagtcagttaaaatacataaataaaaacataaacctgccat

SEQ ID NO: 185056 - DNA, 2111 bp, Homo Sapiens
  misc_feature (338)..(352): n is a, c, g, or t
  misc_feature (360)..(388): n is a, c, g, or t
  misc_feature (390)..(404): n is a, c, g, or t
ttggggaagacatatgtgcttttaagtttcaattttcattgcaattttgtttgtggtaaaatgcacataacattacatttaccattgtaagcatacagttcagtggcattaagtacagtcaccatctacctccagaactttttcatcttcctgcactgattctccatcccccatctccacacccccggaaaaccaccatcccactttctagctcttgttttgactactctggtgacttcatatagtggaatcatacattaattgtcctttcatatcgggcatatttcacttagtgtagcgtcttcaaggttcacacacctgtgtcagaatttcattcnnnnnnnnnnnnnnngaaactannnnnnnnnnnnnnnnnnnnnnnnnnnnntnnnnnnnnnnnnnnngtcttaatggttggtgttggcatgtttctatgtcttcccgtcttgttttaaggtaaagtgaatgccgaagacagaagatttggatgatacaccactgactttctttgtttggaatacacgttatgaaccctttctggagcatgtctacaagctctgtacgcaaacgatctgaaggtgaagagaagacattaacaggggacgtgaaaaccagtcctccacgaactgcaccaaagaaacagctgccttctattcccaaaaatgctttgcccataactaagcctacatctcctgccccagcagcacagtcaacaaatggcacgcatgcgtcctatggacccttctacctggaatactctcttcttgcagaatttaccttggttgtgaagcagaagctaccaggcgtctatgtgcagccatcttatcgctctgcattaatgtggtttggagtaatattcatacggcatggactttaccaagatggcgtatttaagtttacagtttacatccctgataactatccagatggtgactgtccacgcttggtgttcgatattcctgtctttcacccgctagttgatcccacctcaggtgagctggatgtgaagagagcatttgcaaaatggaggcggaaccataatcatatttggcaggtattaatgtatgcaaggagagttttctacaagattgatacagcaagccccctgaacccagaggctgcagtactgtatgaaaaagatattcagctttttaaaagtaaagttgttgacagtgttaaggtgtgcactgctcgtttgtttgaccaacctaaaatagaagacccctatgcaattagcttttctccatggaatccttctgtacatgatgaagccagagaaaagatgctgactcagaaaaagcctgaagaacagcacaataaaagtgttcatgttgctggcctgtcatgggtaaagcctggctcagtacagcctttcagtaaagaagagaaaacagtggcgacttaagagatggtgaatctggtgcaccatgcactttcctgctagactctggcctagttcaagctgaccaatggcagaggactgcctgaagagtaaaactgtgtgaacaatgactgactgccagtgttttccatgtatgcataggttctaacagcaaggtttggaaacctgtctctaagtaatgcattacttctgtcagaagtgtcttagggtttatctagttcagtactccaaattattggggaccttgaggcttaagtaagtatttttctgaatataatgctaaaggtaagttgcattcatttaaactaatagagcagacagaattcagcactacttaatagtttataaatcagtggtttcagttgtatatatgttaggaaatggagaggtatagagagagcaggttccatagctcagcacttttaagtggaagatcatttgaatctcagtcttcagcctgcactgatttgtagcctgcactgtcttactgatttacaaactgaaatcactgagaaatgtctttagttcagtgagaagaaaccagaacacttgttcctagtgttgtgttgttttttttaagcaaattacttactgtatttttatggcaggagggagaaaaagtgttacaacggtttctaatgaagtccggtatttaaatgataaatgactaatgtgtttagtagagacaaaataaaccaataaatgataa

SEQ ID NO: 185057 - DNA, 1130 bp, Homo Sapiens
ttggcagaatcctcacactgtggaccgagtccccatggggaaattgcctcacatgtggggtcagtctctatacattttaggaagcttgatggcagagggatttttagcccctggagaaattgatcccctgaatcgcaggttttctactgtaccgaagcccgatgttgtggttcaagtctccattctagctgaaacagaagaaatcaagaccattttgaaggacaagggaatttacgtggagaccattgctgaggtataccccatcagagtacaaccagttcgtattctcagccacatttattccagcctaggatgcaacaatagaatgaaactcagtggacgaccctacagacacatgggagtgcttggaacttcaaaactctatgacattcggaaaactatctttactttcactccacagtttatagaccagcaacagttctacctggctctggacaacaagatgatagtggaaatgcttagaacagacctctcctacctctgtagccgctggcggatgacaggccagcccaccatcaccttccccatctcacacagcatgcttgatgaagatggaacaagcttgaattcaagtatcctggcagcactccgaaaaatgcaagatgggtattttggtggggcaagggttcaaacaggtaaattgtcagagtttttgacaacatcttgttgcacacacttgagcttcatggaccctggacctgagggtaagctgtacagtgaagattatgatgacaactatgattacctggaatctggcaactggatgaatgattatgattcaaccagtcatgctcgctgtggtgatgaagttgctcgttatttagatcaccttttggcgcacactgctccccatcctaaactagcccctacctcacagaagggagggctagatcggttccaagctgctgtgcaaacaacctgcgacttaatgtccttggtgaccaaaggccaaggaactgcatgtacagaatgttcacatgtatcttcctacgaagttatttcaggcttcccggccttcattcaacttacttgattcacctcatccccgacaggagaaccaggttcctctgttcgtgtagaaatacatctttctagagaccagtctgggg

SEQ ID NO: 185058 - DNA, 1187 bp, Homo Sapiens
aattgatgagcaatgctttctttaaaatggccaactttgtacaaaaaagttgggtttaggctttgcacaaatacaattgctttcaggaatcctaaagcagcattttattgagtttgaattattaaaggtacagaggaaatgtggtgatgtagaacttttcctaacacaggtatctaggaagtaagtgctgagttgattttctaggttcttacgtatttgaaaaataaaattgcaattcgagataagtgcttgagcactctacttaagtattctctgtgttttatgaagagaaaatgatctgattttcccttatacttcattttacaatacatattcccttttaacttaaaaaaattgtaaatgtgggagaaaaaaccctgcaggatggaaacaattattaagaacgtagatcaataagtactttttagtgatgtggcagaaatccctgttgattctaagttttagagtgtcttttcccctatttctgacctacaactataaactactctctattaggagaactagaccactttcttcattcttttctaaactgctgcagattgccgtgaactctatcaatagtctcttttccgcaggcaaagtggcattttctaaacatgtttgcttactgccaggtggtttgaaatctatgatttactgcagtagtatgtgcttaaaacaactgttgaggtcttttaagcaggaaagttcaaaaggaagtgtcctgataatggtactggtttttctacaaatataagtagtcatttagaagtttgcaaccaccaccaagtctgagagaactctgggatattctgtgggttttggcatattagatagagaaaatgacagatctagatgaagggagcttttggatgtgtgcctttaaaaactgattatgtataaatactgatatttcacatacggagaaatttgaagacccaagtctgcctttcacagagccctccattccaagtttagtttttgtcaaaatatgaatcattttatttgactgtactatcagtacacaaatgcatgagtatgtttatacagtgttagactgatgtgaatttgcatttgttacattacattgccagcgcatatcatttagcaagttggcattaacatttatgctttaattaaatgccagtatacctatgtgtgcagcagtaaaaaattagtgaaaaaaa

SEQ ID NO: 185059 - DNA, 1247 bp, Homo Sapiens
gatagtatagctatatttctgtttgggaaggtttaccaggcaaggtaaactgtccctgagcaatacaaatttgttgtccagagaatattttggcttttaaaatattggcaaagttacactcagatacgagttttgtttggtttttttaagagttagctcaatatcagggacattgtaaattaattttataacaataatctggtagtatttctcattggaattatctactttagtaatatacatgtgccaagaacactaataagacaaaatatttcctaagagtgacaaaaagttgctttttctcactaattttttactgctgcacacataggtatactggcatttaattaaagcataaatgttaatgccaacttgctaaatgatatgcgctggcaatgtaatgtaacaaatgcaaattcacatcagtctaacactgtataaacatactcatgcatttgtgtactgatagtacagtcaaataaaatgattcatattttgacaaaaactaaacttggaatggagggctctgtgaaaggcagacttgggtcttcaaatatctccgtatgtgaaatatcagtatttatacataatcagtttttaaaggcacacatccaaaagctcccttcatctagatctgtcattttctctatctaatatgccaaaacccacagaatatcccagagttctctcagacttggtggtggttgcaaacttctaaatgactacttatatttgtagaaaaaccagtaccattatcaggacacttccttttgaactttcctgcttaaaagacctcaacagttgttttaagcacatactactgcagtaaatcatagatttcaaaccacctggcagtaagcaaacatgtttagaaaatgccactttgcctgcggaaaagagactattgatagagttcacggcaatctgcagcagtttagaaaagaatgaagaaagtggtctagttctcctaatagagagtagtttatagttgtaggtcagaaataggggaaaagacactctaaaacttagaatcaacagggatttctgccacatcactaaaaagtacttattgatctacattcttaataattgtttccatcctgcagggttttttctcccacatttacaattttttttaagttaaaagggaatatgtattgtaaaatgaagtataagggaaaatcagatcattttctcttcataaaacacagagaatacttaagtagagccaacttttttgtacaaag

SEQ ID NO: 185060 - DNA, 416 bp, Homo Sapiens
  misc_feature (102)..(189): n is a, c, g, or t
gctccccatggaagccagctgtgccccaggaggagcaggaggaggtggagtcggctgaatgcccacggtgcgcccggggcccctgagcccatcccgctcctnnnnnnnnnnnnnnnnnnnnnnnnnnnnnnnnnnnnnnnnnnnnnnnnnnnnnnnnnnnnnnnnnnnnnnnnnnnnnnnnnnnnnnnnggacctgccccccgcccgtttgccagcgctcaggcaggagctctggactgggcgcgccgccgccctggagtgagggaagcccagtggaagggggtcccgggagccggctgcgatggacgccgtcttggaacccttcccggccgacaggctgttccccggatccagcttcctggacttgggggatctgaacgagtcggacttcctcaacggtgcgcactttcctgagc

SEQ ID NO: 185061 - DNA, 2169 bp, Homo Sapiens
  misc_feature (2015)..(2023): n is a, c, g, or t
aattgatgagcaatgctttctttataatagcccactttgtacaaaaaagttggcaaaggccggtttgttggacgcccgggcgactacgtgtacattttccgttccttccgaatggaagagtgtgcgccagggggctgcctgatggagctatgcatccagctcagcatcatcatgctggggaaacagctgatccagaacaacctgttcgagatcggcatcccgaagatgaagaagctcatccgctacctgaagctgaagcagcagagcccccctgaccacgaggagtgtgtgaagaggaaacagcggtacgaggtggattacaacctggagcccttcgcgggcctcaccccagagtacatggaaatgatcatccagtttggcttcgtcaccctgtttgtcgcctccttccccctggccccactgtttgcgctgctgaacaacatcatcgagatccgcctggacgccaaaaagtttgtcactgagctccgaaggccggtagctgtcagagccaaagacatcggaatctggtacaatatcctcagaggcattgggaagcttgctgtcatcatcaatgccttcgtgatctccttcacgtctgacttcatcccgcgcctggtgtacctctacatgtacagtaagaacgggaccatgcacggcttcgtcaaccacaccctctcctccttcaacgtcagtgacttccagaacggcacggcccccaatgaccccctggacctgggctacgaggtgcagatctgcaggtataaagactaccgagagccgccgtggtcggaaaacaagtacgacatctccaaggacttctgggccgtcctggcagcccggctggcgtttgtcatcgtcttccagaacctggtcatgttcatgagcgactttgtggactgggtcatcccggacatccccaaggacatcagccagcagatccacaaggagaaggtgctcatggtggagctgttcatgcgggaggagcaagacaagcagcagctgctggaaacctggatggagaaggagcggcagaaggacgagccgccgtgcaaccaccacaacaccaaagcctgcccagacagcctcggcagcccagcccccagccatgcctaccacgggggcgtcctgtagctatgccagcggggctgggcaggccagccgggcatcctgaccgatgggcaccctctcccagggcaggcggcttcccgctcccaccagggcccggtgggtcctgggttttctgcaaacatggaggaccactttctgataggacattttcctttcttctttctgttttctttcccttgtttttgcacaaagccattatgcagggaatattttttaatctgtagtattcaagatgaatcaaaatgatggctggtaatacggcaataaggtagcaaaggcaggtgctttgcagaaagaatgcttggaaacttgagtctccctagaggtgaaaagtgagcagaggcccctagaaaccctcctctgaatcctcctaattccttaagatagatgcaaaatggtaagccgaggcatcgcgcaaaagctggtgcgatgcttcagggaaaatggaaaacccacgcaagaataatgattgattccggttccaaaaggtgtcacctacctgtttcagaaaagttagactttccatcgccttttccttccatcagttgagtggctgagagagaagtgcctcatccctgagccacacagggggcgtgggagcatcccagttatccctggaaagctagaaggggacagaggtgtccctgattaagcaggaaacagcacccttggcgtccccagcaggctccccactgtcagccacacacctgcccccatcacaccaagccgacctcagagttgttcatcttccttatgggacaaaaccggttgaccagaaaatgggcagagagagatgacctcggaagcatttccacagatggtgtcagggtttcaagaagtcttagggcttccaggggtcccctggaagctttagaatatttatgggnnnnnnnnncaaatatcaattatatggtagattggagggattttttttctgtagctcaagggtgggagggagtttattagtaacccaaatatcgttgagaggaatttaaaatactgttactaccaaagatttttattaataaaggcttatatttt

SEQ ID NO: 185062 - DNA, 1635 bp, Homo Sapiens
ttggcgacctggtcaggaagtattttggggagaagatcggcctgtacttcgcctggctgggcgtgtacacccagatgctcatccctgcctccatcgtgggaatcattgtcttcctgtacggatgcgccaccatggatgaaaacatccccagcatggagatgtgtgaccagagacacaatatcaccatgtgcccgctttgcgacaagacctgcagctactggaagatgagctcagcctgcgccacggcccgcgccagccacctcttcgacaaccccgccacggtcttcttctctgtcttcatggccctctgggctgccaccttcatggagcactggaagcggaaacagatgcgactcaactaccgctgggacctcacgggctttgaagaggaagaggaggctgtcaaggatcatcctagagctgaatacgaagccagagtcttggagaagtctctgaagaaagagtccagaaacaaagagactgacaaagtgaagctgacatggagagatcggttcccagcctacctcactaacttggtctccatcatcttcatgattgcagtgacgtttgccatcgtcctcggcgtcatcatctacagaatctccatggccgccgccttggccatgaactcctccccctccgtgcggtccaacatccgggtcacagtcacagccaccgcagtcatcatcaacctagtggtcatcatcctcctggacgaggtgtatggctgcatagcccgatggctcaccaagatcgaggtcccaaagacggagaaaagctttgaggagaggctgatcttcaaggctttcctgctgaagtttgtgaattcctacacccccatcttttacgtggcgttcttcaaaggccggtttgttggacgcccgggcgactacgtgtacattttccgttccttccgaatggaagagtgtgcgccagggggctgcctgatggagctatgcatccagctcagcatcatcatgctggggaaacagctgatccagaacaacctgttcgagatcggcatcccgaagatgaagaagctcatccgctacctgaagctgaagcagcagagcccccctgaccacgaggagtgtgtgaagaggaaacagcggtacgaggtggattacaacctggagcccttcgcgggcctcaccccagagtacatggaaatgatcatccagtttggcttcgtcaccctgtttgtcgcctccttccccctggccccactgtttgcgctgctgaacaacatcatcgagatccgcctggacgccaaaaagtttgtcactgagctccgaaggccggtagctgtcagagccaaagacatcggaatctggtacaatatcctcagaggcattgggaagcttgctgtcatcatcaatgccttcgtgatctccttcacgtctgacttcatcccgcgcctggtgtacctctacatgtacagtaagaacgggaccatgcacggcttcgtcaaccacaccctctcctccttcaacgtcagtgacttccagaacggcacggcccccaatgaccccctggacctgggctacgaggtgcagatctgcagtataaagactaccgagagccgccgtggtcggaaaacaagtacgacatctccaagacttctgggccgtcctg

SEQ ID NO: 185063 - DNA, 1049 bp, Homo Sapiens
ttgggtggaaggactcatggatatcatcgtggtttcccctcagcggcagacagggaccaatgcctgtggtgtgaacaatggtggctgcacccacctctgctttgccagagcctcggacttcgtatgtgcctgtcctgacgaacctgatagccggccctgctcccttgtgcctggcctggtaccaccagctcctagggctactggcatgagtgaaaagagcccagtgctacccaacacaccacctaccaccttgtattcttcaaccacccggacccgcacgtctctggaggaggtggaaggaagatgctctgaaagggatgccaggctgggcctctgtgcacgttccaatgacgctgttcctgctgctccaggggaaggacttcatatcagctacgccattggtggactcctcagtattctgctgattttggtggtgattgcagctttgatgctgtacagacacaaaaaatccaagttcactgatcctggaatggggaacctcacctacagcaacccctcctaccgaacatccacacaggaagtgaagattgaagcaatccccaaaccagccatgtacaaccagctgtgctataagaaagagggagggcctgaccataactacaccaaggagaagatcaagatcgtagagggaatctgcctcctgtctggggatgatgctgagtgggatgacctcaagcaactgcgaagctcacgggggggcctcctccgggatcatgtatgcatgaagacagacacggtgtccatccaggccagctctggctccctggatgacacagagacggagcagctgttacaggaagagcagtctgagtgtagcagcgtccatactgcagccactccagaaagacgaggctctctgccagacacgggctggaaacatgaacgcaagctctcctcagagagccaggtctaaatgcccacattctcttccctgcctgcctgttccttctctttatggacgtctagtccttgtgctcgcttacaccgcagcccgcttctgtgtgcttgtcctctcctcctcccacccc

SEQ ID NO: 185064 - DNA, 4668 bp, Homo Sapiens
  misc_feature (1722)..(1759): n is a, c, g, or t
  misc_feature (2515)..(2525): n is a, c, g, or t
ttgggtctatttaagtgattctgataacaattcattggagactggtgaaattctaaaagccagagctggaaataaccgaaaagtcttaaggaagtgtgctgctgtggctgccaataaaataaagctaatgagtgatgtagaagagaattctagctctgaaagtgtctgttctggtcggaagctgcctcaccgcaatgcttctgctgtagctagaaaaaagttattacataattctgaagatgaacagagcttaaagtcagaaattgaagaagaggagctaaaagatgaaaatcaactattaccagtgtccagttctcacactgcccagagcaatgttgatgaatctgaaaacagagactcagagtcagaaagtgatttgcgggtagcccggaaaaattggcatgctaatggttacaagtcccatactccagcaccttcaaagacaaaatttcttaaaatagagtcttctgaggaagactctaaaagtcatgattcagatcatgcatgtaacagaactgctggcccatcaacgtctgtgcagaaacttaaggcagagagcatctcagaggaagcagattctgaaccaggaagatctggtggtaggaaatacaatacatttcacaagaatgcgagtttctttaaaaaaaccaagattctgagtgactcagaagactctgaatctgaagagcaagatagagaagatgggaaatgtcataaaatggaaatgaacccaatttcaggaaatctgaactgtgaccctattgctatgtcccagtgttcctcagatcatggatgtgaaactgatttagattcagatgatgacaaaatagaaaaaccaaacaattttatgaaagattctgcatcacaagacaatggactaagcagaaaaatttccaggaaaagggtctgttccagtgactcagacagtagtttacaggtggttaagaaatcatcaaaagccagaacaggtctcctgaggattactcgaagatgtgcagctacggctgccaataagatcaagctcatgagtgatgtagaagatgtcagtttagaaaatgtgcacactagaagcaaaaatggaaggaaaaaacctctccatcttgcttgtactacagctaagaagaaattgagtgattgtgaaggaagtgtacattgtgaagtaccaagtgaacagtatgcctgtgaaggcaagccacctgatcctgactccgaaggtagtacaaaagtgcttagtcaggctctaaatggagactcagactctgaagatatgttgaattcagaacacaagcacaggcataccaatattcacaaaatagatgcaccttctaaaagaaaaagttcctctgttacatcttcaggagaagattcaaaaagtcatattccagggagtgagactgataggacattttcttcagagtcaaccttggcacaaaaagctactgcagagaataattttgaagtggaactgaattatgggctgcgcaggtggaatggcagaagactcaggacctatggaaaggctccttttagtaagacaaaagtgattcatgattcacaggaaacagcagagaaggaagtaaaaaggaagagatcgcatcctgaattggaaaatgtgaaaatctctgaaacaactgggaattcaaagtttagacctgatactagttccaaatcatcagatttgggatctgtaactgaatcagatattgactgtactgataatannnnnnnnnnnnnnnnnnnnnnnnnnnnnnnnnnnnnngtagttagaaaaggtaaaacttttacagctaacatatctaaaactgtgagacgtcaaagacaaagcaaacgccctaggttaagtgtggatgataatgactgggaggatttggactatgcaaaatctaaaagagttcttcgacgttcaaaaataaaaacgagaaatcagggtagaaggactgtgagataccatgatggggatgatgacagaagtttagaaaatgtgttagatttcaatggttgcaccttatgaccttgagggaaagccagttcatttaagaggaaatggactggcatttatggtgaaagctggctgttaaaattatttttttgtcttacaattcagggaatatatttatatttttctatgaaaagttatgaatgtgactaaatcatgactgttatttttatttgcacttgctggtctttgtagcagcattcagcacaggtgccaaaatatgcttcattttgggggcagatctattttgacagtatttgactacatatagcaagagtttgaaatatgttaaacactagacatcctggttatcaaaaccaatgagcattactttcatggcagcaagtgtcatgcagttattttctgaatttgtcaaagaggcagtagtttctaacccctgttctatagtagttacaacaatttcacaacctatgtttacagattcttcataaatacatgcatactgacactataatcatgggaggtgtaaccatgattagtagcgaggtacctaccacnnnnnnnnnnncttcccctggctacttgagtagaatgcattataccagatctggtcactttcattgaaatggtttctaattttcttcccaagtgctgttggtttttttcttcttaaggaaaacgttgtcacttttatgttataaacttgaatttataaagtgctggtaaattatttttaatgatttgagtgcatgttttaaacctctaggaccagagcatagtcagagcattttcttttaaattgtgcactaacaaaatgctatataatctgtcttctgtccaagatctcctggtttccattgtaagggatttaaccaaaatcttgctcttccataatcttactctgtgaaatagaggaattcgtgtgccttagatttagaagtgtgttctttaatagagtgtacagggctaaaagagtatttaagttaatatgtaggtttcccccatctgtattccaattgtagaggtgagttttgttaagagtacaattgcaaatcttatctatataggaaaatagctaaatgtcattctccatctctttgttttagtttactgcttccatgtgcaatcctaagcattctttgctggggcaactaaatgtatctttattagtgacttctagtccaaatataagaaactgtcatgttttgtgggaaaataattttataatccatttaaagtgaaagtttatcacacaaatagtacacttattttctaaccaaatacttgataggttatgctactccagtgtagatggccattcctaacttgtttgtgcctgaagatggacttgattcaaatggtttacatatttagtgggtaagggatatgttacagtaccccacctgtaagttatttattagccctaattgtgtttgatttcagacaaaattaacccttttctcctgtgtatctttgaagtggcagataaggtgaagcatcagactggtatcaatattagacaatgttatttattagccctaattgtgtttggtttcagacaaaaccttttctcctgtgtatctttgaagtggcagacaaggcgaagcatcagactggtattaatgttagagaatgttctgaagtgttcctattttgtagttatctattccatttgacatagtagaaggtacattttctttctactctgatgcatggggaaggatgtttttggacattatcaactgagataggtgggaaacctcctctcatttgtggcttagagagctatcaccatttcagaactatgatgcttttcttctcagaacttgtgttaagtagatagtaaacagattgattcatgataattgtccttgactaagactgaaaagactaatgggatgccttttactttgctaattttaaaaactggtgatagatgtcaaatccattaatttatttaaactcttcttaaccttctcttttataatctgttctcaggttttaactccatgtttaccatcatttgcaaaaaggtaccaaaaaaatccataaataaatatggaatacattcataagtacatacattcttttggtataaaacaatattttgacagtttaggcttcattaatagaactattctgattatttggactgcattaattggtcactgactggccatccaattaccattttttctttcagtccaaaatagttagacccttgcatacagaagtggtattttggtttttaatcagatttggtttcatcagaagcagcaagaatggacctgatgtctttaaaagcatagccgacaatggtagcttctcaagttatgaaataaaactgagagataatggagaaaataatttttatgggtttttttggttatggtgctattcctaaggttaactttgaatatgtgacacacacactcctaagtacctttaaggaaaattaataaatcattaatagttaaaatgtttacattgagcactagaacatgtttggccttttttttctacgttatgcaaaatgcccagggatttaatgcacaggtgtactttaatgtttagggtcagtttgtagtattcttgagaaaaagataaagggttataatttgaatgtgaactgatccagaaataagtgctgtacctttccactgcacttgaagttcaacttaatggtgtatgtgaaaaacaaaaactacttt

SEQ ID NO: 185065 - DNA, 2007 bp, Homo Sapiens
ttgggtcctttttatgactgccatgcttcttttggactcagtaaatatttgtaatgttagaaaagtctcatggtttaggatttttaagaaatagtccatttaatttcagcttaaccttttaaatgatctgtaaaatttctttgatagtttaggaatgttgtggggagggttcattaataaaagttcagcaattttttaactgaaatagtttatctcttttacctagtcacaaaaaaggtatgtaaacaaggccattatatgtgtttattgctctttatttccctatctagattttctaagtatcttagctttcttaatataagtttaacttggtacttactgaaaatgcctttttacccctgttaacggtattttgagcttttgaaaagaacttggttgacactgcttttattgtggataaaggagagatggtcagtaattaatggcttgaagtattattggagtggtttatcatttctgaaactaatcgtgtcagaattgactttgaaaagcattgctttttacagaaatatattaactttttaggagtaatttctagtttggattgtaatatgaaataatttaaaagggcttcgctcatatataggaaaatcgcatatggtcctagtattaaattcttattgcttactgatttttttgagttaagagttgttatatgctagaatatgaggatgtgaatataaataagagaagaaaaaagaataaagtagattgagtctccaattttatgtaagcttcagaagaactggtttgtttacatgcaagcttatagttgaaatatttttcaggaattacatgaatgacagtcttcgaaccaatgtgtttgttcgatttcaaccagagactatagcatgtgcttgcatctaccttgcagctagagcacttcagattccgttgccaactcgtccccattggtttcttctttttggtactacagaagaggaaatccaggaaatctgcatagaaacacttaggctttataccagaaaaaagccaaactatgaattactggaaaaagaagtagaaaaaagaaaagtagccttacaagaagccaaattaaaagcaaagggattgaatccggatggaactccagccctttcaaccctgggtggattttctccagcctccaagccatcatcaccaagagaagtaaaagctgaagagaaatcaccaatctccattaatgtgaagacagtcaaaaaagaacctgaggatagacaacaggcttccaaaagcccttacaatggtgtaagaaaagacagcaagagaagtagaaatagcagaagtgcaagtcgatcgaggtcaagaacacgatcacgttctagatcacatactccaagaagacactataataataggcggagtcgatctggaacatacagctcgagatcaagaagcaggtcccgcagtcacagtgaaagccctcgaagacatcataatcatggttctcctcaccttaaggccaagcataccagagatgatttaaaaagttcaaacagacatggtcataaaaggaaaaaatctcgttctcgatctcagagcaagtctcgggatcactcagatgcagccaagaaacacaggcatgaaaggggacatcatagggacaggcgtgaacgatctcgctcctttgagaggtcccataaaagcaagcaccatggtggcagtcgctcaggacatggcaggcacaggcgctgactttctcttcctttgagcctgcatcagttcttggttttgcctatctacagtgtgatgtatggactcaatcaaaaacattaaacgcaaactgattaggatttgatttcttgaaaccctctaggtctctagaacactgaggacagtttcttttgaaaagaactatgttaatttttttgcacattaaaatgccctagcagtatctaattaaaaccatggtcaggttcaattgtactttcattatagttgtgtattgtttattgctataagaactggagcgtgaattctgtaaaa

SEQ ID NO: 185066 - DNA, 1816 bp, Homo Sapiens
  misc_feature (134)..(165): n is a, c, g, or t
ttggggcaagggcaacccaccatctacccacttactaacctggtcctaacccccttactgtgcgcgtgtgtgtgcgtgtgcgcacgctctggctgtttgtctatatgtctagctcatctagttcctcttcttannnnnnnnnnnnnnnnnnnnnnnnnnnnnnnnctgagtatccccactttaggaggaggtgggggctatttctatgcaaatagaaatcagcacattcctcctacttccctttcctccactccccccatatctttaaagtgtggaagcagaaaggacctgcattttcctacattgaggagctgacataggggtaaggtatgggagaggtaggtggatccagggaaaagcagtggggacggaaggcaaagagaccactcaacccccacctggaaggggcaaagaaaagccagagttccatgtttgtactcctgtgctggactgtttcctgagtaccagcaggtccctttttgtctctcatgggcctagcataggtatgagccagggatcctttcctggtccctaagatcaaaccccatggagcagccagcgttagatgcccccacccacctgtactctggagagactgtgctgggaacatgtaccactgagcctgagatggggatgagggcagagagaggggagccccctcttccactcagttgttcctactcagactgttgcactctaaacctagggaggttgaagaatgagacccttaggttttaacacgaatcctgacaccaccatctatagggtcccaacttggttattgtaggcaaccttccctctctccttggtgaagaacatcccaagccagaaagaagttaactacagtgttttcctttgcaccgatccccaccccaattcaatcccggaagggacttacttaggaaacccttctttactagatatcctggccccctgggcttgtgaacacctcctagccacatcactacagtacagtgagtgaccccagcctcctgcctaccccaagatgcccctccccaccctgaccgtgctaactgtgtgtacatatatattctacatatatgtatattaaaactgcactgccatgtctgcccttttttgtggtgtctagcattaacttattgtctaggccagagcgggggtgggaggggaatgccacagtgaagggagtggcagaatcaaattgctacatagtccaaacaaaaaagaaggctttttcaaaaaacattaaattcacatgcagtctcagagactatttagacaaagttcaagttaggagcttttaggatgtgggagtaaaactttaatgggaggggagggctggctgctggaagaaggaagaagccagactggttagacagtactcttaactcctagcccagcctagcgtgccctgcccctctggccactgctgcagacacctgccttaacacacacacctctaggactccacagttttgccttaaaggaccttcccaagtctccctttccctgtctggcttctcccttaagaagagagagatacttgtagaattgggtggggggaatgagcatgaactgtccttccatttgggatatgttacattagagtgagagagagaataaggagcctttcttatggaagaaatgggagaagagagacagggttcttttcagcagagtctagtagtttctctgtaaggcaaaataatctaaaaagactaacctgcccacccactccttatattgctgtgagattgcccctatcttgtgctcttctgtctgcagtgtgcacggccttgttctaacccggaataaaggtgattgattgtattgc

SEQ ID NO: 185067 - DNA, 903 bp, Homo Sapiens
ccccacctccttctaaagtggggaaactcagccccctccccttagcccctgacccccatccctttaagaagaggaactagatgagctagacatatagacaaacagccagagcgtgcgcacacgcacacacacgcgcacagtaagggggttaggaccaggttagtaagtgggtagatggtgggttgcccttgccccctctcctggaggatgggggaagggagtggtctgatgaaggtccaaccttcctcctcttcctcccccttgctcaggccttcttcggtgggggagccaatttgatgatctcttcctcagagggctgccggataatgtctgggggcaaaaaggtatgtgtccagggacagcagtgtgggagatgccaggcaggcccattgggcatctgcctccactctcccaaaactcaagtactccaaggatagtcaacgggacgaggcagaggtgcagctagttaaaggagtggccgcttacctttgtacttcttggcactggggatacgggttagcttggtgtccagctcatcctcctcagagatcttcagcacacgggttctgtagtcaaccaccatagtgagtaggtcaggacggcgggagatctcaaagatgtgctcaatgtaggagaggttgtctggaggaaggcaggagatagggtcagagctaggctgtagaggtcagcttcccctactccaccagactagtgacctggaaccaaagctgagttgctgacattggttatgggagggtacaacactggaggaagaggggctactaatccaggagaagaaagctaaggtacccaaacaacaatacagaggactgttcgcaggaagggcagatagttggtcagtgaagtttctagattgtggttagaatgagccaacttttttgt

SEQ ID NO: 185068 - DNA, 3071 bp, Homo Sapiens
ttggcagccatcggagaccagagccgccccctctgctcgagaaaggggctcagcggcggcggaagcggagggggaccaccgtggagagcgcggtcccagcccggccactgcggatccctgaaaccaaaaagctcctgctgcttctgtaccccgcctgtccctcccagctgcgcagggccccttcgtgggatcatcagcccgaagacagggatggagaggcctctgtgctcccacctctgcagctgcctggctatgctggccctcctgtcccccctgagcctggcacagtatgacagctggccccattaccccgagtacttccagcaaccggctcctgagtatcaccagccccaggcccccgccaacgtggccaagattcagctgcgcctggctgggcagaagaggaagcacagcgagggccgggtggaggtgtactatgatggccagtggggcaccgtgtgcgatgacgacttctccatccacgctgcccacgtcgtctgccgggagctgggctacgtggaggccaagtcctggactgccagctcctcctacggcaagggagaagggcccatctggttagacaatctccactgtactggcaacgaggcgacccttgcagcatgcacctccaatggctggggcgtcactgactgcaagcacacggaggatgtcggtgtggtgtgcagcgacaaaaggattcctgggttcaaatttgacaattcgttgatcaaccagatagagaacctgaatatccaggtggaggacattcggattcgagccatcctctcaacctaccgcaagcgcaccccagtgatggagggctacgtggaggtgaaggagggcaagacctggaagcagatctgtgacaagcactggacggccaagaattcccgcgtggtctgcggcatgtttggcttccctggggagaggacatacaataccaaagtgtacaaaatgtttgcctcacggaggaagcagcgctactggccattctccatggactgcaccggcacagaggcccacatctccagctgcaagctgggcccccaggtgtcactggaccccatgaagaatgtcacctgcgagaatgggctaccggccgtggtgagttgtgtgcctgggcaggtcttcagccctgacggaccctcaagattccggaaagcgtacaagccagagcaacccctggtgcgactgagaggcggtgcctacatcggggagggccgcgtggaggtgctcaaaaatggagagtgggggaccgtctgcgacgacaagtgggacctggtgtcggccagtgtggtctgcagagagctgggctttgggagtgccaaagaggcagtcactggctcccgactggggcaagggatcggacccatccacctcaacgagatccagtgcacaggcaatgagaagtccattatagactgcaagttcaatgccgagtctcagggctgcaaccacgaggaggatgctggtgtgagatgcaacacccctgccatgggcttgcagaagaagctgcgcctgaacggcggccgcaatccctacgagggccgagtggaggtgctggtggagagaaacgggtcccttgtgtgggggatggtgtgtggccaaaactggggcatcgtggaggccatggtggtctgccgccagctgggcctgggattcgccagcaacgccttccaggagacctggtattggcacggagatgtcaacagcaacaaagtggtcatgagtggagtgaagtgctcgggaacggagctgtccctggcgcactgccgccacgacggggaggacgtggcctgcccccagggcggagtgcagtacggggccggagttgcctgctcagaaaccgcccctgacctggtcctcaatgcggagatggtgcagcagaccacctacctggaggaccggcccatgttcctgctgcagtgtgccatggaggagaactgcctctcggcctcagccgcgcagaccgaccccaccacgggctaccgccggctcctgcgcttctcctcccagatccacaacaatggccagtccgacttccggcccaagaacggccgccacgcgtggatctggcacgactgtcacaggcactaccacagcatggaggtgttcacccactatgacctgctgaacctcaatggcaccaaggtggcagagggccacaaggccagcttctgcttggaggacacagaatgtgaaggagacatccagaagaattacgagtgtgccaacttcggcgatcagggcatcaccatgggctgctgggacatgtaccgccatgacatcgactgccagtgggttgacatcactgacgtgccccctggagactacctgttccaggttgttattaaccccaacttcgaggttgcagaatccgattactccaacaacatcatgaaatgcaggagccgctatgacggccaccgcatctggatgtacaactgccacataggtggttccttcagcgaagagacggaaaaaaagtttgagcacttcagcgggctcttaaacaaccagctgtccccgcagtaaagaagcctgcgtggtcaactcctgtcttcaggccacaccacatcttccatgggacttccccccaacaactgagtctgaacgaatgccacgtgccctcacccagcccggcccccaccctgtccagacccctacagctgtgtctaagctcaggaggaaagggaccctcccatcattcatggggggctgctacctgacccttggggcctgagaaggccttgggggggtggggtttgtccacagagctgctggagcagcaccaagagccagtcttgaccgggatgaggcccacagacaggttgtcatcagcttgtcccattcaagccaccgagctcaccacagacacagtggagccgcgctcttctccagtgacacgtggacaaaatgcgggctcatcagcccccccagagagggtcaggccgaaccccatttctcctcctcttaggtcattttcagcaaacttgaatatctagacctctcttccaatgaaaccctcccagtctattatagtcacatagataatggtgccacgtgttttc

SEQ ID NO: 185069 - DNA, 660 bp, Homo Sapiens
tgcacccccagctctgcttcaagttctcttttggaaacagcagccatgttgaatgcccccaccagactgggtctctcacatcctggaatgtaagcatggatacccaagcccagcagctgattcttcacttctcctcaagaatgcatgccaccttcagtgctgcctggagcctcccaggcttggggcaggacactttggtgccccccgtgtacactgtcagccagcctttctgctctttgtttctacaggcccggggctcaagcccagtgtcactagacctcatcattcccttcctgaggccagggtgctgtgtcctgctccatgcttcactcagctccccgggaggagaagatgcctggctcataggggtggggggctctgtgccctcaggtgtggcggtcagatgtccagtttgcctggaagcacctcttgtgtccggatgtctcttacagacacctggggctcttgatcctggcactgctggccctcctcaccctactgggtgttgttctggccctcacctgccggcgcccacagtcaggcccgggcccagcgcggccagtgctcctcctgcacgcggcggactcggaggcgcaacggcgcctggtgggagcgctggctgaactgatacgggcagcgctgggcggcgggcgcgacgtg

SEQ ID NO: 185070 - DNA, 1722 bp, Homo Sapiens
  misc_feature (905)..(916): n is a, c, g, or t
  misc_feature (1081)..(1081): n is a, c, g, or t
ttggcgaaaaatttataaagcttacaagtggctccgctactcttatatctcctactcaaataacaaagatggagagacctccttggtgactggggaggcagatgaagggagagcaggaaccagccacaaagacaacccagccccttcttccagtaaggaagcctgtctaaacatagcaatggcccagaggaaccaggacctgccacctgaaggctgcagcaaggacacttttaaagaagagactcctagaactcccagcaatggcccaggccatgagcacagcagccatgcttgggcagaggtgccagagggtacctctcaggacactggcaatagcggctctgtagagcacccttttgaaaccaagaagctcaatggaaaggccctgagcagtcgggctgaggagccgccttctcctcctgtccccaaggcatctggctccactctcaacagcgggtctggcaactgtcccaggacccagtctgatgacagtgaggagaggagcctcgaaaccatctgtgccaaccacaacaatggacgcttacaccctcgtccccctcaccctcacaataacgggcagaacttgggggagctggaggtggtggcctactcttccccaggacactcagacactgaccgtgataactcgtccctgacagggacactcctacacaaagattgttgcgggtctgaaatggcctgtgagacccccaatgctggaacaagagaggaccccactgacaccccagccacagatagtagcagggctgttcatggccacagtggcctcaaaaggcaacgaattgaattggaagatacagattcagagaattcctcctcagagaagaaattaaaaacatgataaataccaagggaaaacaaaaagctacaaaagtagccttacnnnnnnnnnnnnttgtttagtgaatacagaggaaaggaaaaacaagtattaaaggcacatgaaaccagggcctgaaattttgtgtctgatgctgctcccttctatccaacattcaacaacgggtctgaatgtctagctggccattggcttgtgctgtgttaagaaaggggaaaaagnaataacccaagtgactcctttctagtgagacgtgagcgtagtgtgccgcgcaaggctctgtggaagtaaatctttgttgagacgttcgacttgttcttgtgtacgcacaatggcacgtgtgcgcttattgtctcataagaccttccttttagttctccatcagaaaggacctatgaatttgtactttttgccatctcaccctgtttacatgccataggtgttctggtctggatgatgggtgcctgttaaatcaggttgtgctgccagtgagttgtagatttatgctggaagaatggagaatggaaacaggccttcagcccattggctgcgctggagaggaaagcatggttcctttcttaaagaaatcttccatgttttctctaagtaacacttctttattgagcatttaatgtggacatactataaaaaagaatttttaatgctaatgagaggtttagcacttaagatcagattcaagagaatatagattcctgataaatttcactgtttgcaaattgagcagtgctgcaacatgtactgtatgaaggccataaaatagagctagtcatggataacagactttaaccagttagtgctagatcctaagaggcactcacaaggccagcagtgcttccttggct

SEQ ID NO: 185071 - DNA, 1721 bp, Homo Sapiens
  misc_feature (241)..(253): n is a, c, g, or t
  misc_feature (1646)..(1654): n is a, c, g, or t
gattacaaatcccaaaagtaattctaatgttggtacagaatcactttcccactcccccagtaaaagtccaggtgttaagttgtacacacccccatgctacacacactccttcatctcctttctcagtgttttcataccccagccgcattacacacaccagggcacatcttctctttcacagagcttatcaggatggtatctccttttggcttaaaccaaccaccttgtgtttataaataannnnnnnnnnnnnagtgcctgaattcatccacatcttctgccttcataggcagcctccccttggctccagttccagcaggacaggccttcctctgaaaggaagcctggggcagtgaggccacactagtcagcgttcggccctccctacaccaatcccagctgggctcctagttgtctagcacctttgcactcaagaaagttatattgtttttctctctcttcctcatttcttgccagtattctgccttttcataacatttatgccaacaagatatctggtcattcccagaccttcctgttttgcacaacccttcatagataaccgagtgactgcaacgctgaaaatctgttgctcttttctcttctaaacctgtatctacctcaataaaactgagtcttttatgggaaccagaagacttaagactaatgggaaccaggagtcataagccagagactcctccccaacaccttctgactcctaatagacctactcaataagaatctgttaccttgagatgcctactgctctgcaaagtctagtgagaacaccacagcctctatcaactgcaagtctgagggaagatgccagtcccaccaattctgaccaatggttctgggttgagttaaatgaatatagtaccacattctgctcctcactaagcttcttcgttaacacacctataacaactactttagtagcctgagcacaaagctctggaaagctgtctttgcccttctttcactatgcctcgatcgatcatgggagccaaggaagcacctgctggccttgtgagtgcctcttaggatctagcacctaactggttaaagtctgttatccatgactagctctattttatggccttcatacagtacatgttgcagcactgctcaatttgcaaacagtgaaatttatcaggaatctatattctcttgaatctgatcttaagtgctaaacctctcattagcattaaaaattcttttttatagtatgtccacattaaatgctcaataaagaagtgttacttagagaaaacatggaagatttctttaagaaaggaaccatgctttcctctccagcgcagccaatgggctgaaggcctgtttccattctccattcttccagcataaatctacaactcactggcagcacaacctgatttaacaggcacccatcatccagaccagaacacctatggcatgtaaacagggtgagatggcaaaaagtacaaattcataggtcctttctgatggagaactaaaaggaaggtcttatgagacaataagcgcacacgtgccattgtgcgtacacaagaacaagtcgaacgtctcaacaaagatttacttccacagagccttgcgcggcacactacgctcacgtctcactagaaaggagtcacttgggttannnnnnnnnccctttcttaacacagcacaagccaatggccagctagacattcagacccgttgttgaaagttgccaa

SEQ ID NO: 185072 - DNA, 1799 bp, Homo Sapiens
  misc_feature (888)..(924): n is a, c, g, or t
  misc_feature (987)..(1022): n is a, c, g, or t
  misc_feature (1522)..(1532): n is a, c, g, or t
aataattttttaaagtcaagaaagataaggagcacccattctatctctccccacacacataacttaaagaaagggtcagatacaattgagctgaaaaagagacagactgacctggttcttcctctgtctccaaacaggagagtatactatctgaaaagcacaggccactacaatggaagttttcgggatttacaatctttcttagatatattttgaacttggtaggggaaagagggcaaactcataattgtctatactgctttgaaaataagatccactctggtggtgggtctggaaataatcaggattcacttactcgtaagcatatcaaagatattaaatgatcttaccttcagagacatctagaaagattggctaaatgtgtgaaattcttaaaattaactggctctcagttattgctagaaaatgataccaaggctagcagagacctctgaaattcacagacattcagaaacccaattccgtcaactatttgaaccaaatgaattaacccagataaagggaattaaacttgatttttcccttcctcccaactgactaaaacaggtgtcaaagagaggcaacagcagaaaagtggtagggggcagaagagggaggggtttaaaaggtgctcagttagactgtggctctgaatcacagtaaaactggctgttctgggtactgagttacttaagaaataactgacactattctaatccacagggacataatgaaagcatcacattagtagaatgaggggacagctgagcagacaccagaaaccacaccaaggattctactcgagatctcaatatgggattcaggtcttagcaaccaaaatctgaaaacgctcctaaaggggatgaaaaggtaacataattaaacatnnnnnnnnnnnnnnnnnnnnnnnnnnnnnnnnnnnnngcccatgaattgctattatttcggactgcttaaaatccaaaagattctcttcaaattgctcgnnnnnnnnnnnnnnnnnnnnnnnnnnnnnnnnnnnnccccatatctattctttccccccaaattaacaaagtgcttagttctggtagaggaatttttaaaaaattaaaatgcctacatctaaacaaataatctctttaaaaagcatttagattaagagattgaaaagagcgaggcatctaaggctggggggtggggaaggaaaagctgtggagcactacccctcccccaggccacaaaagtcaagggatgtctcttccactggtagcctcaccacacagcttactgaaatcaacaatgttaaatatttagcttcacaaactctgtaaaaatgagttgttgtgacctacaaaaaaaggtatatacatattttacataatacaatatcttaaaggtcatatttacaaaaaaatctattcacagaaacactgcgagattctgattcagaatgcagtacctggccttgggttttcagaagtttatttttaaaaagcattattgctctaccatataggcaaagggtgacaccagtactttnnnnnnnnnnntcatagttcttgtctaacacgtaagtgtaggcaaaaaccaggaatgtgtttcactattccctcaagacctcaagaatattgcatttatccattctttttaaataaagtgcactcagctgcacattagcatgtgaaaagtttgctactgctgcgattaaatactgtcatctcatttcctttctgcaaagccatttggacatccatgacagttcctggaggtgaagtattacaggacatgaatggcaaatgaaaaccttcattagccaa

SEQ ID NO: 185073 - DNA, 1059 bp, Homo Sapiens
ttggaaatttggccaagagtagtaactctgggcagcagggtgtctgggtgtttgagattgggagtccagccaccaccaatggcgtggtgcctgcagacgtgatcctcggaactgaagatggggcagagtatgatgatgaggatgaagattatgacctggtggccactcgtctgggcctggaggatgtgggcaccacgcccttctcctacaaggctctgagaaggggaggtgctgacacatacagtgtgcccagcgtcctctccccgcgccgggcagctaccgaaaggccccttggacctcccacagagagaaccaggtctttccagttggcagtggagacttttcaccagcagcaccctcaggtcatagatgtggatgaagttgaggaaacaggagttgttttcagctataacacggattcccgccagacgtgtgctaacaacagacaccagtgctcggtgcacgcagagtgcagggactacgccacgggcttctgctgcagctgtgtcgctggctatacgggcaatggcaggcaatgtgttgcagaaggttccccccagcgagtcaatggcaaggtgaaaggaaggatctttgtggggagcagccaggtccccattgtctttgagaacactgacctccactcttacgtagtaatgaaccacgggcgctcctacacagccatcagcaccattcccgagaccgttggatattctctgcttccactggccccagttggaggcatcattggatggatgtttgcagtggagcaggacggattcaagaatgggttcagcatcaccgggggtgagttcactcgccaggctgaggtgaccttcgtggggcacccgggcaatctggtcattaagcagcggttcagcggcatcgatgagcatgggcacctgaccatcgacacggagctggagggccgcgtgccgcagattccgttcggctcctccgtgcacattgagccctacacggagctgtaccactactccacctcagtgatcacttcctcctccacccgggagtacacggtgactgagcccgagcgagatgggg

SEQ ID NO: 185074 - DNA, 2081 bp, Homo Sapiens
ttgggttttaaaggaagttgggctactcacaagttactacataagaaagcaaaagatgaaaaggcgaagcgagaagtgtcttcctggactgtggaaggtgatattaatactgacccatgggcaggttatcgatatactggtaaactcagaccacattatccactgatgccaacaaggccagtgccaagttatattcaaagaccagattatgctgatcatcccttaggaatgtctgaatctgaacaggctcttaaaggtacttctcagattaaattactctcatctgaagatatagaagggatgcgacttgtatgtaggcttgctagagaagttttggatgttgctgccggcatgattaaaccaggtgtaactactgaagaaatagatcacgctgtacacttagcatgtattgcaagaaattgctacccttctcccctgaattattataatttcccaaagtcttgttgtacctcagtgaatgaagtcatttgccatggaataccagacagaaggcccttacaagaaggtgacattgttaatgtggatatcactctttatcgcaatggttatcatggggacctgaatgagacattttttgttggagaagtggatgatggagcacggaaacttgttcagaccacatatgagtgcctgatgcaagccattgatgcagtgaagcctggtgttcggtacagagaattgggaaacattatccagaagcatgcccaagcaaatgggttttcagttgttcgaagctattgtgggcatggaatccacaagctttttcatacagctcccaatgtaccccactatgctaaaaataaagcagttggagtgatgaagtcgggccatgtatttacaattgagccaatgatttgtgaaggcggatggcaggatgaaacctggccagatggttggactgcggtgacaagagacggaaagcggtctgctcagtttgagcacaccctcctggtcacagacactggctgtgaaatcctaacccggcgacttgacagtgcacggcctcacttcatgtctcaattttaatttctcccaagatggcacatctcagtaccttcttactgtgctatgcattttattgagagtacagaaaagaagaggaacctttttttaatcacttgttttgttttgactatagataagaaaggactacagcatttgatgtgtgtcctcaagaacttgtcttgggtctgaaaaagctgagaagaataaaggaaacattgctcaactcttcagccccctccccctgcacacctgttttctcatttgccctttgagcacttttacttaaacttgcttgtagttgcttttatcactgccgcaaaacagccatcaagagccatctgctttccaggtgaacattggaaatgagaatctttgaaacttagcaatatgtgttgcaccagattttttaaattatatatatggaaatatatatgtatacattttaagttctgtatacataattaccaaacactatgtgacctggagtttgtgttgtttctgctctgacaggtttatatgttcttacaaatggatccatagtttgcagtgatttaattcctggttgggatttggcctcccctctcccccatgctaattatttacccttgtaattgtgcatagggaagcactcacccaatgagactttctccaatgtggactctgtgtgtcagtgaatgaatgtagtaaaattcactttggaaggttatcaggcttttaaaaatctagtttatggcaaaaatagccattttccaagtggtggctgactgttgcagggaatgagaatttcataatacactgctatttcagacctctgtttggtcagaaatggaaaagaaaaagccccctttcttcccttttctgttttacttcaagggcataccttggaggtgctcagagaagcgtgaagtttgcactatggtggaggatggggaaagagttctaaagtgtctccagctgtgaacccaggaggtcaagtgggctattaaaatctaacgttgagtaaatgtgatagtgatgagaaaggaattttgtgtactgtaaccttgcagtagaga

SEQ ID NO: 185075 - DNA, 1202 bp, Homo Sapiens
ttgggtgttaaaatatttaaaaagtggatattccaggaatgttttgcagctttgtacaagtaacataaattggacacctcagaatgaaagttcatgttggttctgaatggttcgctgcagctcctgtcacaggctgggatggatttatcacactgagttgtgaaattacctggttctaagaatttttgagtggcaaaaatagaaaacagtcttcatttgaaaacatccctaagcttgaataaatggataccatagatagcttctcttttttattctggtgtcattaccagcatctgaatttcaagttcttaaaatttcaaaaattaaaatttttcattattagctatccatttatcttttacacgaacttgtcatgaacaaattcaaatgtttatgccagcaaatttttgtactgttgcatagttaaaaatgctgggagtctctacatagatacaaaatattattaaattattacataaatttaattttataaaatttaatcatgcttcttttgtctgggtaatagacattggacagatatttttagttcagatggtgattctgaagcttacatctcccttaaaaaaatctaaagcagctcttatgggcttctaattttgatataaataaataatttaaattttattggtgttattggaagaaaaatgctattaatgggctaataaaaaacatgtgtttctcttatggattttaataagctccagtattattcaaatgatcaaaaatatagttataattttttgaattttaaaaacgtgattgctctaataaagaataaaatctatgctttttaacaaacatagttttggtgcctaattctgtaatatgttttattgaaattagattcatttctctaatgtgagaaaaatatatccagtaatagtattgactgtttaaaaaattgagctcatcaaaaatattgtcatcaaatacaggtggttaatctgacatacattgcagttacatgcattatttttatttacaacatttgctccttaatgatgaatttatctgtgttaccctgtttttctacctggaactccatagaatgatgtttgcaaaccaacatgtgctcttttcagtcattcactgttttaatatgacatggtagagaagatagatttatggcaggtaattttttgtaatgtgtattaaacgaagttcaaagattagaaatacat

SEQ ID NO: 185076 - DNA, 2311 bp, Homo Sapiens
ttggtacctattttcttcatcatcggtctcatcttcattcccatcggcattggcatttttgtcacctccaacaacatccgcgagatcgagattgattataccggaacagagccttccagtccctgtaataaatgtttatctccggatgtgacaccttgcttttgtaccattaacttcacactggaaaagtcatttgagggcaacgtgtttatgtattatggactgtctaatttctatcaaaaccatcgtcgttacgtgaaatctcgagatgatagtcaactaaatggagattctagtgctttgcttaatcccagtaaggaatgtgaaccttatcgaagaaatgaagacaaaccaattgctccttgtggagctattgccaacagcatgtttaatgatacattagaattgtttctcattggcaatgattcttatcctatacctatcgctttgaaaaagaaaggtattgcttggtggacagataaaaatgtgaaattcagaaatccccctggaggagacaacctggaagaacgatttaaaggtacaacaaagcctgtgaactggcttaaaccagtttacatgctggattctgacccagataataatggattcataaatgaggattttattgtttggatgcgtactgcagcattacctacttttcgcaagttgtatcgtcttatagaaaggaaaagtgatttacatccaacattaccagctggccgatactctttgaatgtcacatacaattaccctgtacattattttgatggacgaaaacggatgatcttgagcactatttcatggatgggaggaaaaaatccatttttggggattgcttacatcgctgttggatccatctccttccttctgggagttgtactgctagtaattaatcataaatatagaaacagtagtaatacagctgacattaccatttaattttatattatgaaagcaaatcatctgcatgtgcatcaaggccagtcctattcaacctagctttcgaatgctgatatctggttagtatgtcattttgaagttggcacataacttttctaaaaaaaagcagtctttgttgtttgcttcttccctacggatgacttctaaaaatatatgacgggtataaaaaaattagctatattgatcatatcaacactgtaactgctgaaatggcattctaatgtttgctttttattcggacaggccacatgatgcatagagcctctttcatgtgacttgtgtctactgcttaaatctttatgctgtgttgatgatattatattgacatatgaagctgtatatgtgtatgtattttgtggagaaagggattacaagatgtatgagtataatgacttgctaacctttcaggattcagagaaagatgaagaaagaccatatctaaataatacacttcatcattttcatgtgtataaatgcttaaagtaccatctttgttgaggtggttcatgtatccagtttatccagtacagttatttgtcaagcttagctttgatttcaaaggacacgcttaccttgtctggcataagaattaatgctcatgtctgcagtggttgggtaggtcctgcttaggagaattaaaaaattcctctttccgtttggttgaatgttgcagtcaggaaccccaactcacttggaatgtttttatatgtaatcatttcccttgaagcttatactttataagggaagaaagaattcaggtgatatgggaaaactgcttggcagaccttcatcttctgcctcaactgtaaaccacatgtaaatgcttaatggagactgttttcattcttgtgatatttaacattcagaaaattacttcagctttggaaatactcaggctgtttttattctgcaggtaagtgttttgacttaagtactaatattccagaaatttttgaaagcagtaaccttaatttcctatgtatttcattccacttttgcatataggtcaaatagcaatgtgtatgcacattctctttagttaaggcaccaattgttttggttggttttcctaagacatactttaaaaagatgttctataaatttcctagttaaattatggggattttggagtatgtacatgataaattataatacgtatatggttgaagttattttattttttactaatgaattattttaatattccttattgaataaatgctgtaacttgtttgctatggaacttattcttaaagttctagttaaaaataatttttccacatgcatgaaaatatgtattaatcagaggtggcttaattacattgaaattgcttttttgttgttgtttttt

SEQ ID NO: 185077 - DNA, 1005 bp, Homo Sapiens
  misc_feature (863)..(882): n is a, c, g, or t
cataaaagcaaactttgtacaaaaaagttggggttcatgtatccagtttatccagtacagttatttgtcaagcttagctttgatttcaaaggacacgcttaccttgtctggcataagaattaatgctcatgtctgcagtggttgggtaggtcctgcttaggagaattaaaaaattcctctttccgtttggttgaatgttgcagtcaggaaccccaactcacttggaatgtttttatatgtaatcatttcccttgaagcttatactttataagggaagaaagaattcaggtgatatgggaaaactgcttggcagaccttcatcttctgcctcaactgtaaaccacatgtaaatgcttaatggagactgttttcattcttgtgatatttaacattcagaaaattacttcagctttggaaatactcaggctgtttttattctgcaggtaagtgttttgacttaagtactaatattccagaaatttttgaaagcagtaaccttaatttcctatgtatttcattccacttttgcatataggtcaaatagcaatgtgtatgcacattctctttagttaaggcaccaattgttttggttggttttcctaagacatactttaaaaagatgttctataaatttcctagttaaattatggggattttggagtatgtacatgataaattataatacgtatatggttgaagttattttattttttactaatgaattattttaatattccttattgaataaatgctgtaacttgtttgctatggaacttattcttaaagttctagttaaaaataatttttccacatgcatgaaaatatgtattaatcagaggtggcttaattacattgaaattgcnnnnnnnnnnnnnnnnnnnnactgaaataactcatgtttgtgtagaagaatgcctgtttactcagagtttatattttccttcagttatattttaaatcaaaggtctgggtaatgtatacttttgattaatatatacttttttt

SEQ ID NO: 185078 - DNA, 1258 bp, Homo Sapiens
tttactggacattccccttgatctaataccaaacttagccagtctaactgtaactcagatgataatctgaccacttcctggtaagaacaaatggttaatgttgtcacagtgattaataaatacaaatatgaattaatttaacaatgaattacattttatcccatccaggcatgaagaagttaaaacctggactcactgaccctgtgttaaaatttagtgctaaatgtaagcaacaacactggagcattgttattttatcaagacacctgaacatagcaaaattaattttgttcatttttattaacataggacatactaaccaaatattatcatttaataaaatcaacgttacaaagaaactcactagcaaataaacaaacgatattcacttgactcttctcttggttgaatgattttctattaattagtagtacacagctatttttatcaatttatgcttaaactgccttatgatttcaatgaaatttcttagcttttacttgttgaataattttttcaattgggaatcttttcataattcaaaatagttcctgaaaattaatgcatccttcaatgtcttctacttaagctgggtgcatttaaaatgcaacacaattctttgaaaggagactatgacatttgagcataaagcctataagaaaaagaaatgtcttccctccccccatgcttcacagagactatatgaatgttccatactcttcatatttagcaacaggagttccttagagatcaaacagcagaaaacaggaggaacttaggccatcaatggacttgtaaaacagataaaactccaaatgtattttaagattccatcttctccacagatgagaaagtgctgaaagggctcttcaacttttctttagcgacatcctctgtgccccaattagaaaaagagttgcaggatggtagtcctccttaaacagcacagactcaatctggaaagagtggcagaaacccctctcccccaacaatgtatccccgaaaataaactgccaagtgcaagagggacaatcttcagaataaataatattctgaaggactgacaaaacagactatttttagacaaagaacacaccaaatactccgaaatttcaggataaccatacatcaagtacttcgtgcaagtaatatttttaccagttaaaagtcattatgaaacacacattcttttaactgaatttcatatgttatagggaaacttgaaccaacttttttgtacaaagttggcttttaaaag

SEQ ID NO: 185079 - DNA, 842 bp, Homo Sapiens
tgagcaatgcttttttcctattaaaaacaactttgtacaaaaaagttggggttaatagtagaaatgtgccacacttttcaagttttatataacatatgaaattcagttaaaagaatgtgtgtttcataatgacttttaactggtaaaaatattacttgcacgaagtacttgatgtatggttatcctgaaatttcggagtatttggtgtgttctttgtctaaaaatagtctgttttgtcagtccttcagaatattatttattctgaagattgtccctcttgcacttggcagtttattttcggggatacattgttgggggagaggggtttctgccactctttccagattgagtctgtgctgtttaaggaggactaccatcctgcaactctttttctaattggggcacagaggatgtcgctaaagaaaagttgaagagccctttcagcactttctcatctgtggagaagatggaatcttaaaatacatttggagttttatctgttttacaagtccattgatggcctaagttcctcctgttttctgctgtttgatctctaaggaactcctgttgctaaatatgaagagtatggaacattcatatagtctctgtgaagcatggggggagggaagacatttctttttcttataggctttatgctcaaatgtcatagtctcctttcaaagaattgtgttgcattttaaatgcaccccagcttaagtagaagacattgaaggatgcattaattttcaggaactatttttgaattatgaaaagattcccatttgaaaaattattcacaactaaaagctaaaaattttcattgaaattcataaggcatttaa

SEQ ID NO: 185080 - DNA, 1908 bp, Homo Sapiens
  misc_feature (91)..(110): n is a, c, g, or t
  misc_feature (235)..(247): n is a, c, g, or t
ctttgtacaaaaaagttgggttaaaaataatttttccacatgcatgaaaatatgtattaatcagaggtggcttaattacattgaaattgcnnnnnnnnnnnnnnnnnnnnactgaaataactcatgtttgtgtagaagaatgcctgtttactcagagtttatattttccttcagttatattttaaatcaaaaggtctgggtaatgtatacttttgattaatatatactttttttnnnnnnnnnnnnncaatgtaatggttaatagtagaaatgtgccacacttttcaagttttatataacatatgaaattcagttaaaagaatgtgtgtttcatattgacttttaactggtaaaaatattacttgcacgaagtacttgatgtatggttatcctgaaatttcggagtatttggtgtgttctttgtctaaaaatagtctgttttgtcagtccttcagaatattatttattctgaagattgtccctcttgcacttggcagtttattttcggggatacattgttgggggagaggggtttctgccactctttccagattgagtctgtgctgtttaaggaggactaccatcctgcaactctttttctaattggggcacagaggatgtcgctaaagaaaagttgaagagccctttcagcactttctcatctgatgagaaagtggaatcttaaaatacatttggagttttatctgttttacaagtccattgatggcctaagttcctcctgttttctgctgtttgatctctaaggaactcctgttgctaaatatgaagagtatggaacattcatatagtctctgtgaagcatggggggagggaagacatttctttttcttataggctttatgctcaaatgtcatagtctcctttcaaagaattgtgttgcattttaaatgcacccagcttaagtagaagacattgaaggatgcattaattttcaggaactattttgaattatgaaaagattcccaattgaaaaaattattcaacaagtaaaagctaagaaatttcattgaaatcataaggcagtttaagcataaattgataaaaatagctgtgtactactaattaatagaaaatcattcaaccaagagaagagtcaagtgaatatcgtttgtttatttgctagtgagtttctttgtaacgttgattttattaaatgataatatttggttagtatgtcctatgttaataaaaatgaacaaaattaattttgctatgttcaggtgtcttgataaaataacaatgctccagtgttgttgcttacatttagcactaaattttaacacagggtcagtgagtccaggttttaacttcttcatgcctggatgggataaaatgtaattcattgttaaattaattcatatttgtatttattaatcactgtgacaacattaaccatttgttcttaccaggaagtggtcagattatcatctgagttacagttagactggctaagtttggtattagatcaaggggaatgtccagtaaacagagaggtaagcatgatggaaataatgaagtggggtacacaggaaaaacctgactagtgaggaggagcagctgagagatagggtcagtgaatgcggttcagcctgctacctctcctgtcttcatagaaccattgccttagaattattgtatgacacgttttttgttggttaagctgtaaggttttgttctttgtgaacatgggtattttgaggggagggtggagggagtagggaagtggtccttttacaagaattttgatgcataagtgtctattgtagggtttggatgatctagtaaagtgttttagaacccctttttatcccatgcaccattcagtaaacataaaaatcacaattctgctaatgtcatttggaacttcaaaataaatatcttgtctaa

SEQ ID NO: 185081 - DNA, 1378 bp, Homo Sapiens
ttggcttcaagcgcctcttctcctttgagttcccctttgagcaagggaaataatgttcctgggaatcccaagaacctccacatgaccagcagcctagccccagactctctggtccggaaacagggcaaaggcaccaacccctctggaggacggtaaccatctgggccctccgacttccttcaaccaaaccagggctagagtcctgacctgccagtggtctttggatggcttgcccgtgcagcatcttgcatcctgagtcagaagtggaaatgtccagcaggggaaggacaggcaggtggatggtgtgagcacttttatcatctgtgtctcatcaggagcatctggggtgcctgtaggaggaaggccacagggcatggatcagccccactgcatctcaagtgaactgtatagccaagtcttaaacctctcacggggcaagcctgacacagaccccctttagatgctcaggcatactgtttccatcccgattccactcttcggctctgacacgtcccttgcaaagtctccgcaggtgctgtgaagagccttccatggtagagatttctcttaagagtgtgatttctcatagggctagtaagggagattgtatacctgttgtccacagtcttcaggcagctccccaggtctctgaaccccagagtgtcatcattggagagagcagtgactgcgagagatggtggaggccgctaagcatggtagaggctagaggaagtctatccacaggcagttgtgttcccagcaattcctcccatcctgcatggttcacaccaagagaaccttcagatcctaccagcaaccgtagcaccttccacccaggggactcccagaagccagtaaagagaccaggagccacctcaatcagcaggacagcctcactgcccctcttgcagagtcccctttgcccatcctgaatgcacagtctccctgctcatgcccttcagtcccctgcttggctgtatgcactgtctatattgcactgagagaggaagggacagcaggagtgaggtgaagagggcggagagagggggcaggctcggcaccggccctcccagcccggccagcctgagcttgctgccctccagtagagacagaggggcagtgtttgcatgggaggtgtttctgcctgtccctgcctgatgtccctggtggagcaggtacctccggggcgggcaagcctctgatttgcacacctgaaaatcgcggaattgagtttcgaatagattgatttttaaaacttttttggagtagggggtataggggaatcatttaatttaaatcattaagaatcccctgctcaaacccaaatcctgtgtacagatgctatttaaagggaatcagaaaaatgcccaagcctttc

SEQ ID NO: 185082 - DNA, 1784 bp, Homo Sapiens
gccccccagggcatgggccgcacaagggtctgggtagaccacgtgggatgataggagggctgaagagggccataggggtgcgggcggggtaaaggtgaaagggggcaaaggattcgtcagaaaacgtgattttaaaacgagccagattcatccatttccctccttacagtagtagcagctcgcaggtcacagggtttgacagaagaacctgggtgctgggggctacgcacaccctgctctggcctgcactccacagcctcgcacaggtacctaagggggttttcctcaggctccccccgagcgcccaccgtgaaagacagaagcgtgcggagttactccagcgtgggggcacgctgcccactcacaacacatctggttgcatggcaggggaggcgggaagagaagacctatagggcagccctccagccaggcttccacctcggggccgctgtcctacagtgcacacatgtggggctcccgccggggaggaagacacacagtggcccctttcatacaagacacagggaggagcatggcaccggcacaacctcccagggtggctcctaactccaaggccgccgctgtcccaccgaggggcctgcaggtgtgcctaactgacgcttttctcagactgccaggccgtgccagcctctctgagactgagcatctgtgtgtgcggcgctggagaaggcggccaggagtggaggaggaagcagggcaccgaccacagagtggcaggggtgacgaggaacattcctgagcacccaggtagaagccaggcacctctccccgttatgactttcagttcataactgtctgtggtttaacaggaccccaaggctcctgtctcccgccctgaatcctcagtgtaaatgagcaggtattgtttggttctgacccttcctaattctttccccaaagccccctgaagcagtcatcttggccaggcggggtgtgggagggagctgcgggcggggcaggactcgctgcctggctggagctccccagccagcaggtgtgaaggactgtgagccaggcctgtgccctggctgacgggctcatccctgacactgctggccattaattctgaaggcccagcgtgcagggctcagatcacaatgaagccaatactagcgtgtgacagctgcctggcatcattggtctgccctgtcgccagggggcagcggtattgctggctcacacagagctatggggtatgtcttatattccttagagaaaagaaatttaatgtaaaaagacccaaagtgatatctgtcaaaataagtaaccgctccaggttcacagatacgcacagcacgcaaggtggattctgacgcacagtagggactctcaggctgacgcccaacagggatgccggggccgaggccggtggtctggaggaagccccccagctggccacagcagtagcaccaactggctgatcgggctccaggggacaaaggccacctcctccctctgtgagaaactggccccaccgggctctggccccttctcccggaagctgcgaacggctttgtggggaatatacaagatgacgatgatctacagaaaccatagggaactgaccgtacattctttctctatatagctttatatttagtgtcccaccatagaaaacttcatcctcaatatagcaagtacatgaggtggaggggagtctggcccaggaagacacttgcgaatggaggagcagagagagggactattgacgtaaacctgccacgtgacacgactcggctttgtggaaaccatacgtgatccaa

SEQ ID NO: 185083 - DNA, 968 bp, Homo Sapiens
  misc_feature (84)..(130): n is a, c, g, or t
ttggcacaaattatcttaaaactcctgtttcacttggttcagtaccacatgggtgaacactcaatggttaactaattcttgggnnnnnnnnnnnnnnnnnnnnnnnnnnnnnnnnnnnnnnnnnnnnnnnagccacagtatatttccctgtttcttccacagtgcctaataatactgtggaactaggttttaataattttttaattgatgttgttatgggcaggatggcaaccagaccattgtctcagagcaggtgctggctctttcctggctactccatgttggctagcctctggtaacctcttacttattatcttcaggacactcactacagggaccagggatgatgcaacatccttgtctttttatgacaggatgtttgctcagcttctccaacaataagaagcacgtggtaaaacacttgcggatattctggactgtttttaaaaaatatacagtttaccgaaaatcatataatcttacaatgaaaaggactttatagatcagccagtgaccaaccttttcccaaccatacaaaaattccttttcccgaaggaaaagggctttctcaataagcctcagctttctaagatctaacaagatagccaccgagatccttatcgaaactcattttaggcaaatatgagttttattgtccgtttacttgtttcagagtttgtattgtgattatcaattaccacaccatctcccatgaagaaagggaacggtgaagtactaagcgctagaggaagcagccaagtcggttagtggaagcatgattggtgcccagttagcctctgcaggatgtggaaacctccttccaggggaggttcagtgaattgtgtaggagaggttgtctgtggccagaattaaacctatactcactttcccaaattgatcactgctcacactgctgatgatttagagtgctgtccggtggagatcccacccgaacgtcttatctaatc

SEQ ID NO: 185084 - DNA, 1479 bp, Homo Sapiens
  misc_feature (324)..(386): n is a, c, g, or t
  misc_feature (1361)..(1407): n is a, c, g, or t
ttggccaatacaggagtgacttggaactccattctatcactatgaagaaaagtggtgttcttttcctcttgggcatcatcttgctggttctgattggagtgcaaggaaccccagtagtgagaaagggtcgctgttcctgcatcagcaccaaccaagggactatccacctacaatccttgaaagaccttaaacaatttgccccaagcccttcctgcgagaaaattgaaatcattgctacactgaagaatggagttcaaacatgtctaaacccagattcagcagatgtgaaggaactgattaaaaagtgggagaaacaggtcagcnnnnnnnnnnnnnnnnnnnnnnnnnnnnnnnnnnnnnnnnnnnnnnnnnnnnnnnnnnnnnnntctcaacgttctcgtcaaaagaagactacataagagaccacttcaccaataagtattctgtgttaaaaatgttctattttaattataccgctatcattccaaaggaggatggcatataatacaaaggcttattaatttgactagaaaatttaaaacattactctgaaattgtaactaaagttagaaagttgattttaagaatccaaacgttaagaattgttaaaggctatgattgtctttgttcttctaccacccaccagttgaatttcatcatgcttaaggccatgattttagcaatacccatgtctacacagatgttcacccaaccacatcccactcacaacagctgcctggaagagcagccctaggcttccacgtactgcagcctccagagagtatctgaggcacatgtcagcaagtcctaagcctgttagcatgctggtgagccaagcagtttgaaattgagctggacctcaccaagctgctgtggccatcaacctctgtatttgaatcagcctacaggcctcacacacaatgtgtctgagagattcatgctgattgttattgggtatcaccactggagatcaccagtgtgtggctttcagagcctcctttctggctttggaagccatgtgattccatcttgcccgctcaggctgaccactttatttctttttgttcccctttgcttcattcaagtcagctcttctccatcctaccacaatgcagtgcctttcttctctccagtgcacctgtcatatgctctgatttatctgagtcaactcctttctcatcttgtccccaacaccccacagaagtgctttcttctcccaattcatcctcactcagtccagcttagttcaagtcctgcctcttaaataaacctttttggacacacaaattatcttaaaactcctgtttcacttggttcagtaccacatgggtgaacactcaatggttaactaattcttgggnnnnnnnnnnnnnnnnnnnnnnnnnnnnnnnnnnnnnnnnnnnnnnnagccacagtatatttccctgtttcttccacagtgcctaataatactgtggaactaggttttaataatttttt

SEQ ID NO: 185085 - DNA, 1560 bp, Homo Sapiens
  misc_feature (325)..(387): n is a, c, g, or t
  misc_feature (1362)..(1408): n is a, c, g, or t
ttggtccaatacaggagtgacttggaactccattctatcactatgaagaaaagtggtgttcttttcctcttgggcatcatcttgctggttctgattggagtgcaaggaaccccagtagtgagaaagggtcgctgttcctgcatcagcaccaaccaagggactatccacctacaatccttgaaagaccttaaacaatttgccccaagcccttcctgcgagaaaattgaaatcattgctacactgaagaatggagttcaaacatgtctaaacccagattcagcagatgtgaaggaactgattaaaaagtgggagaaacaggtcagcnnnnnnnnnnnnnnnnnnnnnnnnnnnnnnnnnnnnnnnnnnnnnnnnnnnnnnnnnnnnnnntctcaacgttctcgtcaaaagaagactacataagagaccacttcaccaataagtattctgtgttaaaaatgttctattttaattataccgctatcattccaaaggaggatggcatataatacaaaggcttattaatttgactagaaaatttaaaacattactctgaaattgtaactaaagttagaaagttgattttaagaatccaaacgttaagaattgttaaaggctatgattgtctttgttcttctaccacccaccagttgaatttcatcatgcttaaggccatgattttagcaatacccatgtctacacagatgttcacccaaccacatcccactcacaacagctgcctggaagagcagccctaggcttccacgtactgcagcctccagagagtatctgaggcacatgtcagcaagtcctaagcctgttagcatgctggtgagccaagcagtttgaaattgagctggacctcaccaagctgctgtggccatcaacctctgtatttgaatcagcctacaggcctcacacacaatgtgtctgagagattcatgctgattgttattgggtatcaccactggagatcaccagtgtgtggctttcagagcctcctttctggctttggaagccatgtgattccatcttgcccgctcaggctgaccactttatttctttttgttcccctttgcttcattcaagtcagctcttctccatcctaccacaatgcagtgcctttcttctctccagtgcacctgtcatatgctctgatttatctgagtcaactcctttctcatcttgtccccaacaccccacagaagtgctttcttctcccaattcatcctcactcagtccagcttagttcaagtcctgcctcttaaataaacctttttggacacacaaattatcttaaaactcctgtttcacttggttcagtaccacatgggtgaacactcaatggttaactaattcttgggnnnnnnnnnnnnnnnnnnnnnnnnnnnnnnnnnnnnnnnnnnnnnnnagccacagtatatttccctgtttcttccacagtgcctaataatactgtgggaactaggttttaataatttttaattgatgttgttatgggcaggatggcaaccagaccattgtctcaaagcaggtgctggctctttcctggctactccatgt

SEQ ID NO: 185086 - DNA, 1098 bp, Homo Sapiens
ctttaaaagccaactttgtacaaaaaagttgggggaaagtagccttcctaatggtcggagcgtctccctcatggacctccaggacactcatgctgctcaagtggagcatgcatctgtcatgcttgatgtgcctatacgcttgaccggaagccagctttccataacccaggtggccagcatcaaacagctgcgggaaacccagagcactccccaaagtgcaccccaagtgagaaggcccctgcacccagccttgaaccagccaggtggccttcagcccttgtcgttccagaaccctgtctatcacctcaataacccaattccagcaatgccaaaggcctctatagattccagtttggagaacctaagcactgccagttccagaagccaaagtaacagtgaagacttcaagctcagtggacccagcaatagcagcatggaagatttcactaaacgtagcactcagagtgaggacttctccaggcggcacacggtgccagatagacacatacctcttgctttgccacgacaaaatagtactgggcaggcccagatccgaaaagtggaccagggtgggttaggtgcccgagccaaagccccaccatccctgccacacagtgcttctttacgtagcaccgggagcatgtcagtggtgtccgcagccctggtggccgaacctgtgcagaatgggagccggtcccggcagcagtcctcttcctccagagagagccctgttcccaaagttagagcaatccagagacaacagacacagcaggttcagtcacctgtggactctgccacaatgtccccagtagagaggacagcagcctgggttctgaacaatgggcagtatgaagaggatgtggaagaaactgagcaaaatctagatgaagccaagcatgctgagaagtatgaacaagaaattactaaactgaaggagcgcctgagagtttccagccggcgactggaggaatatgaacgccgcttgctggtgcaggagcagcagatgcagaagctgctgctggaatacaagcccgactggaggacagcgaggagcggctccgaagacagcaggaagaaaaagatagccagatgaaaagc

SEQ ID NO: 185087 - DNA, 1496 bp, Homo Sapiens
  misc_feature (116)..(207): n is a, c, g, or t
ttgggactcagaaaccaagttctaattcagttgccatgaaaacttaaggtgagaggattgtcaaccagtgaaaaatacggaggaaaacactaacagaatatgagaccagggggcannnnnnnnnnnnnnnnnnnnnnnnnnnnnnnnnnnnnnnnnnnnnnnnnnnnnnnnnnnnnnnnnnnnnnnnnnnnnnnnnnnnnnnnnnnntgaaccaccgcctagcctgcaaatgcaaatctaaccaggtcatatgtaggataaaaatctttttcctggcccaagtgtctctcctcatcttcggagagggagatgggaatgagagagccttctaataatagcaattgctagttaccagtgccctggcttatcgtgtgttagactctgagttaaacatcaactccttgaatcattacaagctccttatcagcgaggctgcctccaaagcatccggagtttgcaaccatcactgtccaccccgcgagctgcgatagtgcgagaactacaattcccgtggggctgtgcgggagcatcgcgagagttacattaactgtggcggcgggaaggcggagcctgcagctggctgggcggttaggagggcccggggccgagacgatggctgaccacaaccctgacagcgactccacgccgcgcacgctgctgcgacgcgtgctggatacagcggacccgcgcaccccgcggcgaccccggagtgctcgggctggagcccggagagccctgcttgaaacggcttcccccaggaagttgagtggccaaacaaggacgatagccagagggcgttcccatggagccaggtctgttggcagatcggcccatattcaggccagtgggcacttggaggaacagacacctcggacgctgctgaagaacatcctactaactgccccagaatcttccatcctgatgcctgagtcggtagtgaagccagtgccagcaccgcaggcggtccaaccctccagacaagagagcagttgcggcagcctggagctgcaacttcctgagctcgagccccccacaaccctggctccaggtctgctggcccctggcaggaggaaacagaggctgagactgtcagtgtttcagcagggagtggaccaggggctgtctctctcccaagagcctcaagggaatgctgatgcctcttccctcaccagatccctcaacctgacctttgccacacctcttcagccacagtcagtgcagaggcctggcttggcccgcagacctccagcccgccgagctgtagacgtgggtgcctttttgcgggatctgcgagatacttccctggctcctccaaacattgtgttggaggacacccagccgttctctcagcccatggttggctcccccaacgtgtatcactccctgccctgcacgcctcacactggggctgaagacgctgagcaggctgccggtcgcaagacacagagcagtgggcctgggctgcagaagaatagtgagtgtgtggcactggtggc

SEQ ID NO: 185088 - DNA, 1058 bp, Homo Sapiens
ttgtacaaaaaagttggtttttgcttgaccttaaggagattagcttccagtagatgagtttgcaaaatacttttcctgttcttttgttttgctggtattgaaaacatcccactaaatcagatgaagaggcatgggaggaaaaatatccaaattaattactaaaatcgagaagagaaggcaaactcttgaaaagtaaaaaggtgtttgtgaccttcagtatttattgaacagaggaaataactgacaagggcaatacaattcaatgttcatgtagtaacattcatgtcacttgttgaatttggttctcatatgtatattgcatacacataaattcaaactataagtcgtcatttttgagccatcatcttacattcatgtaatgaaattatggaagagagtaaaaactagctcttaacttagtaaatataatatggtatttaaaatcaggtcactacagtaaggttctaagtattgccaattgaaaagctagaaatggtattactgttgcaaagtgttgtcaataattgactccaatagcattgtaaatacttgtatcccacaactattttaaacccaagcaataaaatggattttctaattcacttcaattctttatttctcttacctatctatgtcttggtacataagaaaagtgtttccatcactgcattggtagaattatttcagtgttattatttttgtgatttcgtatgtctacacaaaaatgaattagtttaatttatattgtgatacagttgtttgagaaatatttttaattctgtttcaactttatttctccaagtgtataatataaaaattacttctgttattgttctctaccaataggggaaaaaattaaaacattagatccattgagaaagagatgatgtaataaataattaagattagtaataatattatcacggggtgattatgaccagttgaataatctctttcccttgaattatttagctaacaatttaactctcccaaatatttaaaataattgtaaaatcatattttactgccccattattaaactaaaatatttttggttt

SEQ ID NO: 185089 - DNA, 1686 bp, Homo Sapiens
gagcaatgctttccctataatggccaactttgtacaaaattcatgtcacttgttgaatttggttctcatatgtatattgcatacacataaattcaaactataagtcgtcatttttgagccatcatcttacattcatgtaatgaaattatggaagagagtaaaaactagctcttaacttagtaaatataatatggtatttaaaatcaggtcactacagtaaggttctaagtattgccaattgaaaagctagaaatggtattactgttgcaaagtgttgtcaataattgactccaatagcattgtaaatacttgtatcccacaactattttaaacccaagcaataaaatggattttctaattcacttcaattctttatttctcttacctatctatgtcttggtacataagaaaagtgtttccatcactgcattggtagaattatttcagtgttattatttttgtgatttcgtatgtctacacaaaaatgaattagtttaatttatattgtgatacagttgtttgagaaatatttttaattctgtttcaactttatttctccaagtgtataatataaaaattacttctgttattgttctctaccaataggggaaaaaattaaaacattagatccattgagaaagagatgatgtaataaataattaagattagtaataatattatcaggggtgattatgaccagttgaataatctctttcccttgaattatttagctaacaaattaactctcccaaatatttaaaataatgtaaaatcatattttactgcccattattaactaaaatatttttgtttgactttgagcaccaactggtaatactaataaatacccatgtcatgcagatggctgggcgaataagagatgtctaaaaatatgcactggtcttggaaaacatggcacaagtaaggatatcatatatgatgtctgtttattttatgtctgatttcttttgaatgagtagttggggactccatttctaaggagactaggtaaataaaatgacctttgacatttcatcctgcatttctagtcttctcttacttcagtacttgcatatttagccatccatatgggtcatgctccatgattgaatatttaccctctcagcaacaaccatggtctttctccacatctttaatggttgcaggagggttgtgggggcaagggtaaatggtttgatagcacttttctttgctgtagtgacccagttgaggcaactggaatggattcattaatcactgacatgtgattttcatgagacatctcctctgcagacacatgctgcactaatgggcttttgagctgcctgtggtaactcacattgctcagatgaaataatcgtatttcacgtccatgtgtcttcctttaacgtcagctcatgacagtcagctagtgacctgacaagagatgtgacatcaaaataattttttgcaggatatcatcaaaataagcaaactttgcaaatacccagacctatgagaacatgctcttaggctgaacaattcgatgctggtgatgaggtcaaaggaaataattcagtaagaatggaaattactggaatactattgtctcaggctttgtactacatgaaacttgacagtggtgtctgtacatttaactctgatacatttactggaaatgcacttaattttcaaaaactggagagg

SEQ ID NO: 185090 - DNA, 2596 bp, Homo Sapiens
actttgtacaaaaaagttggggcatttccaatgcagcccaggccactgcctcagacgatgcctcacagcaccagggtggaggaggaggagaactggcatatgcactcaataactttgacaaacaaatcattgtggaccccttgagcttcagcgaggagcgctttaggccttccctggaggagcgtctggaaagcatcattagtggggctgccttgatggccgactcgtcctgcacgcgtgatgaccgtcgtgagcgaattgtggcagagtgtaatgctgtccgccaggccctgcaggacctgctttcggagtacatgggcaatgctggacgtaaagaaagaagtgatgcactcaattctgcaatagataaaatgaccaagaagaccagggacttgcgtagacagctccgcaaagctgtcatggaccacgtttcagattctttcctggaaaccaatgttccacttttggtattgattgaagctgcaaagaatggaaatgagaaagaagttaaggagtatgcccaagttttccgtgaacatgccaacaaattgattgaggttgccaacttggcctgttccatctcaaataatgaagaaggtgtaaagcttgttcgaatgtctgcaagccagttagaagccctctgtcctcaggttattaatgctgcactggctttagcagcaaaaccacagagtaaactggcccaagagaacatggatctttttaaagaacaatgggaaaaacaagtccgtgttctcacagatgctgtcgatgacattacttccattgatgacttcttggctgtctcagagaatcacattttggaagatgtgaacaaatgtgtcattgctctccaagagaaggatgtggatggcctggaccgcacagctggtgcaattcgaggccgggcagcccgggtcattcacgtagtcacctcagagatggacaactatgagccaggagtctacacagagaaggttctggaagccactaagctgctctccaacacagtcatgccacgttttactgagcaagtagaagcagccgtggaagccctcagctcggaccctgcccagcccatggatgagaatgagtttatcgatgcttcccgcctggtatatgatggcatccgggacatcaggaaagcagtgctgatgataaggacccctgaggagttggatgactctgactttgagacagaagattttgatgtcagaagcaggacgagcgtccagacagaagacgatcagctgatagctggccagagtgcccgggcgatcatggctcagcttccccaggagcaaaaagcgaagattgcggaacaggtggccagcttccaggaagaaaagagcaagctggatgctgaagtgtccaaatgggacgacagtggcaatgacatcattgtgctggccaagcagatgtgcatgattatgatggagatgacagactttacccgaggtaaaggaccactcaaaaatacatcagatgtcatcagtgctgccaagaaaattgctgaggcaggatccaggatggacaagcttggccgcaccattgcagaccattgccccgactcggcttgcaagcaggacctgctggcctacctgcaacgcatcgccctctactgccaccagctgaacatctgcagcaaggtcaaggccgaggtgcagaatctcggcggggagcttgttgtctctggggtggacagcgccatgtccctgatccaggcagccaagaacttgatgaatgctgtggtgcagacagtgaaggcatcctacgtcgcctctaccaaataccaaaagtcacagggtatggcttccctcaaccttcctgctgtgtcatggaagatgaaggcaccagagaaaaagccattggtgaagagagagaaacaggatgagacacagaccaagattaaacgggcatctcagaagaagcacgtgaacccggtgcaggccctcagcgagttcaaagctatggacagcatctaagtctgcccaggccggccgcccccacccctcggggctcctgaatatcagtcactgttcgtcactcaaatgaatttgctaaatacaacactgatactagattccacagggaaatgggcagactgaaccagtccaggtggtgaattttccaagaacatagtttaagttgattaaaaatgcttttagaatgcaggagcctacttctagctgtattttttgtatgcttaaataaaaataaaaattcataaccaaagagaatcccacattagcttgttagtaatgctctgaccaagccgagatgcccattctcttagtgatggcggcgttagggtttgagagaagggaatttggctcaacttcagttgagagggtgcagtccagacagcttgactgcttttaaatgaccaaagatgacctgtggtaagcaacctgggcatcttacgaagcagtccctggagaaagcatgttcccagaaaggtctctggagggacaaactcactcagtaaaacataatgtatcatcatgaagaaaactgattctctatgacatgaaatgaaaattttaatgcattgttataattactaatgtacgctgctgcaggacattaataaagttgc

SEQ ID NO: 185091 - DNA, 1505 bp, Homo Sapiens
ttggggactggagggagacaaagcagcgcccgtctgcttcgggcctctggaatttagcgctcgcccagctagccgcagaaatgactgctgtccatgcaggcaacataaacttcaagtgggatcctaaaagtctagagatcaggactctggcagttgagagactgttggagcctcttgttacacaggttacaacccttgtaaacaccaatagtaaagggccctctaataagaagagaggtcgttctaagaaggcccatgttttggctgcatctgttgaacaagcaactgagaatttcttggagaagggggataaaattgcgaaggagagccagtttctcaaggaggagcttgtggctgctgtagaagatgttcgaaaacaaggtgatttgatgaaggctgctgcaggagagttcgcagatgatccctgctcttctgtgaagcgaggcaacatggttcgggcagctcgagctttgctctctgctgttacccggttgctgattttggctgacatggcagatgtctacaaattacttgttcagctgaaagttgtggaagatggtatcttgaagttgaggaatgctggcaatgaacaagacttaggaatccagtataaagccctaaaacctgaagtggataagctgaacattatggcagccaaaagacaacaggaattgaaagatgttggccatcgtgatcagatggctgcagctagaggaatcctgcagaagaacgttccgatcctctatactgcatcccaggcatgcctacagcaccctgatgtcgcagcctataaggccaacagggacctgatatacaagcagctgcagcaggcggtcacaggcatttccaatgcagcccaggccactgcctcagacgatgcctcacagcaccagggtggaggaggaggagaactggcatatgcactcaataactttgacaaacaaatcattgtggaccccttgagcttcagcgaggagcgctttaggccttccctggaggagcgtctggaaagcatcattagtggggctgccttgatggccgactcgtcctgcacgcgtgatgaccgtcgtgagcgaattgtggcagagtgtaatgctgtccgccaggccctgcaggacctgctttcggagtacatgggcaatgctggacgtaaagaaagaagtgatgcactcaattctgcaatagataaaatgaccaagaagaccagggacttgcgtagacagctccgcaaagctgtcatggaccacgtttcagattctttcctggaaaccaatgttccacttttggtattgattgaagctgcaagaatggaaatgagaaagaaatttaaggagtatgcccaagttttccgtgaacatgccaacaaattgattgagttgccaacttgggcctgttccatctcaaataatgaagaagtgtaaagcttgttcgaatgtctgcaagccagttagaagccctctgtcctcaggttatttaatgctgcactggctttagcagcaaaacca

SEQ ID NO: 185092 - DNA, 1534 bp, Homo Sapiens
  misc_feature (1326)..(1339): n is a, c, g, or t
ttggcttatatatttaaagatatacaagccatagtgtatatatatttaaagatatacactatggcttatatatcttaaggtgttgtttttaatttcaacaaaggcagggaaaggaattcttcgaacaatacgtgcctccaacaatgcccttgcagatcttgttcctgtagatgtagttgtcaacatgagtcttgcggcagcctggtattccggagttaatagaccaagaaacatcatggtgtataattgtacaacaggcagcactaatcctttccactggggtgaagttgagtaccatgtaatttccactttcaagaggaatcctctcgaacaggccttcagacggcccaatgtaaatctaacctccaatcatcttttatatcattactggattgctgtaagccataaggccccagcattcctgtatgatatctacctcaggatgactggaagaagcccaaggatgatgaaaacaataactcgtcttcacaaagctatggtgtttcttgaatatttcacaagtaattcttgggtttggaatactgagaatgtcaatatgttaatgaatcaactaaaccctgaagataaaaagaccttcaatattgatgtacggcagttacattgggcagaatatatagagaactactgcttgggaactaagaagtacgtattgaatgaagaaatgtctggcctccctgcagccagaaaacatctgaacaagttgcggaatatacgttatggttttaatactatccttgtgatcctcatctggcgcatttttattgcaagatcacaaatggcaagaaatatctggtactttgtggttagtctgtgttacaagtttttgtcatacttccgagcatccagcactatgagatactgaagaccaaggattcagcattagaacatctatacatatggtgatctaaatgtacaaaatgtaaaatgtataagtcatctcactttttgtcaagacattaaaccatcttagatcggagtgtgaagtaaattatggtatattttatgtaacattttaatgtttatgctcataaaacttagtgaacacactgtgttatgccagctcaaatctacagtagccaccaaaaccatgacttaatattttgagccctagaagaaaggggtgtgctgaggacaagagtggggaaataggaacactgaccagtataactgtgcaattctggaacatattaattaaaataatatgccttaacatatagtgaatttctaattctaatgttcagtgcaatggaagacatttatttggacagtaatactagcaaagttggtagatatttgattcttcannnnnnnnnnnnnncattagttgaagtgggttttagttttgtttaaaattataaccagcgtattttcacatcattctgtaagttaaatgatatcaaacatgaaagagatgttctcatttttctttttctgattaaacgtctgatgcatatcatttttctataagtaatcagttgcttttaaatcagaagctatattattctaatgaccc

SEQ ID NO: 185093 - DNA, 1539 bp, Homo Sapiens
  misc_feature (99)..(112): n is a, c, g, or t
ttggcatatagtgaatttctaattctaatgttcagtgcaatggaagacatttatttggacagtaatactagcaaagttggtagatatttgattcttcannnnnnnnnnnnnncattagttgaagtgggttttagttttgtttaaaattataaccagcgtattttcacatcattctgtaagttaaatgatatcaaacatgaaagagatgttctcatttttctttttctgattaaacgtctgatgcatatcatttttctataagtaatcagttgcttttaaaatcagaaggctatattattctaatgaccctattcgatctaaatgggtttgagaatccatatcagcaacatacgtgttttttgacagaaagtgaaaacaaattccgtaaaactgttagtatcaaaaagaataggaatacagttttcttttccacattatgatcaaataaaaatcttgtgagattgtttatgttttgaagcaggaggatttcttgagatttgatggaagtgggagttgggaaggattcaccatacttgtgttctcctccctttataaattttattcataggacttttaaaaggcttgtgctatctttccagtgaaaactgaaagtgcattattatggaagaatgtatttgcaggtagtaatagcattaaaaaatatactcgtgtgtaaacacatactaattttgaccttgaaagatgaattccttcaagaaaaataaaataatgcttaagataatgtgtacgaaattaaataaaggactttatttacatactacataaggtagcaaactgttgaatgagtttgaaggtatcacttattttttatgcatgtggttttagctttagaaagaaatgcgttatagaaacaagtaatagcaagaaaattgatgtatattttaatgatacattaaaattcccttttaatcataatagttaactctacttactgttttaacatacatttgatttaacaaattgttcagcataacacttctaattaagtttatcaagttgtactgtattagataatcagcagtgtatctggtatgtttaaagagaacagttcgcaatacaaaaagttacatggagctttacatcttaactttctttgtcaatttaaatgcaatgtataaaaagtttattttgctattgtgaaaaactaaatgtaaaggaaatcacctactttcatgcaggtgtataatcttgaaaaggaaaaatgcttccatgttgaagccagattttctgtagtaaaacttttaaatattattttaaaagaaatatgtatataaatatctctatattctttggaatgatactaaagtctctggtctaggaccataccttatataaaggtataagagaccatgacaatgtctgaaaatggaatagataatgatgccttttatttaaagtggcccaccataatatacattgagtactccatctctccaaatgtatttccataatgtgttgaaaacatgctaacatttgtatgatttttatacttctgccgaatagacttacaatcataac

SEQ ID NO: 185094 - DNA, 1752 bp, Homo Sapiens
ctttgtacaaaaaagttggaaaagtttatttcccctattgtgaaaaactaaatgtaaaggaaatcacctactttcatgcaggtgtataatcttgaaaaggaaaaatgcttccatgttgaagccagattttctgtagtaaaacttttaaatattattttaaaagaaatatgtatataaatatctctatattctttggaatgatactaaagtctctggtctaggaccataccttatataaaggtataagagaccatgacaatgtctgaaaatggaatagataatgatgccttttatttaaagtggcccacataatatacattgagtactccatctctccaaatgtatttccataatgtgttgaaaacatgctaacatttgtatgatttttatacttctgccgaatagacttagaatcagatgaattgtctgtgtgtcttgcaaaagagttggggacaacttgggcaggcctatgaagtgcatagggagtgtatgtcttctgaatggttttattgttcttgtaatctagcttaaagaaatgttaactgggagggtgctgaggccactcactgcattaattttgtgtgtttagagttctgttgtcaaaagaaaactaatgaataaattagtttgtcattctagaatttaaagttctaagattagtataaagagtatatagattgttaatccccaccagctagactttgaacttaagtcagacttaaagatttgagaaattatttgtgtcatttactagacgtgatttttagttctgtttgattatatttcctacacaaacttcttatttaacaggatagcctactaaattaaatgtttcttatttcacttaactcatttgattaaactgtattctaaaacatttggggtttttccccctattcagttttaatcttggaatatgcatttgtaaattgtgatgtcattgagactatatttatatttgacttggcaacattaacatgtcctaagacttagtgcagagaagcttggcagtacgttctttgacttaaggatggcataaaataatcatttttgaacctgtgtaataaagcttgaaagcagggaaaagaatttccttttcccccttttttgtgttgtctataggaattaacttgggattgttttgtgggtttttgtttgttttaaatgtaaattgagaatcttttataagaaataaaagcattattgggtgcctttgtttgtaaaccaaaaagtaataaatgaatccctatatttccattatagtatttattgtatttttatgttctgaaaattacccatggaacaatatgcttaggattacaggaagcagtccttacttacacttcttgtctgttttaggtgtacttgttaattcttatgtcctaattttatttaattctgagttccttacacagcattttagggaaagaatacaggcaggatgacactttgtgttaaagtgttatttttatgtattacctggaatgaggcaggtttttttctgttttctaaaaagagtaaccaagatacctccagggtgtcattgggttccagctgctctcctccacattgaatgatatcttgttaatttataggcacatttgtggtaatttatatgtctatagagtaagtataagagataattcattagtaataggaattaactgaccccttttggatgggggagagcatcacggctggggtcagtaagtgtaaatggccttctgagcatgctcttctaggctgactccc

SEQ ID NO: 185095 - DNA, 623 bp, Homo Sapiens
gctaattgttgtagatcatcacttcaaggtgcccatatctttctagtggaaaaattattctggcctccgctgcatacaaatcaggcaaccagaattctacatatataaggcaaagtaacatcctagacatggctttagagatccacatgtcagaccccatgtgcctcatcgagaactttaatgagcagctgaaggttaatcaggaagctttggagatcctgtctgccattacgcaacctgtagttgtggtagcgattgtgggcctctatcgcactggcaaatcctacctgatgaacaagctggctgggaagaacaagggcttctctgttgcatctacggtgcagtctcacaccaagggaatttggatatggtgtgtgcctcatcccaactggccaaatcacacattagttctgcttgacaccgagggcctgggagatgtagagaaggctgacaacaagaatgatatccagatctttgcactggcactcttactgagcagcacctttgtgtacaatactgtgaacaaaattgatcagggtgctatcgacctactgcacaatgtgacagaactgacagatctgctcaatgcaagaaactcacccgaccttgacagggttgaagat

SEQ ID NO: 185096 - DNA, 1697 bp, Homo Sapiens
ttggcatctttttccttgcacacaagggaacaacaccctggacatggctccagagatcaacttgccgggcccaatgagcctcattgataacactaaagggcagctggtggtgaatccagaagctctgaagatcctatctgcaattacgcagcctgtggtggtggtggcgattgtgggcctctatcgcacaggcaaatcctacctgatgaacaagctggctgggaagaaaaacggcttctctctaggctccacagtgaagtctcacaccaagggaatctggatgtggtgtgtgcctcatcccaagaagccagaacacaccctagttctgctcgacactgagggcctgggagatatagagaagggtgacaatgagaatgactcctggatctttgccttggccatcctcctgagcagcaccttcgtgtacaatagcatgggaaccatcaaccagcaggccatggaccaacttcactatgtgacagagctgacagatcgaatcaaggcaaactcctcacctggtaacaattctgtagacgactcagctgactttgtgagcttttttccagcatttgtgtggactctcagagatttcaccctggaactggaagtagatggagaacccatcactgctgatgactacttggagctttcgctaaagctaagaaaaggtactgataagaaaagtaaaagctttaatgatcctcggttgtgcatccgaaagttcttccccaagaggaagtgcttcgtcttcgattggcccgctcctaagaagtaccttgctcacctagagcagctaaaggaggaagagctgaaccctgatttcatagaacaagttgcagaattttgttcctacatcctcagccattccaatgtcaagactctttcaggtggcattgcagtcaatgggcctcgtctagagagcctggtgctgacctacgtcaatgccatcggcagtggggatctaccctgcatggagaacgcagtcctggccttggcccagatagagaactcagccgcagtggaaaaggctattgcccactatgaacagcagatgggccagaaggtgcagctgcccacggaaaccctccaggagctgctggacctgcacagggacagtgagagagaggccattgaagtcttcatgaagaactctttcaaggatgtggaccaaatgttccagaggaaattaggggcccagttggaagcaaggcgagatgacttttgtaagcagaattccaaagcatcatcagattgttgcatggctttacttcaggatatatttggccctttagaagaagatgtcaagcagggaacattttctaaaccaggaggttaccgtctctttactcagaagctgcaggagctgaagaataagtactaccaggtgccaaggaaggggatacaggccaaagaggtgctgaaaaatatttggagtccaaggaggatgtggctgatgcccttctacagactgatcagtcactctcagaaaaggaaaaagcgattgaagtggaacgtctaaaggctgaatctgcagaacctgcaaagaaaatgttggacgaaataccaaagaacaatgacgagatgatggaacagaaagagaacagttatcaccccacatgtgaaacaattgactgagaagatggacagggatactgcccacttaatggcagaccaagacacgaccctcgctcttaaac

SEQ ID NO: 185097 - DNA, 946 bp, Homo Sapiens
caaaggtgaaagaacaagaaacttgttctagaacaatgacaaatgtaatttaaaataacatctattaatttggatattcagcaagtattaatttctaggaatagccagctgaagacatagaaaactgcaaatgctggaaaactagcaatagtaaactgaaaaatgataatttcttgtgttttctcatcctcatttatcagttgaagctctctgttacctttcttcagcttcagggagtatgtcaggtactcatctggtgtgaggggttgtccatctgcttccaagtccagggagaaatctctcagtgtccacacaaagtctgggaagaagctcacaaagtcagctgaatcctcaacctcattctcattctcatcaggtgaggattttgatcggattctatgtgtcagctctgtcacatagtacagttggtccatagcctgctggttgatggttcctatgctattgtacacgaaggtgctgctcaggaggacggccagggcgaagatccaggagtcattctggttgtcacccttctctacatctcccagaccctcggtgtccagcagaactaggatgtggcctggcttcttggggtggggcacacaccacatccagattcctttagtgtgagactgcaccgtggagcccagagagaagccctttttctttccagccagcttgttcatcaggtaggatttgcctgtgcggtagaggcccacaattgccaccaccaccataggctgtgtaatggcagaaaggatcttcagagcttctggattcgccatcagtcgcccattagtgttctcaatgaggcacattgggcctgtcatgtggatctctgatgccatgtccaggctgttcccttgtctgttctttttctccttagttcacgagcactggcttctagcacttctgtgtctctcactggatccctggactaatccaa

SEQ ID NO: 185098 - DNA, 992 bp, Homo Sapiens
ttggccattacaaaggttgcttaacttctaattatttgatcactgaggaaaatccagaaagctacacaacactgaaggggtgaaataaaagtccagcgatccagcgaaagaaaagagaagtgacagaaacaactttacctggactgaagataaaagcacagacaagagaacaatgccctggacatggctccagagatccacatgacaggcccaatgtgcctcattgagaacactaatggggaactggtggcgaatccagaagctctgaaaatcctgtctgccattacacagcctgtggtggtggtggcaattgtgggcctctaccgcacaggaaaatcctacctgatgaacaagctagctgggaagaataagggcttctctctgggctccacagtgaaatctcacaccaaaggaatctggatgtggtgtgtgcctcaccccaaaaagccagaacacaccttagtcctgcttgacactgagggcctgggagatgtaaagaagggtgacaaccagaatgactcctggatcttcaccctggccgtcctcctgagcagcactctcgtgtacaatagcatgggaaccatcaaccagcaggctatggaccaactgtactatgtgacagagctgacacatcgaatccgatcaaaatcctcacctgatgagaatgagaatgaggattcagctgactttgtgagcttcttcccagattttgtgtggacactgagagatttctccctggacttggaagcagatggacaacccctcacaccagatgagtacctggagtattccctgaagctaacgcaaggtaccagtcaaaagataaaaattttaatctgccccgactctgtatccggaagttcttcccaaagaaaaaatgttttgtcttcgatctgctcattcaccgcagaagcttgcccagcttgagaaactacaagatgaagagctggaccctgaatttgtgcacaagtagcagacttctgttcctacat

SEQ ID NO: 185099 - DNA, 976 bp, Homo Sapiens
ttggcccagccctacaacttcggaacagtgaaatattagtccagggatccagtgagagacacagaagtgctagaagccagtgctcgtgaactaaggagaaaaagaacagacaagggaacagcctggacatggcatcagagatccacatgacaggcccaatgtgcctcattgagaacactaatgggcgactgatggcgaatccagaagctctgaagatcctttctgccattacacagcctatggtggtggtggcaattgtgggcctctaccgcacaggcaaatcctacctgatgaacaagctggctggaaagaaaaagggcttctctctgggctccacggtgcagtctcacactaaaggaatctggatgtggtgtgtgccccaccccaagaagccaggccacatcctagttctgctggacaccgagggtctgggagatgtagagaagggtgacaaccagaatgactcctggatcttcgccctggccgtcctcctgagcagcaccttcgtgtacaatagcataggaaccatcaaccagcaggctatggaccaactgtactatgtgacagagctgacacatagaatccgatcaaaatcctcacctgatgagaatgagaatgaggttgaggattcagctgactttgtgagcttcttcccagactttgtgtggacactgagagatttctccctggacttggaagcagatggacaacccctcacaccagatgagtacctgacatactccctgaagctgaagaaaggtaccagtcaaaaagatgaaacttttaacctgcccagactctgtatccggaaattcttcccaaagaaaaaatgctttgtctttgatcggcccgttcaccgcacgaagcttgcccagctcgagaaactacaagatgaagagctggaccccgaatttgtgcaacaagtagcagacttctgttcctacatctttagtaattccaaaactaaaactctttc

SEQ ID NO: 185100 - DNA, 1001 bp, Homo Sapiens
ttggctttgtttcatattagtgcatttctttgcagaggttacctctttttcttgtctctcgtcaggtctctgacattgacagagcctggacgttggaggaagccccaggacgttggaggggtaaagtaaaagtccacagttaccgtgagagaaaaaagagggagaaagcagtgcagccaaactcggaagaaaagagaggaggaaaaggactcgactttcacattggaacaaccttctttccagtgctaaaggatctctgatctggggaacaacaccctggacatggctccagagatcaacttgccgggcccaatgagcctcattgataacactaaagggcagctggtggtgaatccagaagctctgaagatcctatctgcaattacgcagcctgtggtggtggtggcgattgtgggcctctatcgcacaggcaaatcctacctgatgaacaagctggctgggaagaaaaacggcttctctctaggctccacagtgaagtctcacaccaagggaatctggatgtggtgtgtgcctcatcccaagaagccagaacacaccctagttctgctcgacactgagggcctgggagatatagagaagggtgacaatgagaatgactcctggatctttgccttggccatcctcctgagcagcaccttcgtgtacaatagcatgggaaccatcaaccagcaggccatggaccaacttcactatgtgacagagctgacagatcgaatcaaggcaaactcctcacctggtaacaattctgtagacgactcagctgactttgtgagcttttttccagcatttgtgtggactctcagagatttcaccctggaactggaagtagatggagaacccatcactgctgatgactacttggagctttcgctaaagctaagaaaaggtactgataagaaaagtaaaagctttaatgatcctcggttgtgcatccgaaagttcttccccaagaggaagtgcttcgtcttcgattgacccgc

SEQ ID NO: 185101 - DNA, 1605 bp, Homo Sapiens
  misc_feature (382)..(396): n is a, c, g, or t
  misc_feature (579)..(587): n is a, c, g, or t
ttgggtaacttcgagggggaagctggagcagaagctgaaatgggccttcagcatgtacgacctggacggaaatggctatatcagcaaggcagagatgctagagatcgtgcaggcaatctataagatggtttcctctgtaatgaaaatgcctgaagatgagtcaaccccagagaaaagaacagaaaagatcttccgccagatggacaccaatagagacggaaaactctccctggaagagttcatccgaggagccaaaagcgacccgtccattgtgcgcctcctgcagtgcgacccgagcagtgccggccagttctgagccctgcgcccaccaatcgaattgtagagctgcttgtgttcccttttgattcttctttttaacaannnnnnnnnnnnnnngccaaacaatatcaatggtgatgccgtcccctgtgcggtctgatgcgccttcctccgtgacgccttcagcttcttttgtcgtggatgcttcgtgggaatgcccagagccccagtgtgcttgtggagagcatggacagacttcgtggtgttcattgtttgatgatttttaatcgttactattannnnnnnnnattctaatgtctctgttctaaaacgtaagactcgggggttggggcaaaagaagggaaacccatccagtcctgtgattctattgcaagcttcaaggggcttttgtttgaaagacaaaactccccacctgggtctgttgtcacacgtgccgtaggggtgatggatggcaccggatgctggattccccaagaacaagttaccctctggggtgaggctattccagcgagctgggacatttccccatgggggcccactcccctctcttccccagcaggctgtagtttctaagctgtgaacatttcaagataaattaacagaggagaggaaaaagatggctcagctattttttcacaggtttacactagttgagctaatatgcgtgtctttggaaattaaacacaaatggtaacatattccaaaaccagacccatcttgttgcctattgtgataaaataaaaagacggctgtatataacatattgggtaatgcagaccaaattaagtgttttgccttgtttaaatgaaatgcatgtttagtgagcactaatacaatcttattccagaagactgtttttagtagcttattgtgaagtaagacaactataatgaatgtctgtcttgtttggaagtcaaatctgtctttgcacaaatgtaccaatcgacaagtatattttatatattccataaaaatacaaagtaaccctgactagggcccaactttaattttgaatgcatttccagagtggccatgcctagagggcagatgcagagcaggtggtagtgggacaggacaattggagcacaggaatgttaacatgtatgacaggggaccagtaagtggtttccctctcacgcccagcagcccattgacagcattagactggcggcatggtgcttttctgagcagatcaatactctgcagactcgaaaaaacatcacgtacattcttggaacttcccagtgatttaatctgtgtgcatggttagggagccaggtctggaatattcagtttccctgcccc

SEQ ID NO: 185102 - DNA, 891 bp, Homo Sapiens
  misc_feature (766)..(779): n is a, c, g, or t
ttggatctggtggatgctggaccttgctgctgctgctactgctgtttccaggggctgcagagcatggactgttaaatcttgcacttcttctgagtgagctgaattcttgccgccaggatggggaaacagaacagcaagctgcgcccggaggtcatgcaggacttgctggaaagcacagactttacagagcatgagatccaggaatggtataaaggcttcttgagagactgccccagtggacatttgtcaatggaagagtttaagaaaatatatgggaactttttcccttatggggatgcttccaaatttgcagagcatgtcttccgcaccttcgatgcaaatggagatgggacaatagactttagagaattcatcatcgccttgagtgtaacttcgagggggaagctggagcagaagctgaaatgggccttcagcatgtacgacctggacggaaatggctatatcagcaaggcagagatgctagagatcgtgcaggcaatctataagatggtttcctctgtaatgaaaatgcctgaagatgagtcaaccccagagaaaagaacagaaaagatcttccgccagatggacaccaatagagacggaaaactctccctggaagagttcatccgaggagccaaaagcgacccgtccattgtgcgcctcctgcagtgcgacccgagcagtgccggccagttctgagccctgcgcccaccaatcgaattgtagagctgcttgtgttcccttttgattcttctttttaacaaannnnnnnnnnnnnngccaaacaatatcaatggtgatgccgtcccctgtgcggtctgatgcgccttcctccgtgacgccttcagcttcttttgtcgtggatgcttcgtgggaatgcccagaacccca

SEQ ID NO: 185103 - DNA, 3065 bp, Homo Sapiens
ttggcttgtgaatattcatgaagatttgtatactcttgtcattttttctcttaaagaccatcattaggatagatagatgcaaacaatctagaaacaatgcttatgatttctattatatgttatatttttcttaatgtggttaagttattaccatgcattcatgttctattaatggaaaatactttgattggattctcatctcgaggaggagctgtttcagagctggtgtgcgctattatgtaagaggaattgattcggaaggccatgcagctaactttgtagaaacagaacaaattgtgcactacaatgggagcaaagcttcgtttgtacagactcgaggatcaatacctgttttctggtcccaaagaccaaacctcaagtacaaaccactgccacagatcagcaaagtagcaaatcacatggacggtttccaaaggcattttgattcccaagtaattatttatggaaaacaagttataatcaatctgattaaccagaagggctcggagaagccacttgagcagacatttgcaacaatggtgtcttccttgggaagtggaatgatgagatacattgcctttgacttccataaggaatgtaaaaatatgagatgggatcgactaagtattttattggatcaggtagcagaaatgcaagatgaattaagttattttctagtggactctgctggccaggtggtggcaaaccaggaaggcgtgttccgaagcaattgcatggattgtctagatagaaccaatgtgatccagagtttgttagctcgtcgttcacttcaggcccaacttcagagactaggagttttgcatgtgggacaaaagcttgaagaacaagatgaatttgagaagattttcaaaaatgcctgggctgacaacgcaaatgcttgtgccaagcaatatgcgggaactggtgccttgaagactgactttaccagaactggaaagagaactcatttgggacttataatggatggctggaactcaatgatacgatattataagaacaacttttccgatggatttagacaagattccatagacttatttcttggaaactattcagtggatgaattagaatctcatagtcctttaagtgttccaagggactggaaattcctggctttgcctattatcatggttgttgccttttcaatgtgcattatctgtttgcttatggctggtgacacttggacagaaacactggcctatgtgctcttctggggagttgcaagcattggaacattttttatcattctttacaatggcaaagattttgtcgatgctcccagactggtccagaaagaaaagatagactgaatttgtatttgtggaaagcggcttggcttggaagattccattgtgcagaactggagtctttactgacccgctttccacatcagcccaaggtctttttaatgcctttatccaaaagcacatcttgtgctccatgcaggatgatgacagaattgatctgatgttactgccttgatggtctctttactattgggacagttagatttataatttgaagctattctgtaattaaaatataacctgaattcagcttgcagaatggaagctgaatctgttcattgtattctattgattgtcaatttaattagctgttgcagaataagtaatatattttaaaaacctagctcctttcattatttaaaacagcaaaattatttttgtagctcagtttcattattgtcattgtagaagcggtcactattagcaggcatacttttccacacatctttggacttttcttaaaagttcagtaataagctaactgtgtttataaaatgtaagtctcttacagacatcaagtagtttgatgagacagtctgtgacttcatgataggaaagaggaggatgaggtctggggttctttaaagtctctggtgggctgcctcatgactttaatcagcttgaactgccagtgcaccagcagtttaggtgtgatgagagaattcagatatactttatctttttaaaaaagtgtaaataaaatcaaagaatgtaaagtctatctcttacgctagaggtccaaagctgcctctgttttaaagattatcccaatgtggaagatgcccatgactggtcagctacttcctcctatacattttggtttctttgagggtcactcattgagacacgcaggcctctgagagggtcttgttctagatttcatattgcacttggagggtaacagctgctttttcacgcatggtactcttgatgtttttcactctgtcaaggattttgttggctatcaatgaatgtgtctaaaacttagtgcttccaggtagttatagtactccaaatcaaggaccaacttaaacgttaatttttgtgcaaaaacaaacctgaaaaatatgcttcggaaactgtgcatagttctaattgtaagtcagattgtatattcaaattgtaattaagagatttaaatattagaacggtatgtaaggtagtataattaccactattttaaaacaattcagttaaacactgctgcaatatttcagtgttgtgcttgaaaatatgtacagtttttttccaatattaataccttatgttgtccttaaatatttctaaaagcgcctttatttcagcattacctttttttcatcactatcttttataaaacattaatataagtcgttacttttagaaactaaaggaaataatagctggaaaaccctctgtagtttaaaatcagtcattaaactcacaatagggtaagtaaatatagccacctgttaacatgtaaataagcataatttgttccaaagagggaatattgaaacttagttcatgtctgctgtaaaatattatttaaatgctgctgggcatttcacttaaagaacttaatgtcaacagctacaacaaagaccaaatctgaactgctaatgtggctgctttgtagggaatggactaatatcagtgtgttagatcttaggggatcagtatttgagagtcgtgcgacgattttatttctaaattcatgtactgtatgtccataggtgaagataaagtgtcatattc

SEQ ID NO: 185104 - DNA, 1121 bp, Homo Sapiens
ttggcaggatggcgacggcggcctacgagcagctgaagctgcatatcacacctgaaaaattttatgtggaagcttgtgatgatggagcagatgacgtacttaccattgaccgtgtgtccacagaggttacccttgcagtcaagaaagatgttcctccttcagctgtcacaagaccaatatttggtatactgggcacaatccatctggtggcaggtaattatcttatagtcattaccaaaaagataaaagtaggtgaatttttcagtcatgtagtctggaaagcaacagattttgatgtcctttcttataagaagacaatgttgcacttaactgatattcagttacaagataataaaaccttcctagcgatgctaaaccatgtcttgaatgtggatggattttacttttcaacaacatatgatttgacccatactttgcagcggctatccaacactagtcctgaattccaagaaatgagtctcttggaaagggcagatcagcggtttgtatggaatggtcatcttctaagagaactttctgcacagccagaggttcatcggtttgcccttccagtgttacatggctttattaccatgcattcatgttctattaatggaaaatactttgattggattctcatctcgaggaggagctgtttcagagctggtgtgcgctattatgtaagaggaattgattcggaaggccatgcagctaactttgtagaaacagaacaaattgtgcactacaatgggagcaaagcttcgtttgtacagactcgaggatcaatacctgttttctggtcccaaagaccaaacctcaagtacaaaccactgccacagatcagcaaagtagcaaatcacatggacggtttccaaaggcattttgattcccaagtaattatttatggaaaacaagttataatcaatctgattaaccagaagggctcggagaagccacttgagcagacatttgcaacaatggtgtcttccttgggaagtggaatgatgagatacattgcctttgacttccataacgaatgtaaaaatatgagatgggatcgactaagtattttattggatcacgtagcagaaatgcaagatgattaagttattttctagtgg

SEQ ID NO: 185105 - DNA, 938 bp, Homo Sapiens
ttggcgaaggatccgctcggagctgtttgtccagctgtttctattcgcacccggagcagtacagccagaagggggccgagccgaaggtggctggctttaggcgctaatttccaactcttttcctcacagcttgtcttttccaggcaccctggagtcccctcaggccagctcggtgggcgcgcacctgccagccgcccctgacctcgcaggccaggcgacctccgagcctgagaagatggcccagtccaagctcgattgccgctcacctgtcggcctcgactgctgcaactgctgcctggacctggcccatcggagtgggctccagcgaggcagcagcggggagaacaacaacccgggcagccctacagtgagcaactttcggcagctgcaggaaaagctggtctttgagaacctcaataccgacaagctcaacagcataatgcggcaggattcgctagagccggtgctgcgggacccctgctacctgatcaacgagggcatctgcaaccgcaacatcgaccagaccatgctctccatcctgctcttcttccacagtgcctccggagccagcgtggtggccatagacaacaagatcgaacaggccatggatctggtgaagaatcatctgatgtatgctgtgagagaggaggtggagatcctgaaggagcagatccgagagctggtggagaagaactcccagctagagcgtgagaacaccctgttgaagaccctggcaagcccagagcagctggagaagttccagtcctgtctgagccctgaagagccagctcccgaatccccacaagtgcccgaggcccctggtggttctgcggtgtaagtggctctgtcctcagggtgggcagagccactaaacttgttttacctagttctttccagtttgttttggctccccaagcatcatctcacgagagaacttt

SEQ ID NO: 185106 - DNA, 2233 bp, Homo Sapiens
ttgggtgtgattctgatttatgtgaaatgaatgcagggatgccaaaaggaaacctaaatgaacaagatccaaaacattgtcctgaaagtgaaaagtgtttgctttccatagaagatgaggaatctcaacaaagcattttatcaagtctggaaaaccattcacagcagtcaactcaaccagaaatgcataaatatggtcagttagttaaagtagaattagaagaaaatgccgaagatgataaaactgaaaaccaaatccctcaaagaatgactagaaacaaagcaaatacaatggcaaatcaaagcaaacagattcttgctagctgtacactattatcagaaaaagacagtgaatcctcatctcctagaggaagaataagattaactgaagatgacgatcctcaaattcaccatccacggaaaaggaaagtgtcacgtgtacctcagcctgtgcaagtgagtccctctttactacaagcaaaagagaaaactcagcaatctctggcagccattgtagattctctaaaactagatgagattcagccatacagttcagagagagcaaatccatattttgaatacttgcacataaggaaaaaaatagaagaaaaacgcaaattactgtgtagtgtgattcctcaagcacctcagtactatgacgaatatgtaacatttaacggatcatatctcctggatggaaaccccttaagcaagatttgtattcccacaattacaccaccaccttcactgtcagatccacttaaagagctttttcgacaacaggaagttgtaaggatgaaactacgtttgcaacacagtattgaaagggaaaaactcattgtatccaacgaacaagaagttttgcgagttcattacagagctgcaagaacattggcaaatcaaacactgccatttagtgcttgtactgttttgctggatgccgaagtatacaatgtaccattggactctcagtctgatgacagtaaaacttctgtgagggatcgctttaatgcaagacaattcatgtcttggttacaagatgtggatgataaatttgacaaattaaagacctgtcttttaatgaggcaacaacatgaagctgcggctttaaatgctgtccagaggttagaatggcagctcaaactccaggaacttgatcctgccacctataaatctatcagcatttacgaaatccaggagttttatgttccccttgttgatgttaacgacgactttgaattgactcctatatagcagtcagtacttcctgatggtattgtcctaaactggtgatgctcaagcattatactgtggaatactgccttttgacaaaaatactcatgcctttacaattgttagtaaagttcgattatagttggttatgtagtaaacactgtcattttataaaaaatgagaattattttggatcttagatccaaacacagtttctaatagaaaactattatttatattgggaaaggtaactattgcattagagcatgttggcagactggtaggtatttaaaaagttgagaatctgctaacagcgctggaagttgttagcgctctaagtaataagataaccactagtattcaaatctctttcaggttttattaaaaaatatatatcaataaactaaaaggttcaattcctaccaaatagtttctaatgtgggagaaaaacttggcacaaaatttcttcagtttattatctgtaaattgtacagttttctttttgaaagttttaatattgtcttcctttttaataacttattttatacatattgtgcagatgtaaatcttgtaattaatggtcaaactgtataaagggattggtagtcaaaacatgtacaaagaaatacctgtaaaactgttttgtctcatgttttattggaccaaagttgtggtttgtatggagtgtagtagtagtgtgtacaggtagaaaacttttaaatacagcatgcaggtgtttcagttagcttgttttcatcaccataactgcaaagatgtggcttagttgtattgcatgcttcctataatttaactctccataattgatgcctgcagtagtgtaaggcatttcatactagtctcctctagtagacctgtgacttactgtgttggacatattatttagacttagtcatacaaagaaacttagctcttttttcatctcacagtaaagcctatttccccaggaaaaaaataaatggcctttgaatgaaaattctgaa

SEQ ID NO: 185107 - DNA, 2217 bp, Homo Sapiens
ttggctgcagtggcggcgcttcgttttcttcgacaaggagctggtgaaggagccgctgagcaatgatggggccgctcccggggccacacctgcttctggatccgctgcttccaagttcctttgcctccctcctggcatcactgtctgcgactcaggccgagggagcctggtctttggagatatggaaggccagatctggttcttgccacgttccctacagcttacaggcttccaagcctacaaactacgggtgacacacctgtaccaactgaagcagcacaatattctggcatctgttggagaagatgaagagggcatcaaccccttggttaagatctggaacctggagaagagagatggtggcaatccactctgcactcgaatcttccctgctattccaggaacagagccaactgttgtatcttgtttgactgtccatgaaaatctcaactttatggccattggtttcacagatgggagtgttacattgaacaaaggagacatcacccgggaccggcatagcaagacccagattttgcacaagggcaactatcctgtaactggattggcctttcgccaagcaggaaagaccactcacttgtttgttgtgacaacagagaacgtccagtcctatatagtttctggaaaagactaccctcgcgtggagttggacacccatggttgtggcctgcgctgctcagccctaagtgacccttctcaggacctgcagttcattgtggccggggatgagtgtgtctacttgtaccagcctgatgaacgtgggccctgcttcgcctttgagggccataagctcattgcccactggtttagaggctaccttatcattgtctcccgtgaccggaaggtttctcccaagtcagagtttaccagcagggattcacagagctccgacaagcagattctaaacatctatgacctgtgcaacaagttcatagcctatagcaccgtctttgaggatgtagtggatgtgcttgctgagtggggctccctgtacgtgctgacgcgggatgggcgggtccacgcactgcaggagaaggacacacagaccaaactggagatgctgtttaagaagaacctatttgagatggcgattaaccttgccaagagccagcatctggacagtgatgggctggcccagattttcatgcagtatggagaccatctctacagcaagggcaaccacgatggggctgtccagcaatatatccgaaccattggaaagttggagccatcctacgtgatccgcaagtttctggatgcccagcgcattcacaacctgactgcctacctgcagaccctgcaccgacaatccctggccaatgccgaccataccaccctgctcctcaactgctataccaagctcaaggacagctcgaagctggaggagttcatcaagaaaaagagtgagagtgaagtccactttgatgtggagacagccatcaaggtcctccggcaggctggctactactcccatgccctgtatctggcggagaaccatgcacatcatgagtggtacctgaagatccagctagaagacattaagaattatcaggaagcccttcgatacatcggcaagctgccttttgagcaggcagagagcaacatgaagcgctacggcaagatcctcatgcaccacataccagagcagacaactcagttgctgaagggactttgtactgattatcggcccagcctcgaaggccgcagcgatagggaggccccaggctgcagggccaactctgaggagttcatccccatctttgccaataacccgcgagagctgaaagccttcctagagcacatgagtgaagtgcagccagactcaccccaggggatctacgacacactccttgagctgcgactgcagaactgggcccacgagaaggatccacaggtcaaagagaagcttcacgcagaggccatttccctgctgaagagtggtcgcttctgtgacgtctttgacaaggccctggtcctgtgccagatgcacgacttccaggatggtgtcctttacctttatgagcaggggaagctgttccagcagatcatgcactaccacatgcagcacgagcagtaccggcaggtcatcagcgtgtgtgagcgccatggggagcaggacccctccttgtgggagcaggccctcagctacttcgctcgcaaagaagaggactgcaagagtatgtggcagctgtcctc

SEQ ID NO: 185108 - DNA, 1457 bp, Homo Sapiens
ttggtgtcttctgtctttacccagagctaccatgagcaagcggaaccaggtatcgtacgtgcggccagccgagccggcgtttctggcccgcttcaaggaacgggtcggctacagggagggacccaccgtagagactaagagaattcagcctcagcccccagatgaagatggggatcacagtgacaaagaagatgaacagcctcaagtggtggttttaaaaaagggagacctgtcagttgaagaagtcatgaaaattaaagcagaaataaaggctgccaaagcagatgaagaaccaactccagccgatggaagaatcatatatcgaaaaccagtcaagcatccctcagatgaaaaatattcaggtttaacagcaagctcaaaaaagaagaagccaaatgaagatgaagtaaatcaggactcggtcaaaaagaactcacaaaaacaaattaaaaatagtagcctcctttcttttgacaacgaagatgaaaatgagtaagtgtaaatattttgaatttagtctactttgaaagtatatggagtgttcattaaaatcacattttttcctattataaagatactacaagttctttatagaaagtttaggaaatagagaaaaaaatttaataaactacatctattcatcaatacccctctgacttaaaatgccaactctatagaaattagctagtattaacattttgttatttcccttgtgtggttgtatatatatgtaaattatatttttaagcaaaatacattttttgtgtgtaaacaaaattttataaatacaactgtattgcaaatgttctttgtcctgcttctcacttgacattgcattatgagtattcttccaggtcagtaaatttcaaaaacctgacattaatagctacagataatttcataaacatctcattgtatctttttcattagcaatagctccactttgggtgggggagatgataatgtgccttgttaaaaatacctccccaactcctgctaagggtggccatgagactcagctctggcaagttaagaaatacaggtggaattctgcttgataaagctgctgggttttttgttacaaaaggacagacttggcaaacatgagcctttgctcttatcttttcatcctacttggagtgcagagataaaacctgagtaccagagccacttttaggcataaggaaggcagccatgtgctttgggtcatgttagtaaaaagactcagagcttggctccttgctgacatgcctggaggagctgctacaccagcttggattgctgacctctgacttcttggtagtgagaagaataaacactgtgcttaattagccttggtcaatttcttttatatgcagccaaatgcagtcctaagtaatacaataaataactggtcaaactgttactggtggagggtgtccaggttcttggcattttggacaaataattgaacaaaa

SEQ ID NO: 185109 - DNA, 1188 bp, Homo Sapiens
  misc_feature (962)..(987): n is a, c, g, or t
ttggggtacgttcttcagatgtgtcatggtctgatactcgtaggaccctccgaaaagatcaccgctgggaatctggatccttattggaaagagaggagaaagagaagctttttaatgaacacattgaagcacttaccaaaaaaaagagagagcactttaggcaacttctggatgaaacttctgcaattaccttaacatccacgtggaaagaagtaaaaaaaatcattaaggaagatcctcgatgtattaagttctcctccagtgacaggaaaaaacaaagagaatttgaagaatatatcagagacaaatatatcacagccaaagctgacttcaggacgcttttgaaagagaccaaatttataacatatagatccaaaaaattaatccaagaatcggatcagcacctgaaagatgtagaaaaaattttacagaatgacaaacggtatctagtactggactgtgtgccagaggagaggcgtaaactgattgtggcatatgttgatgacctggatcgccggggtccacccccacctcccacagcatcggagcccacgagacgatcaacaaaataattctaaatactcttccataggggcatctattcaaaatgcttgcatgagccaattttcaggtttttacatatatgtgcattagtcaacctattgcgaaaccatctgacaaacagaaggagaagcatttgtgaacagtttctgaacagaacactttggaaatatttatgcttttctttgtgtggcatgactgacatacatactcaaatataggctgtctctagtaaatcttaaaatcttgaagctaaaattcatccttttatgaggtgtggaagtcagtgacttggtgacgttcttcctagcagtgttaatacatgcaagaagtaagagcatttgtggcttgaacttgccagatgcaaataccacagactccaagaaaacccgagttggggnnnnnnnnnnnnnnnnnnnnnnnnnnaaagcgggtaaaagagaaaacactgaaaattgaattcttatcttccagaggctacaattattataatggacaatacttttacctttgtctctaaagatcagattaggttttatttgttcacttacgtgctttgattatcccctctgaattatagaccgagtcttgttgtttagcctaagagaagatttatgtagtaatttc

SEQ ID NO: 185110 - DNA, 1554 bp, Homo Sapiens
ttggcaacttaaaagcctctctgccagcaccctgtccatgtcatctgggagcagcctgggttccctggcatcgagtcggggctctctgaacacctccagcagagggtcactcaactccctcagttccaccgaactctattacagcagtcaaagtgatcagatagatgtggattatcagtataaactggacttccttctgcaagagaaaagcggttacattccttctggacccatcaccaccatccatgaaaacgaggtggtcaagtcccctagccagcctggccagagtggactctgtggagtggcagctgcagcaacaggccacactcctccactggctgaggccccgaagtctgtggcctccctgtcctcgaggtcctccctttcctccttgtctcctccaggctctcccttggttttggaaggcacgtttcccatgtcttcttctcatgatgcctctctccatcagttcactgctgactttgaagactgtgagttgagtagccattttgcagatatcagcctcatcgaaaatcagattttgctggattctgattcaggaggagcctcccagtctctttcagaggataaagaccttaatgaatgtgctagggagccattatatgaaggaactgcagatgtggaaaaatcattaccaaaaagaagagtgatccacttgcttggggagaaaaccacttgtgtgtcggctgctgtgtctgatgagtctgtggctggagacagtggggtctatgaagctttcgtgaaacaacctagtgaaatggaagatgtcacatacagtgaagaggatgtagccattgtagagaccgcccaggttcagataggactcagatacaatgcaaaaagttcaagtttcatggtgattatagcacagctccgaaaccttcatgccttcttgatacctcatacttcaaaagtatattttagggttgccgttcttccttcctcaactgatgtcagctgtctgtttcgcacaaaagttcatccgcccacagaatccattttattcaatgatgtgttcagagtcgccatttcccaaacagccttacaacagaagacactgagggtagacctttgctctgtcagtaaacaccgaagggaagaatgcctggctggaactcagatcagcctggcagatttaccattttccagtgaggttttcactctatggtataacttgcttccttccaagcaaatgccttgcaaaaagaatgaagaaaatgaggactctgtatttcaaccaaaccagccgttagtagattctatagacttggatgcagtgtcagccttacttgcaagaacatcagctgagttgttagctgtggaacaagaattagcacaagaagaagaagaagaatcacacaagaagagccaaggggcccagatggagactggctaacaatgctaagagaggcctctgatgaaattgtggctgaaaaagaggctgaagttaaattgccagaggacagtagctgtacagaagatttaagttcatgcactagtgtgcctgagatgaatgaagatgggaacaggaaa

SEQ ID NO: 185111 - DNA, 2663 bp, Homo Sapiens
ttggcattcctattttggaaaagcttgcaccttctgaggatgaacttacttgcttttctaaaacatctctccttccaatcgatgagacaaatccagatttggaagagaaaatggaaagttcttttggttcaccatctaaacaagaaagtagtgagagtttgccaaaagaagcctttctggtcctctctgatgaagaggatatttcgggtgaaaaagatgagtctgaagttatatcgcaaaatgaaacgtgctctccagaagtagaaagtaatgaaaaggacaacaaacctgaggaagaagagcaagtaatacatgaagatgatgaaagaccttctgagaaaaatgaattttctagacgaaaacgttctaaatcagaagacatggacaatgtacagtctaaacgtcgtcgatatatggaagaagaatatgaggcagaatttcaagtaaagattacagccaaaggagacattaaccagaaacttcaaaaggttatacagtggttgctggaagaaaaattgtgtgcgctgcagtgtgctgtatttgataagactttggcagaattgaaaacacgagtggaaaagattgaatgtaacaagaggcataaaacagttctcactgaactacaggccaagatagccaggttaaccaaacgctttgaagcagccaaagaagatcttaagaaaagacatgaacatccacccaacccaccagtatcaccaggaaaaactgtaaatgatgtcaacagcaataataacatgtcttacagaaatgcaggcacagtgagacagatgctggagtccaaaagaaatgtaagcgagagtgcaccaccatcctttcaaactcctgtgaatacagtatcttcaaccaatcttgtcactcctccagcagttgtcagtagtcaacctaaattgcagactccagtgacttcgggttccctcacagcaacgtcagttcttcctgcacccaatacagctactgtagttgctactactcaggtgcctagtggaaatccccagcctacaatctctttacagcctttgccagtgattttgcatgtacctgttgcagtatcctcccagcctcagcttctacagagccatccagggactttggtgactaatcaaccatctggcaatgttgaattcatttctgtgcaaagcccacctacagtgagtggtcttaccaaaaatccagtatccttgccatccttgccaaatcccactaaaccaaacaacgttccttctgtgcccagtcctagtattcaaaggaaccctactgccagtgctgcaccattgggaacaacacttgctgtgcaggctgttccaacagcacactctattgtacaagccacaaggacttctttacccacagtgggcccatcaggactctatagtccatcaactaatcgaggtcctatacagatgaaaattccaatttctgcatttagtacttcgtctgctgcagaacagaacagcaataccaccccaagaattgaaaaccagacaaacaaaacaatagatgcttctgtcagtaagaaagcagctgatagcacatcacagtgtggaaaagccactggcagtgattcaagtggtgtcattgatctcacaatggatgatgaagagagtggagcttcacaagaccccaaaaaactaaatcacactcctgtatcaaccatgagttcttctcagcctgtgtcacgaccattgcaacccatacaaccagcaccgcctcttcaaccatctggggtgccaacaagtggaccatctcagaccaccatacacttactacctacagctccaactaccgtgaatgtaacacatcgtccagtaactcaggtgaccacaagactccctgtaccaagagctcctgcaaaccaccaggtggtttatacaactcttcctgcaccaccagctcaggctcccttgcgaggaactgttatgcaggctcctgctgttcggcaggtcaatccccaaaatagtgttacagttcgagtgcctcaaacaaccacatatgttgtaaacaatggactaaccctgggatcaacaggacctcagctcacagtgcatcaccgaccaccacaagtgcatactgagcccccacgccccgtgcacccagcacccttaccagaagctccacaaccacagcgtctgcccccagaagctgccagcacatctctgcctcagaagccacacttgaagttagcacgcgttcagagtcaaaatggcatagtactgtcatggagtgtcctggaggtggatcgaagctgtgccactgttgatagctaccatctctatgcttaccatgaggaacccagtgccactgtgccctcacaatggaaaaagattggggaagtcaaggcacttcccttgcccatggcatgtactctcacccagtttgtatctggtagcaaatactactttgcagtacgagccaaggatatttatggacgttttgggcctttctgtgatcctcagtcaacagatgtgatctcttctacccagagcagttaaaccttggagcctttatattttcctcttttaaaatttccaccttttggtcttgtttttaatcttgtgcatgataccccatgtaaaatccaccttgtgcaagatttcttggacagatgtgtgtatacactacatttgtttataaccagaagcaaa

SEQ ID NO: 185112 - DNA, 951 bp, Homo Sapiens
ttggctctcccaagagctacgcggcggcggcggagcgcaggcctcgtgccgttacggccatcacggcggccgcagtggcgtcctggagccctcctcagtgctgaagctgctgaaagatggcagaagaagtggtggtagtagccaaatttgattatgtggcccaacaagaacaagagttggacatcaagaagaatgagagattatggcttctggatgattctaagtcctggtggcgagttcgaaattccatgaataaaacaggttttgtgccttctaactatgtggaaaggaaaaacagtgctcggaaagcatctattgtgaaaaacctaaaggataccttaggcattggaaaagtgaaaagaaaacctagtgtgccagattctgcatctcctgctgatgatagttttgttgacccaggggaacgtctctatgacctcaacatgcccgcttatgtgaaatttaactacatggctgagagagaggatgaattatcattgataaaggggacaaaggtgatcgtcatggagaaatgcagtgatgggtggtggcgtggtagctacaatggacaagttggatggttcccttcaaactatgtaactgaagaaggtgacagtcctttgggtgaccatgtgggttctctgtcagagaaattagcagcagtcgtcaataacctaaatactgggcaagtgttgcatgtggtacaggctctttacccattcagctcatctaatgatgaagaacttaatttcgagaaaggagatgtaatggatgttattgaaaaacctgaaaatgacccagagtggtggaaatgcaggaagatcaatggtatggttggtctagtaccaaaaaactatgttaccgttatgcagaataatccattaacttcggtttggaaccatcacctccacagtgtgattacattaggccttcactcactggaaagtttgctgg

SEQ ID NO: 185113 - DNA, 1710 bp, Homo Sapiens
  misc_feature (1367)..(1391): n is a, c, g, or t
ctttgtacaaaaaagttggcaatccttggccattatggcaaagtcaccaggcatcaagcagaaatggcattaaatgaaagaggacatgaaggggatttcctcattcgtgatagtgaatcttcgccaaatgatttctcagtatcactaaaagcacaagggaaaaacaagcattttaaagtccaactaaaagagactgtctactgcattgggcagcgtaaattcagcaccatggaagaacttgtagaacattacaaaaaggcaccaatttttacaagtgaacaaggagaaaaattatatcttgtcaagcatttatcatgatactgctgaccagaagtgactgctgtgtagctgtaatttgtcatgtaattgaagactgagaaaatgttgggtccagtcgtgcttgattggaaattgttgtttctaaatccatatgagaattgacaataagtatttttattataactcagcccatacatatatactatgtatgcagtgcatctgcatagaacagttccttatccttggccttctgttttattgtttttttctttgctgttttccctttgcttctaatattacagttttgtattttgtaaacaaaaatcaaataatgcatatcagaatctttatatggaagaaatcctttattgcctttcctttgtttccttgtaaaggcaccctgttctgttatggtttttcattatataaaattattatatctatatatgacatatgctaaaatttcttggagagtgttaatcttttctgtgactaaatagcaataataagtggaaaattagaaattatttccaggtattatatttgtcacaggccattgtaaataccaagtatattgtgtctgccataatttttaaaaatacattcattgtcttcagtcatacagcaagacacatgagacatagattagaaaacatgttgtacaattttaatttacaactgttggaaataaaaatcacttaatttttttccagtgcttctccctcatctggttattcaagaaaacaaaacagtctctgagatatttagcttttcaaactgtaaatagatgctctagtgttatttatttttttaatcccacttgtattattttacctctagagcatcttgtattaggacatgttatatttatgccagtgggaaataagttatggccaagttttgcaaaaacaggaagcagtgagatacttgtttttttctcctcactaaatatcagtaattgtcaggaatggtattacctattttcatttcctcttttcagctttaagttttgttgattgggacactaaaactgatgtatacctgaggaaaaaatagaatgtgctcatggttagggaaaattatattannnnnnnnnnnnnnnnnnnnnnnnnaaccaaagtaggaatttgggtgtatggataagaggccaatctgcttctgtaggctatagaagaaaaccagttgtattttatggtcataatttgtccccctattattctggagatttaaatttaagtaaagtagccatcagtattttaattgaaaaatactaaagccacataactgagtaggatgtcgtatgatactttcaacaatttccctaatgctgcctaagcatatggatgttttaattctttgctgttataaatagatattctaatacgccagattactgatggtaaaattgaagtgtgtacttgtgaatttttt

SEQ ID NO: 185114 - DNA, 1016 bp, Homo Sapiens
ttggcagaatttttactcaaaatggattggttaaacgtctttaaagattttttcagcattggaaaagtgaaaagaaaacctagtgtgccagattctgcatctcctgctgatgatagttttgttgacccaggggaacgtctctatgacctcaacatgcccgcttatgtgaaatttaactacatggctgagagagaggatgaattatcattgataaaggggacaaaggtgatcgtcatggagaaatgcagtgatgggtggtggcgtggtagctacaatggacaagttggatggttcccttcaaactatgtaactgaagaaggtgacagtcctttgggtgaccatgtgggttctctgtcagagaaattagcagcagtcgtcaataacctaaatactgggcaagtgttgcatgtggtacaggctctttacccattcagctcatctaatgatgaagaacttaatttcgagaaaggagatgtaatggatgttattgaaaaacctgaaaatgacccagagtggtggaaatgcaggaagatcaatggtatggttggtctagtaccaaaaaactatgttaccgttatgcagaataatccattaacttcaggtttggaaccatcacctccacagtgtgattacattaggccttcactcactggaaagtttgctggcaatccttggtattatggcaaagtcaccaggcatcaagcagaaatggcattaaatgaaagaggacatgaaggggatttcctcattcgtgatagtgaatcttcgccaaatgatttctcagtatcactaaaagcacagggaaaaacaagcattttaaagtccaactaaaagagactgtctactgcattgggcagcgtaaattcagcaccatggaagaacttgtagaacattacaaaaaggcaccaatttttacaagtgaacaggagaaaaattatatcttgtcaagcatttatcatgatactgctgaccagaagtgactgctgtgtagctgtaatttgtcatgtaattgaaga

SEQ ID NO: 185115 - DNA, 1690 bp, Homo Sapiens
  misc_feature (344)..(388): n is a, c, g, or t
  misc_feature (392)..(464): n is a, c, g, or t
  misc_feature (481)..(605): n is a, c, g, or t
ttggctttatactaactagactctttgccagatttaaatatttaataactagtaacgttggtgttctctatgcctctgaatgcagaagttaatttagttactctttgctaataacaaatacataaagcttaactttacatttttatgatcttttgcgtctttgttgtacgtttcctgagcagaatagaagccaaggcatagatggattgctttatttgttctttgcttttaggtaattttgacttaatatttgaaagggacagggagaataaaggtgaattaaatgtggacctgtatatttctactacaaatattaacagacataagcagcaatcattagtgannnnnnnnnnnnnnnnnnnnnnnnnnnnnnnnnnnnnnnnnnnnngagnnnnnnnnnnnnnnnnnnnnnnnnnnnnnnnnnnnnnnnnnnnnnnnnnnnnnnnnnnnnnnnnnnnnnnnnnttgggttcaagtgattnnnnnnnnnnnnnnnnnnnnnnnnnnnnnnnnnnnnnnnnnnnnnnnnnnnnnnnnnnnnnnnnnnnnnnnnnnnnnnnnnnnnnnnnnnnnnnnnnnnnnnnnnnnnnnnnnnnnnnnnnnnnngtttctcttataagtaaataccctaaataaacacctcttattgtctaattgttcttttcagctctacatttgttttacacaaaacccttacaactttgttttcttcatctcccctgtagggccatgtttatgagtggactaagtgaaagcaaacaaacccatgtacacctgaggaatgtcgatgctgccaccttacagataataataacttatgcatacacgggtaacttggcaatgaatgacagcactgtagaacagctttatgaaacagcttgcttcctacaggtagaagatgtgttacaacgttgtcgagaatatttaattaaaaaaataaatgcagagaattgtgtacgattgttgagttttgctgatctcttcagttgtgaggaattaaaacagagtgctaaaagaatggtggagcacaagttcactgctgtgtatcatcaggacgcgttcatgcagctgtcacatgacctactgatagatattctcagtagtgacaatttaaatgtagaaaaggaagaaaccgttcgagaagctgctatgctgtggctagagtataacacagaatcacgatcccagtatttgtcttctgttcttagccaaatcagaattgatgcactttcagaagtaacacagagagcttggtttcaaggtctgccacccaatgataagtcagtggtggttcaaggtctgtataagtccatgcccaagtttttcaaaccaagacttgggatgactaaagaggaaatgatgattttcattgaagcatcttcagaaaatccttgtagtctttactcttctgtctgttacagcccccaagcagaaaaagtttacaagttatgtagcccaccagctgatttgcataaggttgggaccgttgtaactcctgataatgatatctacatagcagggggtcaagttcctctgaaaaacacaaaaacaaatcacagtaaaacaagcaaacttcagactgccttcagaactgtgaattgcttttattggtttgatgcacagcaaaatacctggtttccaaagaccccaatgctttttgtccgcataaagccatctttggtttgctgtga

SEQ ID NO: 185116 - DNA, 1480 bp, Homo Sapiens
ttggcacggcgtgtatggcatgacgcaggggaccaccccgcgcgctccctgaggatgtgctggctgtgccccttttttccactggcacatttggtaagagagggaagctgctccccgtcagaaccacagtgcgccgtgcgaggggcactgtcttcttcatgctccctggagcaccaccaaagaaacgtaaacaataccccacgaaagcagggtcaggggtcagggtgcgatcgagacccaggatgggggcgtccagtcatgcccaccccagcatcacaggagacatggaggtgcgggcaggctcctgaattattatgcaaattaggaggacgcaggaggggtctgccctccagccgaacaccacacactggaccctaagtggccaaatgcctgggccgcttgctggctgtggcctgaggcttgtgggttgctgcattttgcttgtagttcacaaccattttgacactggaaaatgctgactttgggggacaggatgaggccctacattctaagcccccagttggcagacaggcattgtccctgttccacatttatgtcgggacaggggatgaccttttcctccgtgtttttcctgtgtttgcacgttgaaatgaagctgacaacctggcaagacgctcagccgcttcaaaccctttttgtcaattaacttattttttaatacttgaaaagaagtaacttcgtttgtgtatctttactagaggaactgatcacctgcgcccgggtgcgggagccacagcggcatctggtgcgtcctacgcgacctggtccggggctgcccggtgctcctcacgtgcatctatttattagcctttctcttcgtatcactggcctggctggcatcagggagctgcccagaacccctgtgtgggtcctcctcacagctttctgtcccctcctccacccggtgcctgcctcaccctggcgctagaccatctggaccactcatgtgatgagggtgcatttccgttctgttttgggccaggccaacagcagagctgccactctcaccctcccagtgagaattccggctctgcagaactcgcccttgtctcagtttgggggccagggcatcaccttcctccgcacatatgttaaagaaggtttcaggatgggccctcatccacacaggccaagagggtgcaaggtgggaccctggaatcatgtggctggtgagaattccctcctcccagcctaagattcacccagacggaaacgcgagtgctgcagtggatgctgggatgcaggctggtgcctctcaagcagatcagcgactcccgcccttccttccgaaggcgacggggcacctgccttgtgccggatcttcatggggacataaagggcgagccccgaatcactagctcctatagccaaactgttcctttctcacggttccgcaccagcctggctgtgtacagctcatcaagccactgagctatccggggtggggtgcttgtccatc

SEQ ID NO: 185117 - DNA, 887 bp, Homo Sapiens
ttggcacgactctgcagaaggaacaaagcaccctccccactgggctcctggttgcagagctccaagtcctcacacagatacgcctgtttgagaagcagcgggcaagaaagacgcaagcccagaggccctgccatttctgtgggctcaggtccctactggctcaggcccctgcctccctcggcaaggccacaatgaaccggggagtcccttttaggcacttgcttctggtgctgcaactggcgctcctcccagcagccactcagggaaagaaagtggtgctgggcaaaaaaggggatacagtggaactgacctgtacagcttcccagaagaagagcatacaattccactggaaaaactccaaccagataaagattctgggaaatcagggctccttcttaactaaaggtccatccaagctgaatgatcgcgctgactcaagaagaagcctttgggaccaaggaaactttcccctgatcatcaagaatcttaagatagaagactcagatacttacatctgtgaagtggaggaccagaaggaggaggtgcaattgctagtgttcggattgactgccaactctgacacccacctgcttcaggggcagagcctgaccctgaccttggagagcccccctggtagtagcccctcagtgcaatgtaggagtccaaggggtaaaaacatacagggggggaagaccctctccgtgtctcagctggagctccaggatagtggcacctggacatgcactgtcttgcagaaccagaagaaagtggagttcaaaatagacatcgtggtgctagctttccagaagcctccagcatagtctataagaaagagggggaacaggtggagttctccttcccactcgcctttacagttgaaaagctga

SEQ ID NO: 185118 - DNA, 2233 bp, Homo Sapiens
ttgggtttgagaagcagcgggcaagaaagacgcaagcccagaggtccatccaagctgaatgatcgcgctgactcaagaagaagcctttgggaccaaggaaactttcccctgatcatcaagaatcttaagatagaagactcagatacttacatctgtgaagtggaggaccagaaggaggaggtgcaattgctagtgttcggatgtgagtggggcaggtggggatgaggatacctcctgcctggttcccttccccactactcccacccctgcaccaaatccagcctgagctggtgataccgcagcagccccaagaggaccaggctgtcaaactggcctccaaatgtcttaaaacccttcttgatcagtgactgccaactctgacacccacctgcttcaggggcagagcctgaccctgaccttggagagcccccctggtagtagcccctcagtgcaatgtaggagtccaaggggtaaaaacatacagggggggaagaccctctccgtgtctcagctggagctccaggatagtggcacctggacatgcactgtcttgcagaaccagaagaaggtggagttcaaaatagacatcgtggtgctagctttccagaaggcctccagcatagtctataagaaagagggggaacaggtggagttctccttcccactcgcctttacagttgaaaagctgacgggcagtggcgagctgtggtggcaggcggagagggcttcctcctccaagtcttggatcacctttgacctgaagaacaaggaagtgtctgtaaaacgggttacccaggaccctaagctccagatgggcaagaagctcccgctccacctcaccctgccccaggccttgcctcagtatgctggctctggaaacctcaccctggcccttgaagcgaaaacaggaaagttgcatcaggaagtgaacctggtggtgatgagagccactcagctccagaaaaatttgacctgtgaggtgtggggacccacctcccctaagctgatgctgagtttgaaactggagaacaaggaggcaaaggtctcgaagcgggagaaggcggtgtgggtgctgaaccctgaggcggggatgtggcagtgtctgctgagtgactcgggacaggtcctgctggaatccaacatcaaggttctgcccacatggtccaccccggtgcagccaatggccctgattgtgctggggggcgtcgccggcctcctgcttttcattgggctaggcatcttcttctgtgtcaggtgccggcaccgaaggcgccaagcagagcggatgtctcagatcaagagactcctcagtgagaagaagacctgccagtgccctcaccggtttcagaagacatgtagccccatttgaggcacgaggccaggcagatcccacttgcagcctccccaggtgtctgccccgcgtttcctgcctgcggaccagatgaatgtagcagatcccaggcctctggcctcctgttcgcctcctctacaatttgccattgtttctcctgggttaggccccggcttcactggttgagtgttgctctctagtttccagaggcttaatcacaccgtcctccacgccatttccttttccttcaagcctagcccttctctcattatttctctctgaccctctccccactgctcatttggatcccaggggagtgttcagggccagccctggctggcatggagggtgaggctgggtgtctggaagcatggagcatgggactgttcttttacaagacaggaccctgggaccacagagggcaggagcttgcacgaaatcacacagccaagccagtcaaggatggatgcagatccagaggtttctggcagccagtacctcctgccccatgctgcccgcttctcaccctatgtgggtggggccacagactcacatcctgaccttgcacaaacagcccctctggacacagccccatgtacacggcctcaagggatgtctcacatcctctgtctatttgagacttagaaaaatcctacaaggctggcagtgacagaactaagatgatcatctccagtttatagaccagaaccagagctcagagaggctagatgattgattaccaagtgccggactagcaagtgctggagtcgggactaacccagtcccttgtcccaagttccactgctgcctcttgaatgcagggacaaatgccacacgctctcacagtggcctagtggtgggtactcatgtgtacttttgggt

SEQ ID NO: 185119 - DNA, 1391 bp, Homo Sapiens
  misc_feature (283)..(316): n is a, c, g, or t
ttggctattgtatatgaccagcagtctaggcgttcaagaggatttgcctttgtatattttgaaaatgtagatgatgccaaggaagctaaagaacgtgccaatggaatggagcttgatgggcgtaggatcagagttgatttctctataacaaaaagaccacatacgccaacaccaggaatttacatggggagacctacctatggcagctctcgccgtcgggattactatgacagaggatatgatcggggctatgatgatcgggactactatagcagatcatacnnnnnnnnnnnnnnnnnnnnnnnnnnnnnnnnnnctgcccaagacagggatcagatttatagaaggcggtcaccttctccttactatagtcgtggaggatacagatcacgttccagatctcgatcatactcacctcgtcgctattaaagcatgaagactttctgaaacctgccctagagctgggatattgtttgtgggcaatattttttattgtctcttgtttaaaaagtgaacagtgcctagtgaagttaggtgacttttacaccttttacgatgactacttttggtggagttgaaatgctgttttcattctgcatttgtgtagtttggtgctttgttccaagttaagtgttttcagaaaagtatgttttgcatgtatttttttacagtctaaattttgactgctgagaagtttctattgtacaaaacttcatttaaaaggtttttctactgaatccagggtattctgaagatcgaagcctgtgtaaaatgctaccaaatggcaaaaagcaacaataaacagtttgatttttacttttctttctaacatatcaatgcttagcagaactattcagattgtcagtagtaaatttaaagacaaatgcccgttttcctccagtccatgaaacataccatacttatatacctgcaactaagtgtttaaaattatgctctgtaactctgtactgctagtattagaactaaaaatcttaaaatacagccagtgcttaatgcttatatcaatgtggatttgtcggcttttatgtaatctgtaatatgtatagcaggaaatacgaagagttacacagtgtatgccttaaaaggctgtttcttaaaggtgttacaaggggataatggtatttcaactagttatcagcaagtgacaatacattccaccacaaatacactcttgttcttctagcttttagactatatgaaaaaaccgggtgcttcaaagtacatgataagggaacactatacctgtcatggatgaactgaagactttgcctgttcattttttaaatattattttcaggtcctttgcttaccaaaggaggcccaatttcactcaaatgttttgagaactgtgtttaaataaacgcaaatga

SEQ ID NO: 185120 - DNA, 2689 bp, Homo Sapiens
  misc_feature (2298)..(2332): n is a, c, g, or t
  misc_feature (2444)..(2454): n is a, c, g, or t
ttggccccatgtgcagcctcctgattggggcacaggaactcaacctgaatcagcctcttgtgtattacaggcaggggccgagatctcgactgtgaaccctgagcagtactccaaacgcttcaacgagtttatgtccaacatcctgacgtagttctcttctaccttcagccagagccagagagctggatatggggtcggggatcgggagttagggagaagggtgtatttgggctagatgggagggtgggagcagagtcgggtttgggagggctttagcaatgagactgcagcctgtgacaccgaaagagactttagctgaagaggagggggatgtgctgtgtgtgtacctgctcacaggatgtaaccccaccttctgcttacccttgattttttctccccatttgacacccaggttaaaaaggggttccctttttggtaccttgtaaccttttaagataccttggggctagagatgacttcgtgggtttatttgggttttgtttctgaaatttcattgctccaggtttgctatttataatcatatttcatcagcctacccaccctccccatctttgctgagctctcagttcccttcaattaaagagatacccagtagacccagcacaagggtccttccagaaccaagtgctatggatgccagattggagaggtcagacacctcgccctgctgcatttgctcttgtctggattaactttgtaatttatggagtattgtgcacaacttcctccacctttcccttggattcaagtgaaaactgttgcattattcctccatcctgtctggaatacaccaggtcaacaccagagatctcagatcagaatcagagatctcagaggggaataagttcatcctcatgggatggtgaggggcaggaaagcggctgggctcttggacacctggttctcagagaaccctgtgatgatcacccaagccccaggctgtcttagcccctggagttcagaagtcctctctgtaaagcctgcctcccactaggtcaagaggaactagagtacctttggatttatcaggaccctcatgtttaaatggttatttccctttgggaaaacttcagaaactgatgtatcaaatgaggccctgtgccctcgatctatttccttcttccttctgacctcctcccaggcactcttacttctagccgaactcttagctctgggcagatctccaagcgcctggagtgctttttagcagagacacctcgttaagctccgggatgaccttgtaggagatctgtctccctgtgcctggagagttacagccagcaaggtgcccccatcttagagtgtggtgtccaaacgtgaggtggcttcctagttacatgaggatgtgatccaggaaatccagtttggaggcttgatgtgggttttgacctggcctcagccttggggctgtttttccttgttgccccgctctagacttttagcagatctgcagcccacaggcttttttggaaggagtggcttcctgcaggtgttccacctgccttcggagcctgccacccaggccctcagaactgagccacaggctgctctggccaggagagaaacagctctgttgttctgcattgggggaggtacattcctgcatcttctcaccccctcaaccaggaactggggatttgggatgagatatggtcagacttgtagataaccccaaagatgtgaagatcgcttgtgaaaccattttgaatgaatagattggtttcctgtggctccctccaaacctggccaagcccagcttccgaagcaggaaccagcactgtctctgtgcctgactcacagcatataggtcaggaaagaatggagacggcattcttggacttcactggggctgctggattggatgggaaaccttctggaagaggcagatgggggtcaaaccactgccttggccccaggaaggggccataggtaggtctgaacaactgccgcaagaccactacatgacttagggaacttgaaaccaactggctcatggagaaaacaaatttgacttgggaaagggattatgtaggaataatgtttggacttgatttccccacgtcataatgaagaatggaagtttggatctgctcctcgtcaggcgcagcatctctgaagcttggaaagctgtcttccagcagcctccgtggcctcgggttcctaccggcttctctgcatttggtctgctgatcatgttgccataatgtgtatggaaagtgtaacacattcttactggttaaagacgactaccaggtatctaacttgtttaacattgannnnnnnnnnnnnnnnnnnnnnnnnnnnnnnnnnnatattgtttacattttgagaggtagcattctgtttcaaatgctttttgtttttctgacagtattgttgactgggtcataacattttgagctgtggtttggtggattttcaannnnnnnnnnnaaaggtcattcgctgtgctatcttcaaaaaccttgagtttggcccccaatttttggcattcaaatgtttaaaagctatttatcttggtttatacaagtttcctttctctttctttttgtcatggtattctatttggtctgcagttttgaatgtagagaaagtggactgatcccccaagcgtttgtctgcccccactcctttcctccttgggtcccgccattcttttaactgggca

SEQ ID NO: 185121 - DNA, 1283 bp, Homo Sapiens
  misc_feature (151)..(189): n is a, c, g, or t
tgtacaaatatgcaggagtaggggaattctcctttgaagaaattcgggctgaagttttccggaagaaattaaaagagcaaagggaagccgagctattgaccagtgcagagaagagagcagaaatgcagaaacagattgaagagatggagannnnnnnnnnnnnnnnnnnnnnnnnnnnnnnnnnnnnnncaggtgatcagcaagaagagacgatgcctacaaaggagacaactaaactgcaaattgcttccgagtctcagaaaataccaggaatgactctatccagttctgtttgtcaagtaaactgttgtgccagagaaacttcacttgcggagaacatttggcaggaacaacctcattctaaaggtcccagtgtacctttctccatttttgatgagtttcttctttcagaaaagaagaataaaagtcctcctgcagatcccccacgagttttagctcaacgaagaccccttgcagttctcaaaacctcagaaagcatcacctcaaatgaagatgtgtctccagatgtttgtgatgaatttacaggaattgaacccttgagcgaggatgccattatcacaggcttcagaaatgtaacaatttgtcctaacccagaagacacttgtgactttgccagagcagctcgttttgtatccactccttttcatgagataatgtccttgaaggatctcccttctgatcctgagagactgttaccggaagaagatctagatgtaaagacctctgaggaccagcagacagcttgtggcactatctacagtcagactctcagcatcaagaagctgagcccaattattgaagacagtcgtgaagccacacactcctctggcttctctggttcttctgcctcggttgcaagcacctcctccatcaaatgtcttcaaattcctgagaaactagaacttactaatgagacttcagaaaaccctactcagtcaccatggtgttcacagtatcgcagacagctactgaagtccctaccagagttaagtgcctctgcagagttgtgtatagaagacagaccaatgcctaagttggaaattgagaaggaaattgaattaggtaatgaggattactgcattaaacgagaatacctaatatgtgaagattacaagttattctgggtggcgccaagaaactctgcagaattaacagtaataaaggtatcttctcaacctgtcccatgggacttttatatcaacctcaagttaaaggaacgtttaaatgagattttgatcatttttgcagctgttatcaatatc

SEQ ID NO: 185122 - DNA, 1076 bp, Homo Sapiens
tttgtacaaaaaagttggcttctcaacctgccccatgggacttttatatcaacctcaagttaaaggaacgtttaaatgaagattttgatcatttttgcagctgttatcaatatcaagatggctgtattgtttggcaccaatatataaactgcttcacccttcaggatcttctccaacacagtgaatatattacccatgaaataacagtgttgattatttataaccttttgacaatagtggagatgctacacaaagcagaaatagtccatggtgacttgagtccaaggtgtctgattctcagaaacagaatccacgatccctatgattgtaacaagaacaatcaagctttgaagatagtggacttttcctacagtgttgaccttagggtgcagctggatgtttttaccctcagcggctttcggactgtacagatcctggaaggacaaaagatcctggctaactgttcttctccctaccaggtagacctgtttggtatagcagatttagcacatttactattgttcaaggaacacctacaggtcttctgggatgggtccttctggaaacttagccaaaatatttctgagctaaaagatggtgaattgtggaataaattctttgtgcggattctgaatgccaatgatgaggccacagtgtctgttcttggggagcttgcagcagaaatgaatggggtttttgacactacattccaaagtcacctgaacaaagccttatggaaggtagggaagttaactagtcctggggctttgctctttcagtgagctaggcaatcaagtctcacagattgctgcctcagagcaatggttgtattgtggaacactgaaactgtatgtgctgtaatttaatttaggacacatttagatgcactaccattgctgttctactttttggtacaggtatattttgacgtcactgatattttttatacagtgatatacttactcatgggccttgtctaacttttgtgaaaaactattttattctaaacagactcattacaaaatgggttaccttgtttatttaacccatttgtctctacttttccctggtacttt

SEQ ID NO: 185123 - DNA, 1291 bp, Homo Sapiens
ttggctcacagaattgaagctatgtgaaaatggaaacatgaataatgttgtaactcgaagatttagcaaagctgacacaatagatacaattgaaaaggaaataagaaaaatcttcagtattccagatgaaaaggagaccagattgtggaacaaatacatgagtaacacatttgaaccactgaataaaccagacagcaccattcaggatgctggtttataccaaggacaggtattagtgatagaacagaaaaatgaagatggaacatggccaaggggtccttctactcctaatgtgaaaaactcaaattactgtcttccatcatataccgcttataagaactatgattattcggaacctggaagaaacaatgaacagccaggcctctgtggcctaagtaacttgggaaatacgtgtttcatgaactcagctattcagtgtttgagcaacacacctccacttactgagtatttcctcaatgataagtatcaagaagaactgaattttgacaatcccttaggaatgagaggtgaaatagctaaatcttatgccgaactgatcaagcaaatgtggtctggaaagtttagctacgtcaccccaagagcctttaagacacaggtaggacgttttgcacctcagttctctggatatcagcagcaagactgtcaagaactgttagctttcctattagatggattacatgaggatttgaatagaattaggaaaaaaccatatatacaattaaaagatgcagatggaaggccagataaggtggttgccgaagaagcctgggaaaaccatttaaaacgaaatgattctatcatagtagatatatttcatggccttttcaaatcaactttagtttgtcctgagtgtgctaagatttcagtaacatttgatcctttttgttacttgacacttccattgcccatgaaaaaagaacgcaccttggaagtttacttagttagaatggatccgcttaccaaacctatgcagtacaaagtggttgtccccaaaattggaaacatattagatctttgtacagcattgtctgctttgtcaggaatacctgcagataagatgatagttactgatatatacaatcatagatttcacagaatattcgctatggatgaaaaccttagtagtattatggaacgggatgatatttatgtgtttgaaattaacatcaataggacagaagatacagagcacgtgattattcctgtttgcctaagagaaaaattcagacactcgagttatacccaccatactgggttcttcactttttgg

SEQ ID NO: 185124 - DNA, 1349 bp, Homo Sapiens
  misc_feature (490)..(506): n is a, c, g, or t
  misc_feature (951)..(1002): n is a, c, g, or t
  misc_feature (1254)..(1262): n is a, c, g, or t
ttggctcttctttttcaggtattagtaaatattggcaaccactttgatcttgcttccagtatatttgtagcaccgagaaaagggatttatagcttcagcttccacgtggtcaaagtgtataacagacaaaccatccaggtcagtttaatgcagaatggctacccagtgatctcggcctttgcaggagaccaggatgtcaccagagaagctgctagcaatggcgtgctgctgctcatggaaagggaagacaaagtgcatctcaaacttgagagaggcaacctcatggggggctggaaatactccacattctcgggcttcttggtgtttcctctataaacacagagccccctagatggtgggggaatggcaaactggacccaggactccgccctttaaaacaccctgaacttactggaattggacaccttgtttccaacctccgtcagactgttgcagtagaagaatgatttcctttgaaacctccagtacnnnnnnnnnnnnnnnnnggaatactgacaattcctcgggaacctggcctctaattagttttagatgacaaggtcttaaggagaaatgaaattatcgatttgagcaatttgtacctgtgattgtaaagtcaatatcggattttattgttgggaccatggacctcttttgtttgtatgttgtattgtcgtcccaacggaaggagagctcctgactccaggatgggctgcaagttgcagtcagggcttgaagtaggagcccagcaaagaaccacctgctggacagtccttgacatgtgttctgtgtgtgtctgtatagccttaagaaaaagaatggcttcactttcattctgtattcttccccccaccatgtggctgggaggacttgggagggggatggggacattgggaacctgtcaagaagtgctttatccagagaaccaaattttgcacgattggactgcannnnnnnnnnnnnnnnnnnnnnnnnnnnnnnnnnnnnnnnnnnnnnnnnnnnctatactcaactctccctcctcaaccccacttttatttttcttgctggggttgaggagagaaaatatagaattcctggataagaccaaacaaaacaaaacattaaaatacctgtaagttttgttttagacgagaccaaactaaacaaaaagtatctgtttatcaaagtaaaagtaacacaatggacaattctgcttattctctcaaagagattctaagatgcacctttagaactattaatagcaacctgcannnnnnnnnaatttatacttcagaatcctttaagaacctggtgttcctgagtggtcctgaatcatataagttggtaatggaaactgtaatgaccaa

SEQ ID NO: 185125 - DNA, 2351 bp, Homo Sapiens
  misc_feature (2056)..(2091): n is a, c, g, or t
  misc_feature (2229)..(2237): n is a, c, g, or t
ttggggcgcgaaggtgcgcgagtcagccctcgcgctgggggcgcaggaaacaatagaggccgcgcgcacagagcgagctcttgcagcctccccgcccctcccgcaacgctcgaccccaggattcccccggctcgcctgcccgccatggccgacaaggaagcagccttcgacgacgcagtggaagaacgagtgatcaacgaggaatacaaaatatggaaaaagaacaccccttttctttatgatttggtgatgacccatgctctggagtggcccagcctaactgcccagtggcttccagatgtaaccagaccagaagggaaagatttcagcattcatcgacttgtcctggggacacacacatcggatgaacaaaaccatcttgttatagccagtgtgcagctccctaatgatgatgctcagtttgatgcgtcacactacgacagtgagaaaggagaatttggaggttttggttcagttagtggaaaaattgaaatagaaatcaagatcaaccatgaaggagaagtaaacagggcccgttatatgccccagaacccttgtatcatcgcaacaaagactccttccagtgatgttcttgtctttgactatacaaaacatccttctaaaccagatccttctggagagtgcaacccagacttgcgtctccgtggacatcagaaggaaggctatgggctttcttggaacccaaatctcagtgggcacttacttagtgcttcagatgaccataccatctgcctgtgggacatcagtgccgttccaaaggagggaaaagtggtagatgcgaagaccatctttacagggcatacggcagtagtagaagatgtttcctggcatctactccatgagtctctgtttgggtcagttgctgatgatcagaaacttatgatttgggatactcgttcaaacaatacttccaaaccaagccactcagttgatgctcacactgctgaagtgaactgcctttctttcaatccttatagtgagttcattcttgccacaggatcagctgacaagactgttgccttgtgggatctgagaaatctgaaacttaagttgcattcctttgagtcacataaggatgaaatattccaggttcagtggtcacctcacaatgagactattttagcttccagtggtactgatcgcagactgaatgtctgggatttaagtaaaattggagaggaacaatccccagaagatgcagaagacgggccaccagagttgttgtttattcatggtggtcatactgccaagatatctgatttctcctggaatcccaatgaaccttgggtgatttgttctgtatcagaagacaatatcatgcaagtgtggcaaatggcagagaacatttataatgatgaagaccctgaaggaagcgtggatccagaaggacaagggtcctagatatgtctttacttgttgtgattttagactccccttttttcttctcaaccctgagagtgatttaacactggttttgagacagactttattcagctatccctctatataataggtaccaccgataatgctattagcccaaaccgtgggtgttttctaaatattaataggggggcttgattcaacaaagccacagacttaacgttgaaattttcttcaggaattttctagtaacccaggtctaaagtagctacagaaaggggaatattatgtgtgattatttttcttcttatgctatatccccaagtttttcagactcatttaagtaaaggctagagtgagtaaggaatagagccaaatgaggtaggtgtctgagccatgaagtataaatactgaaagatgtcacttttattcaggaaatagggggagattcaagtcgtatagattcctactcgaaaatcttgacacctgactttccaggatgcacattttcatacgtagaccagtttcctcttggtttcttcagttaagtcaaaacaacacgttcctctttccccatatattcatatatttttgctcgttagtgtatttcttgagctgttttcatgttgtttatttcctgtctgtgaaatggtgnnnnnnnnnnnnnnnnnnnnnnnnnnnnnnnnnnnnaacttgggaccaccaagttgtaaagatgtatgtttttacctgacagttataccacaggtagactgtcaagttgagaagagtgaatcaataacttgtatttgttttaaaaattaaattaatcccttgataaaagttgcnnnnnnnnnaagagttagtccttgaccactgtttgatgccatctcaattttgggtgacctgtttcaccagcaaggcctgttactctccatgactaactgtgtaagttgcttaaaatggaataa

SEQ ID NO: 185126 - DNA, 964 bp, Homo Sapiens
  misc_feature (542)..(582): n is a, c, g, or t
  misc_feature (719)..(727): n is a, c, g, or t
caatgctttccttataaaagacaactttgtacaaaaaagttggcaaaccgtgccctgttttctaaatattaataggggggcttgattcaacaaagccacagacttaacgttgaaattttcttcaggaattttctagtaacccaggtctaaagtagctacagaaaggggaatattatgtgtgattatttttcttcttatgctatatccccaagtttttcagactcatttaagtaaaggctagagtgagtaaggaatagagccaaatgaggtaggtgtctgagccatgaagtataaatactgaaagatgtcacttttattcaggaaatagggggagattcaagtcgtatagattcctactcgaaaatcttgacacctgactttccaggatgcacattttcatacgtagaccagtttcctcttggtttcttcagttaagtcaaaacaacacgttcctctttccccatatattcatatatttttgctcgttagtgtatttcttgagctgttttcatgttgtttatttcctgtctgtgaaatggtgnnnnnnnnnnnnnnnnnnnnnnnnnnnnnnnnnnnnnnnnnaacttgggaccaccaagttgtaaagatgtatgtttttacctgacagttataccacaggtagactgtcaagttgagaagagtgaatcaataacttgtatttgttttaaaaattaaattaatccttgataagagttgcnnnnnnnnnaggagttagtccttgaccactagtttgatgccatctccattttgggtgacctgtttcaccagcaggcctgttactctccatgactaactgtgtaagtgcttaaaatggaataaattgcttttctacataaccccatgctgatgggttttatttagtataaaacatccatcaaacaccagtctctggcttctagaagagtccttcagatgacagttgttgttcatgggctttgactat

SEQ ID NO: 185127 - DNA, 2706 bp, Homo Sapiens
  misc_feature (2293)..(2316): n is a, c, g, or t
  misc_feature (2412)..(2453): n is a, c, g, or t
acaaaaaagttggctgaaggttcagatgtggagataagacaaagcagcgagtaagagaataattcgactttgttcatagtactctgacaccagtagctctgattattttaatataaagtattttggtttcaatcgtgctttaatgtcaacatttcgaaattgagtaaaaacttcttagggttagaataaaatttatagtggtagttaatgagttctgagggattaagttttgctcatttcctaaccatgcaccctcacacatgcttcttataaggtgtatgaaattttgagaatagtaactccatataatgttcttttctagtaaatttggtttaaaatatagcattgaaacaatccccagtattttgcatgttacatctcatctttactctttgtcatgtggttattctttcttgatgaagtcattagaggacaacagtgaaaccatcaaaaattctatgatggaggagccaaacatcaataagatagaagcagatttgggatatcctggaggtaaagcaagaattattcataaggaatctgatatcattactgcgtttgctgttaataaggcaaatagaaactgcatagcaatcgcttccagtcatgatgttcaagaactggatgtttctggaattctggccacacaggtctacacttgggtagatgatgatatagaagtggaaaccaaaggatcagaagatttcttggttatacatgctcgtgatgatttaacagctgttcaaggtacaactccatatacacatagcaatcctggcactccaatcaacatgccatggcttggtagtacacagactggcagaggagcatctgtgatgattaagaaagccattaataatgttagaagaatgacttctcatccaactcttccttactatctgacaggagctcaagatggaagtgtcagaatgtttgaatggggccattctcaacaaataacctgttttcgatctggtggcaattcaagagttacaagaatgagatttaactatcagggaaataagtttggaatagttgatgctgatggatatttaagtttgtatcaaacaaactggaaatgttgtccagttactggaagcatgcctaagccatacctgacttggcagtgtcataacaaaacagccaatgattttgtcttcgttagttcctcctctctgatagctacagctggtctttcaactgacaatagaaacgtatgtttgtgggatactcttgtagcacctgccaatagtttagtccatgcatttacctgccatgacagtggagccacagttttagcatatgctccaaaacatcagctactaatatcaggtggcagaaaaggttttacatatgtatttgacctttgtcaacgacaacagaggcagcttttccagagccatgattctcctgttaaagccgttgctgttgatccaactgaagagtactttgttacaggatctgccgaaggcaatataaagatttggagtctctctacctttggtcttctccatacttttgtcagtgaacatgctcggcagtccatttttagaaatattggaactggagtgatgcaaattgagacagggcctgcaaatcacattttctcctgtggagctgatggaacaatgaaaatgagaatactgccagatcagtttagccctttaaatgaagtgttgaaaaatgatgtgaaatttatgctataacatttttacaataagatgtacaatttattacctatatggaagtggccaacagatataatatacagtgatcattctctatgccacaaattagctaatgctttcttgtttttatatttattttatggagctttgcccttgatgcactgatgccttaaaaattaacaaggtcattcagaagtagattacattgcctaaagtagaatgtgtaagtaatgctgtaataatacatatcatagtatattataatcagtatgtcatagtgttaaaggtgttttgttttcttattgatacttttccacaggcatctctgcatgaatttcttccacagtaaaaatacgttttttgtaaaggcaattgtacataatactcatcacttaattcaccacactctcacttcctttattagccttatacatctcaaactcttctcttaattaatgataggtatttgagtaagaatgaaaaaaataatgaacatcttcattaaaattgtcattgagacgtcagtgataaatgagctagatggctcaatatgtaaggttttcagtagtttaccctccggaacccaagttatatgtatgtatacnnnnnnnnnnnnnnnnnnnnnnnnatcttacacatcttatttgaacttagttgtatatattagcgaaaactggtttttcatgtgtttttgtgccataacaactattgccaccagaataannnnnnnnnnnnnnnnnnnnnnnnnnnnnnnnnnnnnnnnnngaattcccatcctaattttcaaataagtttcaaggagactatcaggattattattttaaagattagatttagtcaaataagtcttagcaggcaataaagtttctgtggtggcatatatcatgtaagacacttaaagtaagtttgtgaatttgtcaactttcgagcatcaaacaaatattttacttaaattttattttatcttatttttagtgcttttaatctcaaaattctgaaaagcgaatagcagtgtttt

SEQ ID NO: 185128 - DNA, 1979 bp, Homo Sapiens
ttgggaactgtgctctttgaggccgacgctaggggcccggaagggaaactgcgaggcgaaggtgaccggggaccgagcatttcagatctgctcggtagacctggtgcaccaccaccatgttggctgcaaggctggtgtgtctccggacactaccttctagggttttccacccagctttcaccaaggcctcccctgttgtgaagaattccatcacgaagaatcaatggctgttaacacctagcagggaatatgccaccaaaacaagaattgggatccggcgtgggagaactggccaagaactcaaagaggcagcattggaaccatcgatggaaaaaatatttaaaattgatcagatgggaagatggtttgttgctggaggggctgctgttggtcttggagcattgtgctactatggcttgggactgtctaatgagattggagctattgaaaaggctgtaatttggcctcagtatgtcaaggatagaattcattccacctatatgtacttagcagggagtattggtttaacagctttgtctgccatagcaatcagcagaacgcctgttctcatgaacttcatgatgagaggctcttgggtgacaattggtgtgacctttgcagccatggttggagctggaatgctggtacgatcaataccatatgaccagagcccaggcccaaagcatcttgcttggttgctacattctggtgtgatgggtgcagtggtggctcctctgacaatattagggggtcctcttctcatcagagctgcatggtacacagctggcattgtgggaggcctctccactgtggccatgtgtgcgcccagtgaaaagtttctgaacatgggtgcacccctgggagtgggcctgggtctcgtctttgtgtcctcattgggatctatgtttcttccacctaccaccgtggctggtgccactctttactcagtggcaatgtacggtggattagttcttttcagcatgttccttctgtatgatacccagaaagtaatcaagcgtgcagaagtatcaccaatgtatggagttcaaaaatatgatcccattaactcgatgctgagtatctacatggatacattaaatatatttatgcgagttgcaactatgctggcaactggaggcaacagaaagaaatgaagtgactcagcttctggcttctctgctacatcaaatatcttgtttaatggggcagatatgcattaaatagtttgtacaagcagctttcgttgaagtttagaagataagaaacatgtcatcatatttaaatgttccggtaatgtgatgcctcaggtctgcctttttttctggagaataaatgcagtaatcctctcccaaataagcacacacattttcaattctcatgtttgagtgattttaaaatgttttggtgaatgtgaaaactaaagtttgtgtcatgagaatgtaagtcttttttctactttaaaatttagtaggttcactgagtaactaaaatttagcaaacctgtgtttgcatatttttttggagtgcagaatattgtaattaatgtcataagtgatttggagctttggtaaagggaccagagagaaggagtcacctgcagtcttttgtttttttaaatacttagaacttagcacttgtgttattgattagtgaggagccagtaagaaacatctgggtatttggaaacaagtggtcattgttacattcatctgctgaacttaacaaaactgttcatcctgaaacaggcacaggtgatgcattctcctgctgttgcttctcagtgctctctttccaatatagatgtggtcatgtttgacttgtacagaatgttaatcatacagagaatccttgatggaattatatatgtgtgttttacttttgaatgttacaaaaggaaataactttaaaactattctcaagagaaaaatattcaaagcatgaaatatgttgctttttccaataccaacagtatactcctg

SEQ ID NO: 185129 - DNA, 1712 bp, Homo Sapiens
  misc_feature (1336)..(1403): n is a, c, g, or t
ttgggaatgttaaaagctccccacccccagctcccttgcatctccttcagttattcccagccccttcccaaagggtggccactgttttgacctctaacagcaaggataagttttttctgtccttgtactttatagaaatagaatcacatgtgatgttctttttatatctggcttttaaaaactttttaatatggatattttcaaatatatgtatttatatattagtcaaagtaatatgatgagtccctaagtactccagtgagtcatcaattcatggtcaatctggttttatctatattctctctgattattttgaatcacatccaatcccagacatcatagcatttatccttaaataatttcagcatatacctataaaagatttttttaaaacaacaatattattatcaaacctacaaaaaacatttgctcactttccctatcttcccactggattaatatataaagcaaaccccaaacaccacccatcacctagacttaacaggtggtaattgcaataccataattcacttgacaaagttaataatgatttctttgtgtcatgtaatagtctatatttcatcttccctggttgtagctggtttgtgtatggaattgtttgacagataaaggtcaagcctctcaaaaaaggggcagctttttctaattcttcccatggggtcatatggggctggtcctagatgacctcatgggtcatcccccacttctatgtctcccccatctgtagctacttccatatttgcactaaaggagattcagctacaaaaggaggccagccttcggtcttcgtcgatgcctgactcaggcaggccagctttccgcgtggtggacaccgagttctaagccacagaccgaggccccagcaggcagcggctggagggatgccacacccctcacagggcagcccccaactacatcttccctgcttactctctgcctacctgcctgagccatgttcacctgcccacttgtcccctgctgcctgcccaaacaccccaccattggcctgtcaacccacccattggcctgtctgctgggtgctaacaaagctctcatcactccttcacttggtctgtctgtctctgtcttggtagttgccggtggacagcatggccgtgccagcctcccacactgaggccaggtctaccccccatcataccagcccccaggaccactaccccacggccagccaggggtccagagctagcccaggctggggatctcgactcagacaagatggtgacaatgccttgagtctgaggcatcctctgcctgctttcctgcctgccccacctgcctcatattgtgtgggccnnnnnnnnnnnnnnnnnnnnnnnnnnnnnnnnnnnnnnnnnnnnnnnnnnnnnnnnnnnnnnnnnnnnaaatgcaatatctctgtatacagactggctgggccccaccccctgcgtgtggccctcccacagtattttgtgcaatgaagccctgctcccagcctttcagagacagggacacagcccctatttggaaccctgatcatcaccagaccctgggattggctatgggaaagcatgccacagccactcgccttcctacccccgcccgccatccccagttgcagggggatctggggactaccagagactctgggaaatggacaagtggggggccccactctttctctcctgcagtcccgtagctggggcctcctt

SEQ ID NO: 185130 - DNA, 1736 bp, Homo Sapiens
  misc_feature (1316)..(1383): n is a, c, g, or t
ttggctcaaacaccccaacatcgttacgctacatgacattatccacacggagaagtccctcacccttgtctttgagtacctggacaaggacctgaagcagtacctggatgactgtgggaacatcatcaacatgcacaacgtgaaactgttcctgttccagctgctccgtggcctggcctactgccaccggcagaaggtgctacaccgagacctcaagccccagaacctgctcatcaacgagaggggagagctcaagctggctgactttggcctggcccgagccaagtcaatcccaacaaagacatactccaatgaggtggtgacactgtggtaccggccccctgacatcctgcttgggtccacggactactccactcagattgacatgtggggtgtgggctgcatcttctatgagatggccacaggccgtcccctctttccgggctccacggtggaggaacagctacacttcatcttccgtatcttaggaaccccaactgaggagacgtggccaggcatcctgtccaacgaggagttcaagacatacaactaccccaagtaccgagccgaggcccttttgagccacgcaccccgacttgatagcgacggggccgacctcctcaccaagctgttgcagtttgagggtcgaaatcggatctccgcagaggatgccatgaaacatccattcttcctcagtctgggggagcggatccacaaacttcctgacactacttccatatttgcactaaaggagattcagctacaaaaggaggccagccttcggtcttcgtcgatgcctgactcaggcaggccagctttccgcgtggtggacaccgagttctaagccacagaccgaggccccagcaggcagcggctggagggatgccacacccctcacagggcagcccccaactacatcttccctgcttactctctgcctacctgcctgagccatgttcacctgcccacttgtcccctgctgcctgcccaaacaccccaccattggcctgtcaacccacccattggcctgtctgctgggtgctaacaaagctctcatcactccttcacttggtctgtctgtctctgtcttggtagttgccggtggacagcatggccgtgccagcctcccacactgaggccaggtctaccccccatcataccagcccccaggaccactaccccacggccagccaggggtccagagctagcccaggctggggatctcgactcagacaagatggtgacaatgccttgagtctgaggcatcctctgcctgctttcctgcctgccccacctgcctcatattgtgtgggccnnnnnnnnnnnnnnnnnnnnnnnnnnnnnnnnnnnnnnnnnnnnnnnnnnnnnnnnnnnnnnnnnnnnaaatgcaatatctctgtatacagactggctgggccccaccccctgcgtgtggccctcccacagtattttgtgcaatgaagccctgctcccagcctttcagagacagggacacagcccctatttggaaccctgatcatcaccagaccctgggattggctatgggaaagcatgccacagccactcgccttcctacccccgcccgccatccccagttgcagggggatctggggactaccagagactctggggaaatggacaaagtgggggggccccactctttctctcctgcagtcccgtagctgggggcctccttccttctcaagggtctccccagcccagtccccttgctccca

SEQ ID NO: 185131 - DNA, 1044 bp, Homo Sapiens
tttgacccttcccacttccacaagattggtcaccatgatgatacttgcagtgttttcgtgccacaccatcctccagaagtcatagatggtttctgcattggcccttgggtagcaatgtaatgattgggtcgatgataaccatcgatataattgccattgatatagtctgagtttgtgtctccttctattgtctgcagcctcactcgggaatgatcgtatgcaatgatattcccgtatctgttcttcattctgttctcatctttcttagccgagtcccatggtgcagactgcccttcaaagaagctctcgtattcctccttgaagccgtagccctccgcacacttcatctgtgtgatgtgctgaaggaggtctgccacccggatggcggggtggagctgcccagtctgatagggcacgtcggccggctctcgcttcttgtaagtatgggactgcaccaggctgctggtatcgctggccattgtgtgggtttcatctgggtaataggaattaggcaccgatgtgctcagtgtatttgttttcattgtgaaggacgatggtgaagacacagatctcccattcagattgtgcgtgtccatgaatgagaaagcctcgtcgcagtttgtgccctgctcagcatagctcttgtccattgagttcaccatcacagtcatctcctgtcgggtgctgctcatggtctctttccgcttcttggccagtttccttttcttcattaccaacacaactccaagaaatataatcacgaacagcaagatgcccgcgatgactccagcaattttaactgtatggtctgtctgtttctcgggttctgggactggtttcggagtggcagctccttttgtggccacttggacacagtctattttggtttccccattggctctactagcagcttggaaataaattctgtagcttttataggggagaaggggagtgttccagtatccattatatgtcttattatcaccaattgtaaaaggctgcgcagcttggaggctgtctgcagccaacttttttgtacaaagt

SEQ ID NO: 185132 - DNA, 2187 bp, Homo Sapiens
gtagttaatcgttactaataacagaaaagacatttttggcatggtaattggcacaaagtgaataattgttgaatagatgacttttgaggctttcaaaattcgagtgtccataaaatccatccagagccacctggttcctttttttgaaccacttaacgtaattctggaaaaccttgactgtgggtcttaagtttggtggattgctgcttctcactggctgacctttggaggtcgcatatttcaggatgtgactccacttaggctccatttcacctgacactgcaattctgtgccttcagagggatttgttattgcgaatgatgtggacaacaagcgctgctacctgctcgtccatcaagccaagaggctgagcagcccctgcatcatggtggtcaaccatgatgcctccagcatacccaggctccagatagatgtggacggcaggaaagagatcctcttctatgatcgaattttatgtgatgtcccttgcagtggagacggcactatgagaaaaaacattgatgtttggaaaaagtggaccaccttaaatagcttgcagctacatggcttacagctgcggattgcaacacgcggggctgaacagctggctgaaggtggaaggatggtgtattccacgtgttcactaaaccctattgaggatgaagcagtcatagcatctttactggaaaaaagtgaaggtgctttggagcttgctgatgtgtctaatgaactgccagggctgaagtggatgcctggaatcacacagtggaaggtaatgacgaaagatgggcagtggtttacagactgggacgctgttcctcacagcagacacacccagatccgacctaccatgttccctccgaaggacccagaaaagctgcaggccatgcacctggagcgatgccttaggatattaccccatcatcagaatactggagggttttttgtggcagtattggtgaaaaaatcttcaatgccgtggaataaacgtcagccaaagcttcagggtaaatctgcagagaccagagaaagcacacagctgagccctgcagatctcacagaagggaaacccacagatccctctaagctggaaagtccgtcattcacaggaactggtgacacagaaatagctcatgcaactgaggatttagagaataatggcagtaagaaagatggcgtgtgtggtcctcctccatcaaagaaaatgaagttatttggatttaaagaagatccatttggatttattcctgaagatgacccattatttccacctattgagaaattttatgctttggatccttcattcccaaggatgaatttgttaactcggactacagaagggaagaaaaggcagctctacatggtttctaaggagttgcggaatgtgctgctgaataacagtgagaagatgaaggttattaacacagggatcaaagtctggtgtagaaataacagcggtgaagagtttgactgtgctttccggctggcacaggagggaatatatacattgtatccatttattaactcaagaattattactgtatcaatggaagatgttaagatactgttgacccaggaaaatcccttttttagaaaactcagcagtgagacctacagtcaagcaaaggacctggcaaagggaagcatcgtgctgaagtatgaaccagattctgcgaatccagacgctctgcagtgtcccatcgtcttatgcggatggcggggaaaggcctccattcgaacttttgtgcccaagaatgaacggcttcattatctcaggatgatggggctggaggtattgggagaaaagaagaaggaaggggttatcctcacaaatgagagtgcagccagcaccggacagccagacaatgacgtgactgagggacagagagcaggagagcccaacagcccagatgcagaagaggccaacagtccagacgtgacagcaactgtgacccggcgggggtccatccaccccggtgagcaggcccaaggcagcgggggcccacacccctcacacgcaaaactggcttcttctgggtcactggtgtctgaaaccaatccagagcagcctgtggcctgtaaagcatatatttctaatgactgcagactggtggggatcataggagccttctgaatgaccaggactgctttctttggaagctgatgaaatgtactcttttaagcgtg

SEQ ID NO: 185133 - DNA, 1334 bp, Homo Sapiens
ttggcggagctccttgagcccgcgtgggaaacctgggcgcttcgcgcggagacgcctttgtggctgcttcctggagcatttttttccccttagagctgttcgctgttttccctgtcacgccgcttttctgaaagacgggttgtgcgctttgggcttattcctggacggtccccaaaagtccccgaaaggaccaggcccggacacgtggggccttggtttccggccggaagtcccgggaggtgtagggctagagttctggccgtggcgggccggtttctgcgtgctgcgtgcgcggccgcgtgggctatggggcggcggtcgcggggtcggcggctccagcaacagcagcggccggaagacgcggaggatggcgccgagggtggtggaaagcgcggcgaggcgggctgggaaggaggctaccccgagatcgtcaaggagaacaagctgttcgagcactactaccaggagctcaagatcgtgcccgagggcgagtggggccagttcatggacgctctcagggagccgctcccggccactttaagaattactggttacaaaagccacgcaaaagagattctccattgcttaaagaacaaatattttaaggaattggaggacctggaggtggacggtcagaaagttgaagttccacagccactgagttggtatcctgaagaacttgcctggcacacaaatttaagtcgaaaaatcttgagaaaatcgccacacttggaaaagtttcatcagtttctagttagtgaaacagaatctggaaatattagtcgtcaagaagctgttagcatgatcccaccactgctcctcaacgtgcggcctcatcataagatcttagatatgtgtgcagcacctggctcaaagaccacacagttaattgaaatgctacatgccgacatgaatgtcccctttccagagggatttgttattgcgaatgatgtggacaacaagcgctgctacctgctcgtccatcaagccaagaggctgagcagcccctgcatcatggtggtcaaccatgatgcctccagcatacccaggctccagatagatgtggacggcaggaaagagatcctcttctatgatcgaattttatgtgatgtcccttgcagtggagacggcactatgagaaaaaacattgatgtttggaaaaagtggaccaccttaaatagcttgcagctacatggcttacagctgcggattgcaacacgcggggctgaacagctggctgaaagtggaagatggtgtattccacgtgttcactaaaccctattgaggatgaagcagtcatagcatctttactggaaaaagtgaagtgctttgga

SEQ ID NO: 185134 - DNA, 1516 bp, Homo Sapiens
actttgtacaaaaaagttggcttaaggtctggctcagtttatgaacctcttaaaagcattaatcttccaagacctgataatgaaactctctgggataagttggaccattattacagaattgtcaagtcaacattgctgctgtatcaaagtccaactaccggtctctttcccactaaaacatgcggtggtgaccagaaggccaagatccaggacagcctatactgcgctgctggggcctgggctttggctcttgcatacaggcgaattgatgatgacaagggaaggacccatgagctggagcactcagctataaaatgcatgagaggaattctctactgctatatgcgtcaggccgataaggtccagcagtttaagcaggatccacgcccaacaacatgtcttcactctgttttcaatgtgcatacaggagatgagttgctttcctatgaggaatatggtcatcttcagataaatgcagtgtcactttatctcctttaccttgtggaaatgatttcctcaggactccagattatctacaacactgatgaggtctcttttattcaaaaccttgtattttgtgtggaaagagtttaccgtgtgcctgactttggtgtctgggaaagaggaagcaaatataataatggcagcacagagctacattcgagctcggttggtttagcaaaagcagctctagaagcaattaatggattcaacctttttggcaaccagggctgttcgtggtcagttatatttgtggatctcgatgctcacaatcgcaacaggcaaactttgtgctcgctgttacccagagaatcaagatcacataatacagatgctgccctgctcccctgcatcagttatcctgcatttgccctggatgatgaagttctttttagccagacacttgataaagtggttagaaaattaaaaggaaaatatggatttaaacgtttcttgagagatgggtatagaacatcattggaagatcccaacagatgctactacaagccagctgaaattaagctatttgatggcattgaatgtgaatttcccatatttttcctttatatgatgattgatggagtttttagaggcaatcctaagcaagtacaggaatatcaggatcttttgactccagtacttcatcataccacagaaggatatcctgttgtaccaaagtactattatgtgccagctgactttgtagaatatgaaaaaaataaccctggtagtcaaaaacgatttcctagcaactgtggccgtgatggaaaactgtttctttggggacaagcactttatatcatcgcaaaactcctggctgatgaacttattagtcctaaagacattgatcctgtccagcgctatgtcccactaaaggatcaacgtaacgtgagcatgaggttttccaatcacggcccactggaaaatgacttggtagttcatgtggcacttatagcagaaagccaaagacttcaagtttttctgagcacatatggtattcaaactcaaactcctc

SEQ ID NO: 185135 - DNA, 1259 bp, Homo Sapiens
ttggggaaaactgtttctttggggacaagcactttatatcatcgcaaaactcctggctgatgaacttattagtcctaaagacattgatcctgtccagcgctatgtcccactaaaggatcaacgtaacgtgagcatgaggttttccaatcagtgcaaggtggttcctacatcctaagtgagaaaaaaatattttttgaccacctcctttgtgcaaatcattgatacaagaaaatgaacctgaccataaatcgcagacaatgggcaaagggcccactggaaaatgacttggtagttcatgtggcacttatagcagaaagccaaagacttcaagtttttctgaacacatatggtattcaaactcaaactcctcaacaagtagaacccattcagatatggcctcagcaggagcttgtgaaagcttatttgcagctgggtatcaatgaaaagttaggactctctggaaggccagacaggcccattggctgcctcgggacatcaaagatttatcgcattctaggaaagactgtggtttgttacccgattattttcgacctaagtgatttctacatgtctcaggatgttttcctgctgatagatgacataaagaatgcgctgcagttcattaaacaatattggaaaatgcatggacgtccacttttccttgttctcatccgggaagacaatataagaggtagccggttcaaccccatattagatatgctggcagcccttaaaaaaggaataattggaggagtcaaagttcatgtggatcgtctacagacactaatatctggagctgtggtagaacaacttgatttcctacgaatcagtgacacagaagagcttccagaatttaagagttttgaggaactagaacctcccaaacattcaaaagtcaaacggcaaagcagcacccctagtgctcctgaactgggacagcagccggatgtcaacattagtgaatggaaggacaaacccacccacgaaattcttcaaaaactgaatgattgcagttgtctggctagccaagccatcctgctgggtatactgctcaaaagagaaggctccaacttcatcacaaaggaaataccgtttctgatcacattgagagagtctatagaagagctggcagccaaaaactttgggtcggttgtacgccgtgcagcaagtcttttaagtaaagtagtggacagcctggtccccatccattactaatgttttagtgcaggcaaacaggtaactctgggtgccctttgggc

SEQ ID NO: 185136 - DNA, 1154 bp, Homo Sapiens
ttggcctgccttagcggcctgcagtgggaagctggagcagcacacggagcggcgtggggtcatctacagcccggcctggcccctcaactacccgccaggcaccaactgcagctggtacatccagggcgaccgtggtgacatgattaccatcagcttccgcaactttgacgtggaggagtcccaccagtgctccctggactggctcctgctgggcccagcagccccaccccgccaggaggccttccgcctctgtggctccgccatcccacctgccttcatctctgcccgcgaccatgtctggattttcttccactcagacgcctccagctccggccaggcccagggcttccgtctgtcttacatccgagggaagctgggccaggcatcctgccaggcagatgagttccgctgtgacaacggcaagtgcctgcccggcccgtggcagtgcaacacggtggacgagtgtggagacggctctgatgagggcaactgctcggcgcccgcctccgagcctccaggcagcctgtgccccggggggaccttcccatgcagcggggcgcgctccacgcgctgcctgcctgtggagcggcgctgtgacggcttgcaggactgcggcgacggctcggatgaggcgggctgccccgacctggcgtgcggccggcggctgggcagcttctacggctcctttgcctccccagacctgttcggcgccgctcgcgggccctcagaccttcactgcacgtggctggtggacacacaggactcccggcgggtgctgctgcagctggaactgcggctgggctatgacgactacgtgcaggtatacgagggcctgggcgagcgcggggaccgcctgctgcagacgctgtcctaccgcagcaaccaccggcccgtgagcctggaggccgcccagggccgcctcactgtggcctaccacgcgcgcgcccgcagcgccggccacggcttcaatgccacctaccaggtgaagggctattgcctcccctgggagcagccgtgcgggagcagtagtgacagttgacggggcagcctgggcgaccagggctgctttctcagagccacagcgctgtgaatggctggtgggattgtgccagcgggccgaaaccaacaggcctgccctggcctgtcccgcccaa

SEQ ID NO: 185137 - DNA, 1872 bp, Homo Sapiens
  misc_feature (1671)..(1680): n is a, c, g, or t
ttgggttcttcagaggacagtggatggcatgcagcaagagggtactccatatacaggtattctctatgctggaataatgctgaccaagaatggcccaaaagttctagagtttaattgccgttttggtgatccagagtgccaagtgggtaaaaatatcaaagtattacttggtagaagatatgtggtattttaatcttggaatttatcagcctggaagtaattacctttgggaaattcatgcaagttctgctagtacaccagtgaataaaatgtttaaggaaaactaaaatttatcccacctgccatgtggattatgtttttccagggtttcctgaggctcaagctctaggactggaggtgttccatgcaggcactgccctcaaaaatggcaaagtagtaactcatgggggtagagttcttgcagtcacagccatccgggaaaatctcatatcagcccttgaggaagccaagaaaggactagctgctataaagtttgagggagcaatttataggaaagacatcggctttcgtgccatagctttcctccagcagcccaggagtttgacttacaaggaatctggagtagatatcgcagctggaaatatgctggtcaagaaaattcagcctttagcaaaagccacttccagatcaggctgtaaagttgatcttggaggttttgctggtctttttgatttaaaagcagctggtttcaaagatccccttctggcctctggaacagatggcgttggaactaaactaaagattgcccagctatgcaataaacatgataccattggtcaagatttggtagcaatgtgtgttaatgatattctggcacaaggagcagagcccctcttcttccttgattacttttcctgtggaaaacttgacctcagtgtaactgaagctgttgttgctggaattgctaaagcttgtggaaaagctggatgtgctctccttggaggtgaaacagcagaaatgcctgacatgtatccccctggagagtatgacctagctgggtttgccgttggtgccatggagcgagatcagaaactccctcacctggaaagaatcactgagggtgatgttgttgttggaatagcttcatctggtcttcatagcaatggatttagccttgtgaggaaaatcgtggcaaaatcttccctccagtactcctctccagcacctgatggttgtggtgaccagactttaggggacttacttctcacgcctaccagaatctacagccattcactgttacctgtcctacgttcaggacatgtcaaagcctttgcccatattactggtggaggattactagagaacatccccagagtcctccctgagaaacttggggtagatttagatgcccagacctggaggatccccagggtcttctcatggttgcagcaggaaggacacctctctgaggaagagatggccagaacatttaactgtggggttggcgctgtccttgtggtatcaaaggagcagacagagcagattctgagggatatccagcagcacaaggaagaagcctgggtgattggcagtgtggttgcacgagctgaaggttccccacgtgtgaaagtcaagaatctgattgaaagcatgcaaataaatgggtcagtgttgaagaatggctcctctgacaaatcatttctcttttgnnnnnnnnnnggccagagtggctgtcttaatatctggaacaggatcgaacctgcaagcacttatagacagtactcgggaaccaaatagctctgcacaaattgatattgttatctccaacaaagccgcagtagctgggttagataaagcggaaagagctggtattctcactagagtaattaatcataaactgtataaaaatcg

SEQ ID NO: 185138 - DNA, 936 bp, Homo Sapiens
ttggcaagtttgttgctcaaaccgagttctggagaacgccatcagctcgctgcttaaaattaaaccacaggttccattatgggtcgacttgatgggaaagtcatcatcctgacggccgctgctcaggggattggccaagcagctgccttagcttttgcaagagaaggtgccaaagtcatagccacagacattaatgagtccaaacttcaggaactggaaaagtacccgggtattcaaactcgtgtccttgatgtcacaaagaagaaacaaattgatcagtttgccaatgaagttgagagacttgatgttctctttaatgttgctggttttgtccatcatggaactgtcctggattgtgaggagaaagactgggacttctcgatgaatctcaatgtgcgcagcatgtacctgatgatcaaggcattccttcctaaaatgcttgctcagaaatctggcaatattatcaacatgtcttctgtggcttccagcgtcaaaggtgggtctgtctccttccgaggactgcgatgctcatacacgcacatcattaagagctctgcgtttgggaacaggcatagcagagattataatttcaagtattgaaatgatttcaaaactgcttttttcaaaattggtattaagttccttaaccacagatcttttgctctcgatgtgagccagtggtaaaattaaattaaaatgtggggtatttttgccctcccttttattctttctaatggacatggaaatgaacatcaaactgggagaaagaaccatttaacatttaattaatttaaaatagtgtattgagcaccggtatgtgctctggccataaaagaattcacagtccaaaactaggagcaaggcagcaaacatcatcttctccagtgtgatgatatataacagaggtttgtacaaagcgctgtcaaaatacaggaa

SEQ ID NO: 185139 - DNA, 1670 bp, Homo Sapiens
ctttgtacaaaaaagttgggatattaccttccaaatgatgatggagaattttatcagttctgttacgttacccataagggtgaaattcgtggagcaagtacacctttccagtttcgagcttcttctccagttgaagagctgcttactatggaagatgaaggaaattctgacatgttagtggtgaccacaaaagcaggccttcttgagttgaaaattgagaaaaccatgaaagaaaaagaagaactgttaaagttaattgccgttctggaaaaagaaacagcacaacttcgagaacaagttgggagaatggaaagagaacttaaccatgagaaagaaagatgtgaccaactgcaagcagaacaaaagggtcttactgaagtaacacaaagcttaaaaatggaaaatgaagagtttaagaagaggttcagtgatgctacatccaaagcccatcagcttgaggaagatattgtgtcagtaacacataaagcaattgaaaaagaaaccgaattagacagtttaaaggacaaactcaagaaggcacaacatgaaagagaacaacttgaatgtcagttgaagacagagaaggatgaaaaggaactttataaggtacatttgaagaatacagaaatagaaaataccaagcttatgtcagaggtccagactttaaaaaatttagatgggaacaaagaaagcgtgattactcatttcaaagaagagattggcaggctgcagttatgtttggctgaaaaggaaaatctgcaaagaactttcctgcttacaacctcaagtaaagaagatacttgttttttaaaggagcaacttcgtaaagcagaggaacaggttcaggcaactcggcaagaagttgtctttctggctaaagaactcagtgatgctgtcaacgtacgagacagaacgatggcagacctgcatactgcacgcttggaaaacgagaaagtgaaaaagcagttagctgatgcagtggcagaacttaaactaaatgctatgaaaaaagatcaggacaagactgatacactggaacacgaactaagaagagaagttgaagatctgaaactccgtcttcagatggctgcagaccattataaagaaaaatttaaggaatgccaaaggctccaaaaacaaataaacaaactttcagatcaatcagctaataataataatgtcttcacaaagaaaacggggaatcagcagaaagtgaatgatgcttcagtaaacacagacccagccacttctgcctctactgtagatgtaaagccatcaccttctgcagcagaggcagattttgacatagtaacaaaggggcaagtctgtgaaatgaccaaagaaattgctgacaaaacagaaaagtataataaatgtaaacaactcttgcaggatgagaaagcaaaatgcaataaatatgctgatgaacttgcaaaaatggagctgaaatggaaagaacaagtgaaaattgctgaaaatgtaaaacttgaactagctgaagtacaggacaattataaagaacttaaaaggagtctagaaatccagcagaaaggaaaatggaagatggagcagatggtgctttttacccagatgaaatacaaaggccacctgtcagagtcctctcttggggactgggaagacaatgttgtctgcagccagcctgctcgaaa

SEQ ID NO: 185140 - DNA, 1994 bp, Homo Sapiens
  misc_feature (1343)..(1360): n is a, c, g, or t
ttggcttcgtaaagcagaggaacaggttcaggcaactcggcaagaagttgtctttctggctaaagaactcagtgatgctgtcaacgtacgagacagaacgatggcagacctgcatactgcacgcttggaaaacgagaaagtgaaaaagcagttagctgatgcagtggcagaacttaaactaaatgctatgaaaaaagatcaggacaagactgatacactggaacacgaactaagaagagaagttgaagatctgaaactccgtcttcagatggctgcagaccattataaagaaaaatttaaggaatgccaaaggctccaaaaacaaataaacaaactttcagatcaatcagctaataataataatgtcttcacaaagaaaacggggaatcagcagaaagtgaatgatgcttcagtaaacacagacccagccacttctgcctctactgtagatgtaaagccatcaccttctgcagcagaggcagattttgacatagtaacaaaggggcaagtctgtgaaatgaccaaagaaattgctgacaaaacagaaaagtataataaatgtaaacaactcttgcaggatgagaaagcaaaatgcaataaatatgctgatgaacttgcaaaaatggagctgaaatggaaagaacaagtgaaaattgctgaaaatgtaaaacttgaactagctgaagtacaggacaattataaagaacttaaaaggagtctagaaaatccagcagaaaggaaaatggaaggtcagaattcccagagtcctcaatgtttcaaaacatgctcagagcaaaatggttatgttctcacattgtcaaatgcacaaccagttctgcaatatggtaatccttatgcatctcaggaaacaagagatggagcagatggtgctttttacccagatgaaatacaaaggccacctgtcagagtcccctcttggggactggaagacaatgttgtctgcagccagcctgctcgaaactttagtcggcctgatggcttagaggactctgaggatagcaaagaagatgagaatgtgcctactgctcctgatcctccaagtcaacatttacgtgggcatgggacaggcttttgctttgattccagctttggttcacaagaagtgtcccctctgtgagttaatgtttcctcctaactatgatcagagcaaatttgaagaacatgttgaaagtcactggaaggtgtgcccgatgtgcagcgagcagttccctcctgactatgaccagcaggtgtttgaaaggcatgtgcagacccattttgatcagaatgttctaaattttgactagttactttttattatgagttaatatagtttagcagtnnnnnnnnnnnnnnnnnnccacacctaaaatagaccactgaggagaccatagagcggatgctttcatgcaccctttactgcactttctgaccaggagctactttgagtttggtgttactaggatcagggtcagtctttggcttatcaataaattttaatctctgttaatcttacctgctttaaaaaaaagttcttgtgtgttcgtatctttatttattccctagtttgcagaactgtctgaataaaggatacaaggattatttcaatgttactgcactgaaaaacgtgtatgtattagtgtgctagattatttagcagaatattcacaagtttctgttgaccttgttgattgagcatgactactaaatattatgtaataaaaagcatttgtcataacagtcttatgaagtagttcttcgaatatagaaagttctataatttagcccatgaaatgataggtttttaattttcagaaatggagctgcatgtagaatgagatcacatgcttttatatgtgaaatattggttttagcaattaacagaaaggcatactttgctattttatggcaaaattttagaatacctggaatgataatttttaaactattcttgaagttgtatgtatatatctaatggggaaaatggaacaaga

SEQ ID NO: 185141 - DNA, 920 bp, Homo Sapiens
ttggcataaagcacatggtctaatctgttacgtaacagcaagacagcgtcacctcacctgttctcgccctcaaatgggaacgctggcctgtgactaaagcatagaccaccaggctgagtatcctgacctgagtcatccccagggatcaggagcctccagcagggaaccttccattatattcttcaagcaacttacagctgcaccgacagttgcgatgaaagttctaatctcttccctcctcctgttgctgccactaatgctgatgtccatggtctctagcagcctgaatccaggggtcgccagaggccacagggaccgaggccaggcttctaggagatggctccaggaaggcggccaagaatgtgagtgcaaagattggttcctgagagccccgagaagaaaattcatgacagtgtctgggctgccaaagaagcagtgcccctgtgatcatttcaagggcaatgtgaagaaaacaagacaccaaaggcaccacagaaagccaaacaagcattccagagcctgccagcaatttctcaaacaatgtcagctaagaagctttgctctgcctttgtaggagctctgagcgcccactcttccaattaaacattctcagccaagaagacagtgagcacacctaccagacactcttcttctcccacctcactctcccactgtacccacccctaaatcattccagtgctctcaaaaagcatgtttttcaagatcattttgtttgttgctctctctagtgtcttcttctctcgtcagtcttagcctgtgccctccccttacccaggcttaggcttaattacctgaaagattccaggaaactgtagcttcctagctagtgtcatttaaccttaaatgcaatcagggaaagtagcaaacagaagtccataaatattttttaaacgtcacag

SEQ ID NO: 185142 - DNA, 1658 bp, Homo Sapiens
  misc_feature (362)..(374): n is a, c, g, or t
  misc_feature (1036)..(1049): n is a, c, g, or t
ccaaacccaacaaatacagtttgtaaacacaagcataaatagacagattctgtattggaagatagtctctgcaggttgggaaagggaaccgactcccactgtcaccgaaatgttatacaaaaacatatgcgcagatagaatttggtaacatgagaatagctttcatagtttcttctaggctttaccttttctgccagatttcataactattttaatttttaaaaaagtaaatatctctttcctctatctagataactagcatattttctcatttgaggcagattcctttaaaatatgtaagttgattgtgttcaagatttgatttctcagcctctttctaaacctgaggcaatctgaccttnnnnnnnnnnnnngctgtttaccactaagatatgtgtattataatattaatgttcttttaatccaaaccagttaatgtttaacatgatgtggcttctaaaacagctggagccctgcgatacgtgattaatacactctcatctcagttagaagcacagatttgactctgctccatcttcacaaacaacacatctcctttacagtctgtaaaaactgagcacgcaaagcaagaaaaaggagcaaacccgcaacagctccatactcaaaacaaatcctcgtgggtgctgctgttggtccactcagaaacagaaacaaccagagagaaagagaagaaaaactttatgcgcccgaggtgtaaactgtagttaaagtgtccccactcgagaaaacaggaggcacaatcgaaagtgctttttacacacgtgtgcgtgcacacgcacaactaaaaacgtgattctgatttgttgcaaattcttccaacaggaagaatcactgtaagttgttactactaaattaacttggttttatttattttcttttctagccaatactgatgcaagaaaatatttcaattctcaacctgattaatgtactgcagagtctgttccactggggaaaaaatgcagagaggcattgcttcaaagccttgatccagattaaagtgatagagaccttnnnnnnnnnnnnnnctgaaaacatgtattggtgatcactgtttcccttaaaatatacttcaagaaatgcaaaggaaaccatagaatttaaaaggaaaataaaaagtgctctcaggggatctgagaaaacagcaccaaatatattatttaaaaaattaaatattatttacaaaagtatattttacaagcaactgtttcttttatatatatccacttgaaaatctctttataaagggtcatctctttcgcacacactgatccaccagtaaaaatgcactctagcctatcctcgtgaactcaggaagaacactcagtcaggttcagctgacagcttgtgggtatcgagtttagctgtgtttggttcatgtcaaatcaatccatcagcagcctgagactaatgtcccgggtcccgaggggtctgggtctactccaaggtggccaaggtcatatgacctagggtggcacaggggagatggagctagagagtctgctggctggacttcagttccaaacgaaggcagctgctggctgaggtatagaacttcatgccttttcctttctcacgtccccttaccctgtctctactcccaacaccccgcccccaaacttcaccaacaaacccaa

SEQ ID NO: 185143 - DNA, 1245 bp, Homo Sapiens
  misc_feature (368)..(380): n is a, c, g, or t
  misc_feature (1042)..(1052): n is a, c, g, or t
ttgggattgatttgacatgaaccaaacacagccaaactcgatacccacaagctgtcagctgaacctgactgagtgttcttcctgagttcacgaggataggctagagtgcatttttactggtggatcagtgtgtgcaaaagagatgaccctttataaagagattttcaagtggatatatataaaagaaacagttgcttgtaaaatatacttttgtaaataatatttaattttttaaataatatatttggtgctgttttctcagatcccctgagagcactttttattttccttttaaattctatggtttcctttgcatttcttgaagtatattttaagggaaacagtgatcaccaatacatgttttcagnnnnnnnnnnnnnaaggtctctatcactttaatctggatcaaggctttgaagcaatgcctctctgcattttttccccagtggaacagactctgcagtacattaatcaggttgagaattgaaatattttcttgcatcagtattggctagaaaagaaaataaataaaaccaagttaatttagtagtaacaacttacagtgattcttcctgttggaagaatttccaacaaatcagaatcacgtttttagttgtgcgtgtgcgcgcacacgtgtgtaaaaagcactttcgattgtgcctcctgttttctcgagtggggacactttaactacagtttacacctcgggcgcataaagtttttcttctctttctctctggttgtttctgtttctgagtggaccaacagcagaacccacgaggatttgttttgagtatggagctgttgcgggtttgctcctttttcttgctttgcgtgctcagtttttacagactgtaaaggagatgtgttgtttgtgaagatggagcagagtcaaatctgtgcttctaactgagatgagagtgtattaatcacgtatcgcagggctccagctgttttagaagccacatcatgttaaacattaactggtttggattaaaagaacattaatattataatacacatatcttagtggtaaacagcnnnnnnnnnnnagggtcagattgcctcaggtttagaaagaggctgagaaatcaaatcttgaacacaatcaacttacatattttaaaggaatctgcctcaaatgagaaaatatgctagttatctagatagaggaaagagatatttacttttttaaaattaaaaatagttatgaaatctggcagaaaaggtaaagcctagaagaaa

SEQ ID NO: 185144 - DNA, 2204 bp, Homo Sapiens
ttgggaatgagactcgtcgcaccgaagccgccgccaccaccgcgcctccgcctcggccgccgccgcagctgctcctggtccccgtccctttgccgccctcgtcaggcccagctctcctgcgccgccgcctcccgccgcgccccgccatgccgctctactccgttactgtaaaatggggaaaggagaaatttgaaggtgtagaattgaatacagatgaacctccaatggtattcaaggctcagctgtttgcgttgactggagtccagcctgccagacagaaagttatggtgaaaggaggaacgctaaaggatgatgattggggaaacatcaaaataaaaaatggaatgactctactaatgatggggtcagcagatgctcttccagaagaaccctcagccaaaactgtcttcgtagaagacatgacagaagaacagttagcatctgctatggagttaccatgtggattgacaaaccttggtaacacttgttacatgaatgccacagttcagtgtattcgttctgtgcctgaactcaaagatgcccttaaaaggtatgcaggtgccttgagagcttcaggggaaatggcttcagcgcagtatattactgcagcccttagagatttgtttgattccatggataaaacttcttccagtattccacctattattctactgcagtttttgcacatggctttcccacagtttgccgagaaaggtgaacaaggacagtatcttcaacaggatgctaatgaatgttggatacaaatgatgcgagtattgcaacagaaattggaagcaatagaggatgattctgttaaagagacagactcctcatctgcatcggcagcgacaccttctaaaaagaaaagtttaatcgatcagttcttcggtgttgagtttgaaactaccatgaaatgtacagaatctgaagaagaagaagtcaccaaaggaaaggaaaatcaacttcagcttagctgttttatcaatcaggaagtcaagtatctttttacaggacttaaattgcgacttcaggaagaaatcaccaaacagtctccaacgttgcaaagaaatgccttgtatatcaaatcttccaagatcagccggctgcctgcttacttgaccattcagatggttcgatttttttataaagagaaggaatctgtgaatgccaaagttcttaaggatgttaaatttcctcttatgttggatatgtatgaactgtgtacaccagaacttcaagagaaaatggtgtcttttcgatccaaattcaaggatctagaagataaaaaaagtgaatcagcagccaaatacaagtgacaaaaagagtagtccccagaaagaagttaagtatgaacccttttcttttgctgatgatattggctccaataattgtggatactatgacttacaagcagtactaacacaccagggaaggtctagttcttcaggtcattatgtatcatgggtgaaaaggaaacaagatgaatggattaagtttgatgatgacaaagtcagcatcgtaacaccagaagatatcttacggctttctggtggtggagactggcatatcgcttacgttctactctatgggcctcgcagagttgaaataatggaagaggaaagtgaacagtaatcttcattttagtatttatgcttagatgtgaaaataaatgttatttgttgatcatttctataatccagagctttagaggaagacacataggtgggtttatgtttcacctcatttggaacaaaagaggacagaagcagaccactctgtgcaccaacctaaaaaattacagagaagagaaaattatctttggattgtgctgccctatataaaggtggcagaaagacatttttaaaaagcttattatttcttgcattattttaaaaagttcagagttgaaatgcctttcaaccatttccttctgtggtcatttttcttgctgcctttttcacccaagattcagcagtcagatgtttactgcacacctattacctattatttgctgttcttgcatggttcaaaccaccattctgtagccacccatcctttgccttatctaacaacatttttccaggaaagtggaaaaggaagtgttgctctcattgtgtgactcagtgctgctgtccatcccatggaaacatgggcacaatcaagtatttgtccaggcctattgcaaggcttttcctgactttaaa

SEQ ID NO: 185145 - DNA, 989 bp, Homo Sapiens
ctttgtacaaaaaagttggcccaaatcctgttgtccagatgtcagttgggcacaaggcccaggagagcaagattcgatacaaaaccaatgaacctgtgtgggaggaaaacttcactttcttcattcacaatcccaagcgccaggaccttgaagttgaggtcagagacgagcagcaccagtgttccctggggaacctgaaggtccccctcagccagctgctcaccagtgaggacatgactgtgagccagcgcttccagctcagtaactcgggtccaaacagcaccatcaagatgaagattgccctgcgggtgctccatctcgaaaagcgagaaaggcctccagaccaccaacactcagctcaagtcaaacgtccctctgtgtccaaagaggggaggaaaacatccatcaaatctcatatgtctgggtctccaggccctggtggcagcaacacagctccatccacaccagtcattgggggcagtgataagcctggtatggaagaaaaggcccagccccctgaggccggccctcaggggctgcacgacctgggcagaagctcctccagcctcctggcctccccaggccacatctcagtcaaggagccgacccccagcatcgcctcggacatctcgctgcccatcgccacccaggagctgcggcaaaggctgaggcagctggaaaacgggacgaccctgggacagtctccactggggcagatccagctgaccatccggcacagctcgcagagaaacaagcttatcgtggtcgtgcatgcctgcagaaacctcattgccttctctgaagacagctctgacccctatgtccgcatgtatttattaccagacaagaggcggtcaggaacgaggaaacacacgtgtcaagaaaacatttaaatccagtgtttgatcaaagctttgatttcagtgtttcgttaccagaaattgcagaggagaacctcgacgttgccgtgaagaacagtggcggcttcc

SEQ ID NO: 185146 - DNA, 1211 bp, Homo Sapiens
ttggcagacttggtgataattctgaattatgaccgtgctgtagaagcttttgcaaaaggcggaaatctgaccctcggagggaacttgactgtggcggttgggcccttgggaagattttattgtcaagatatccgagcttatgacattttatttggagatacaccgcggcctgctcaagccgaagatctttatgaaattcttgattcctttactgaaaagtatgaaaatgaaggacaacgaatcaatgcaagaaaagcagcaagggagcagaggaagtcttctgctaaagaattacctccaaagccattgtcaagaccacagcagtcatctgcaccagtccagctgaactctggctctcaaagcaatttgaatcaacccatagaagtgacagcgctgtattcatttgaaggacagcagcctggggatttgaattttcaagctggagacagaatcacagttatatcaaaaacagattcacattttgattggtgggaaggaaaacttcgaggtcaaactggcatttttccagccaactacgtaaccatgaattaaagcgtatactattttcttctttgagaattacaaaaaaattatttctacactgacaggatttactagttaagcaatgtttaatataaattttaaaaaacttctgttctacaaaatttccattccgtatgtaaaagattttgtttttctatataaaaagagctgactgacatatctttaaatactttgtactaactttatcacacttactgtgtcatagaatatcatacagtttatacgctcatagttctcttgtgaacacttcaaacatcgctaagcatttgatctggccatgtatatggtagctgtgttttaatttgagaatcttgagggtagagccacaaatttcaattcttacatttccatttgcaaagtgactagagaaaaagaaatcagcttaaatgaggtattaagtaatgtttagagttgtaggtattaactagaatataaatccttagaaattgtctttataccttcaaaaattatactatgcatttatcatagaaatgtgattacaaagaagtctgactaccatgtctttaaacatatggcatctctcaacttttcttccttatggggctacatttgttcatttccagcagtagcataaacttacggtgacatggtagacttgtctctaataaaaattttaaatgttaact

SEQ ID NO: 185147 - DNA, 1623 bp, Homo Sapiens
ttggggcagagagggccttcagcctttggtgttcaatccagatactggactccaatctgaactcctcagttttgtgatggatcacgtttttattgaccaagacgaggagaaccagagcatggagggtgatgaagaagatgaagctaataaaattgaggccttacataaaagaaggaatctacttgctgctttcagcaaacttatcatttatgacattgttgacatgcatgcagctgcagacatcttcaaacactacatgaagtattacaatgactatggtgatattattaaggaaacactgagtaaaaccaggcagattgataaaattcagtgtgccaagactctcattctcagtttgcaacagttatttaatgaacttgttcaagagcaaggtcccaacctagataggacatctgcccatgtcagtggcattaaagaactggcacgtcgctttgcccttacatttggattggaccagattaagacacgagaagcagttgccacacttcacaaggatggcatagagtttgcatttaaataccaaaatcagaaaggacaagagtatccacctcctaatctggcttttcttgaagtactaagtgaattttcttctaaacttcttcgacaggacaaaaagacagttcattcatacctagagaaattccttaccgagcagatgatggaaaggagggaggatgtatggcttccactcatctcctatagaaattcattagtcactgggggtgaagatgatagaatgtctgtgaacagtggaagtagcagcagcaaaacctcatcagtaaggaataagaaaggacgacctccacttcataaaaaacgagtagaagatgagagtctggataacacatggctaaacaggactgacaccatgattcagactcctggccccctgccagcaccacaactcacatccactgtactgcgggagaacagtcggcccatgggagaccagattcaagaacctgagtctgaacatggttctgaaccagactttttacacaatcctcagatgcagatctcttggttaggccagccgaagttagaagacttaaatcggaaggacagaacaggaatgaactacatgaaagtgagaactggagtgaggcatgctgttcggggtctaatggaggaagatgctgagcccatctttgaagatgtgatgatgtcatcccgaagccagttagaagatatgaatgaagaatttgaggacaccatggttattgatctgcctccatcaagaaatcggcgagagagagctgagctaaggccagacttctttgactctgcagctatcatagaagatgattcaagatttggaatgcctatgttctgaagtctgaagaaaatttacaaatctggaactctattatttagagctagaggcctatatactgtgatagcttgtatggggaaaaacacttttgatgtgatctgatttgttttttaatcaaatgattaagtcaatccctttttgcagtgacagaagaggagcatgtaaattacccaagggaatgttggtgaatgtcaactcagaagactgacctggaaaatcatttgtgtcctactattggactatcccaatacagatgtgtgtgttttttc

SEQ ID NO: 185148 - DNA, 1488 bp, Homo Sapiens
ttggctgagacacccgctgtttggccgcaacgtgcccctgtccagcggttctggcttcatcatgtcagaggccggcctgatcatcaccaatgcccacgtggtgtccagcaacagtgctgccccgggcaggcagcagctcaaggtgcagctacagaatggggactcctatgaggccaccatcaaagacatcgacaagaagtcggacattgccaccatcaagatccatcccaagaaaaagctccctgtgttgttgctgggtcactcggccgacctgcggcctggggagtttgtggtggccatcggcagtcccttcgccctacagaacacagtgacaacgggcatcgtcagcactgcccagcgggagggcagggagctgggcctccgggactccgacatggactacatccagacggatgccatcatcaactacgggaactccgggggaccactggtgaacctggatggcgaggtcattggcatcaacacgctcaaggtcacggctggcatctcctttgccatcccctcagaccgcatcacacggttcctcacagagttccaagacaagcagatcaaagactggaagaagcgcttcatcggcatacggatgcggacgatcacaccaagcctggtggatgagctgaaggccagcaacccggacttcccagaggtcagcagtggaatttatgtgcaagaggttgcgccgaattcaccttctcagagaggcggcatccaagatggtgacatcatcgtcaaggtcaacgggcgtcctctagtggactcgagtgagctgcaggaggccgtgctgaccgagtctcctctcctactggaggtgcggcgggggaacgacgacctcctcttcagcatcgcacctgaggtggtcatgtgaggggcgcattcctccagcgccaagcgtcagagcctgcagacaacggagggcagcgcccccccgagatcaggacgaaggaccaccgtcggtcctcagcagggcggcagcctcctcctggctgtccggggcagagcggaggctgggcttggccaggggcccgaatttccgcctggggagtgttggatccacatcccggtgccggggagggaagcccaacatccccttgtacagatgatcctgaaagtcacttccaagttctccggatattcacaaaactgccttccatggaggtcccctcctctcctagcttcccgcctctgcccctgtgaacacccatctgcagtatcccctgctcctgcccctcctactgcaggtctgggctgccaagcttcttcccccctgacaaacgcccacctgacctgaggccccagcttccctctgccctaggacttaccaagctgtagggccagggctgctgcctgccagcctggggtccctggaggacaggtcacatctgatccctttggggtgcgggggtggggtccagcccaaagcaggcactgagtgaatgccccctggctgcggagctgagccccgccctg

SEQ ID NO: 185149 - DNA, 1151 bp, Homo Sapiens
  misc_feature (777)..(819): n is a, c, g, or t
ttggcgagggaggacagcggggcctggcgctggcgccgagacgccgcttagcggccgccactggagacactccctcccgcctcccgggtctcctggcggcggcggagtgaggctgacagcggggaacctgggagacccctccgccctccccgcggtggcagcggccgatccccggctccggcgcgagggacggccgcgatgcgctcggcctgaggttacccggcccggcccttcctcgcttccctcgactattccactgcgtctccgcgccccggcgtcatcctgcgagtccctctgacgggagggaagatggctgcacggagctggcaggacgagctggcccagcaggccgaggagggctcggcccggctgcgggaaatgctctcggtcggcctaggctttctgcgcaccgagctgggcctcgacctggggctggagccgaaacggtaccccggctgggtgatcctggtgggcactggcgcgctcgggctgctgctgctgtttctgctgggctacggctgggccgcggcttgcgccggcgcccgcaaaaagcggaggagcccgccccgcaagcgggaggaggcggcggccgtgccggccgcggcccccgacgacctggccttgctgaagaatctccggagcgaggaacagaagaagaagaaccggaagaaactgtccgagaagcccaaaccaaatgggcggactgttgaagtggctgagggtgaagctgttcgaacacctcaaagtgtaacagcaaagcagccaccagagattgannnnnnnnnnnnnnnnnnnnnnnnnnnnnnnnnnnnnnnnnnntcagatgctaaagcagtgcaaaacagttcacgccatgatggaaaggaagttgatgaaggagcctgggaaactaaaattagtcacagagagaaacgacagcagcgtaaacgtgataaggtgctgactgattctggttcattggattcaactatccctgggatagaaaataccatcacagttaccaccgagcaacttacaaccgcatcatttcctgttggttccaagaagaataaagtgattctcatctaaatgttcaagttagcaactttaaatctggaaaaggagattctacacttcacgtttcttcaggattgaatgaaaacctcactgtc

SEQ ID NO: 185150 - DNA, 1452 bp, Homo Sapiens
aattgatgagcaatgcttttctttaaaagagccactttgtacaaaaaagttggtaatttaagaatccttatcctggtttaacaacagtgccctgtttacaacagattgtgccctatctcatctgcagccgaggaataaaggattctgattagaaagagggttgcctacagattagtaagcaattccttggatcttatgcacagaacttgtaccatttgaatctgttttatgcttaaatcaaagtgctttgatcaaatgcataacctgccatatctttacatatttgttggtagcaatttgtattaaagaaatcacaagtgcaaataaaaagtcatttatcatttgtttaactaaactgtcatggtttagtttacaatttttaaaaagttcttaaaatactgaaaatgcagttgacacttgtgtatggcttatgaagttatttttgatagtcttacattacttgaattgttcaaagtacagtatattttaaattaagaaaagtgaactatatgtatttgttttatacatttaaggcttagactcataaataatgctattgtttatgatttgaaaactttcaggcaaaatccaatttacatttttcccttccctagcaattacttttttccagcttcaactcttcttagttactaatactttgttgactttaaaaatgaaatcattcacaaacttttggtatatgatggagaatgaaaaactagagtcagacagctttaattgacattgtcaacacctccagttatcaggaatacatttttttactgccttaacctgtagtgcgtagaatatgcatcaatttcttgaaggagattcatgtttttataagaattttcatgtaattattgcaattgtggtcaaataaggaacgtttcctgcttgaaattatattgatttaaatgatgtgtgagatgtttcaccattttcaggcactgtgtaattctattgtaataaactggcaggtatctttgtaactataaatagtgcatgctcagccatgtacactgtaaatagcctttaccaaacgtgtttgacaaggaccataattaacatcacttagtgaattgtgataaagaaaaaaaagccatgatttattcgatgtgattggcttgtttttatgtggcgccaagaacgaacctgtttaacagctgtaaccaatggtactgatctatccatccaatgttgtcattatatttgactgtggttcaacagtattgcgttgtcagactaagaaagctaaacgaacaaaaatggttttagttttgctgaagactggcctttattaatggacagctttcctaaacaagagattattaacttttatcaagtgttaacatctgtttcaggaacatggcagtatgttaacatgtcagaagttttgtttaattctatggtatttctaatttgacttgtttaaataattcagccaaatgg

SEQ ID NO: 185151 - DNA, 1567 bp, Homo Sapiens
  misc_feature (66)..(108): n is a, c, g, or t
  misc_feature (826)..(845): n is a, c, g, or t
ttggctgagggtgaagctgttcgaacacctcaaagtgtaacagcaaagcagccaccagagattgannnnnnnnnnnnnnnnnnnnnnnnnnnnnnnnnnnnnnnnnnntcagatgctaaagcagtgcaaaacagttcacgccatgatggaaaggaagttgatgaaggagcctgggaaactaaaattagtcacagagagaaacgacagcagcgtaaacgtgataaggtgctgactgattctggttcattggattcaactatccctgggatagaaaataccatcacagttaccaccgagcaacttacaaccgcatcatttcctgttggttccaagaagaataaaggtgattctcatctaaatgttcaagttagcaactttaaatctggaaaaggagattctacacttcaggtttcttcaggattgaatgaaaacctcactgtcaatggaggaggctggaatgaaaagtctgtaaaactctcctcacagatcagtgcaggtgaggagaagtggaactccgtttcacctgcttctgcaggaaagaggaaaactgagccatctgcctggagtcaagacactggagatgctaatacaaatggaaaagactggggaaggagttggagtgaccgttcaatattttctggcattgatggtctgtcttctgctgatcccaactctgattggaatgcaccagcagaagagtggggcaattgggtagacgaagaaagagcttcacttctaaagtcccaggaaccaattcctgatgatcaaaaggtctcagatgatgataaagaaaagggagagggagctcttccaactgggaaatccnnnnnnnnnnnnnnnnnnnngaagaagcaaggtgaagataactctactgcacaggacacagaagaattagaaaaagagattagagaagaccttccagtgaatacctctaaaacccgtccaaaacaggaaaaagctttttccttgaagaccataagcactagtgatccagccgaagtactcgtcaaaaatagccagcctatcaagactcttccacctgctacttctaccgagccatctgtaatcttatcaaaaagtgattctgacaagagctcttcccaagtgccgccaatactacaagagacagataaatccaagtcaaataccaagcaaaatagtgtgcctccttcacagaccaagtctgaaactagctgggaatctcccaaacaaataaaaaagaagaaaaaagccagacgagaaacgtgaaattttttttcctgaattggacatgtgtttgcaaacacttgtcttgaagattatgctgtttatgcaataatttgtgaacatgtacagagttttatataaatttaaaccaatttttaaaacaaaactgcggacaccaccataaaaatggaatcaaaagaaagttaatttatgaaattaagaggtcagcagaatatactcagtgatggaagacacttgggaaagtctttttaatagaacaagaacgatcttaatttaagaatattatcctggtttaacaacagtgccctgtttacacagattgtgccctatctcatctgca

SEQ ID NO: 185152 - DNA, 1248 bp, Homo Sapiens
ggcaagtggtagttggaggaagcgtcaaagctcgagttgttccctcggtgcaggggagacaaatgggctgatagtctggccatatttcagcttattcttgagcttgatcagggcaacgtcatagtcataaaattcaggaattcctgcttcttttttcccattaatgttgtagttggggtgaaataggactacttctatctccaggtcccgcttctcccctcctacgctgaccttgattgagtgttccttgtcatccacagtgaaacaatgtgctgctgtcagcacaaagtactcagacaccacagcccccatacagctctcgtgtccctttgaagggcgaatgactgagatcttggcctgccatggttgcttgtggtaatcggtacccttcctgtgttcccaaaccatgccacagagactcagagactggctttcatcgatcatttggtagaaaacatcttccaggttttccatatccttgactttgaacacatgttgctcattgtctttcttggaagccaaagcattgatgttcacttggttcaccaaaggcccgaccccaaacacatagacatctgagggataaaaaggaaggatgagggtccaagccctgaggaagtggggtgctgggtcctaggcaggttactcacccagataatcctcccttgggtttttgcgatccttgccaatgtatagcaagtcccggatctcatcaatgacagtaattgggtccccgcccatgttgtgcaatcctgcagaagagacaggaccatgagggtaggagataaggaagataaactggctaaaggcagggatacacatggcagggtgagcaagttgaggaagggttagagatagttgatcacagggcttaggaagaattccttatgaagggtcacaggagagatgaacagccagctatgagtcacattcagggccccaaccatgggtatagtgttacaagtggacttaagggccacatgctggtctgagaaggtggggaggctgggacaggagagaggtcccttctgaccatcagtcatgaggatgatgacatggcgggtgcggttccagccttcaggagggacgtcatctggccagctcatcatgctgtacactgcctggagggccttcttggtgttagtccctgacttcaacttgtggtcttcataattgatttcattgagctgcttcgtgacccagtctgcattactgctgtctgcttcagacactttgacccaaatccaa

SEQ ID NO: 185153 - DNA, 997 bp, Homo Sapiens
ctttgtacaaaaaagttggggaaaacctctttaaaaaagttttctaccaaatgatcgatgaaagccagtctctgagtctctgtggcatggtttgggaacacaggacgggtaccgattaccacaagcaaccatggcaggccaagatctcagtcattcgcccttcaaagggacacgagagctgtatgggggctgtggtgtctgagtactttgtgctgacagcagcacattgtttcactgtggatgacaaggaacactcaatcaaggtcagcgtaggaggggagaagcgggacctggagatagaagtagtcctatttcaccccaactacaacattaatgggaaaaaagaagcaggaattcctgaattttatgactatgacgttgccctgatcaagctcaagaataagctgaaatatggccagactatcaggcccatttgtctcccctgcaccgagggaacaactcgagctttgaggcttcctccaactaccacttgccagcaacaaaaggaagagctgctccctgcacaggatatcaaagctctgtttgtgtctgaggaggagaaaaagctgactcggaaggaggtctacatcaagaatggggataagaaaggcagctgtgagagagatgctcaatatgccccaggctatgacaaagtcaaggacatctcagaggtggtcacccctcggttcctttgtactggaggagtgagtccctatgctgaccccaatacttgcagaggtgattctggcggccccttgatagttcacaagagaagtcgtttcattcaagttggtgtaatcagctggggagtagtggatgtctgcaaaaaccagaagcggcaaaagcaggtacctgctcacgcccgagactttcacatcaacctctttcaagtgctgccctggctgaaggagaaactccaagatgaggatttgggttttctataaggggtttcctgctggacaggggcgtgggattgaattaaaacagctgcgacaac

SEQ ID NO: 185154 - DNA, 1680 bp, Homo Sapiens
ttggcttggctgagccaagcagacaagcaaagcaagccaggacacaccatcctgccccaggcccagcttctctcctgccttccaacgccatggggagcaatctcagcccccaactctgcctgatgccctttatcttgggcctcttgtctggaggtgtgaccaccactccatggtctttggcccggccccagggatcctgctctctggagggggtagagatcaaaggcggctccttccgacttctccaagagggccaggcactggagtacgtgtgtccttctggcttctacccgtaccctgtgcagacacgtacctgcagatctacggggtcctggagcaccctgaagactcaagaccaaaagactgtcaggaaggcagagtgcagaggtttgagggcaatgagtgtgggcagtggcctaaggcagaaacagggcaggcggcagcaaggtcaggactaggatgagactaggcagggtgacaaggtgggctgaccgggagtaggagcagttttagggtggcaggcggaaagggggcaagaaaaagcggagttaacccttactaagcatttaccctgggcttccaggcagccctggaagtcaagagaacactcagaaatggggagggagaagcagtggaaatccatatgggttgaggagtaggtaagatgctgcttctgcgggactgggaatgcgctgtttctcagtgacatggtctccgagaccaggagggatacacctaagcagcctttccctcttgatgacttctacttgtccccccttctcaaagcaatccactgtccaagaccacacgacttcgagaacggggaatactggccccggtctccctactacaatgtgagtgatgagatctctttccactgctatgacggttacactctccggggctctgccaatcgcacctgccaagtgaatggccggtggagtgggcagacagcgatctgtgacaacggaggtgagaagcatcccctccccctacattgctgtctccctgacggcgcccagcccgaggagtgggcactcggctccggacactgtaactcttgctctctaccttgctcacggggcctcaggcttcagtgcttacctcgatgtctcatacctctgcagcggggtactgctccaacccgggcatccccattggcacaaggaaggtgggcagccagtaccgccttgaagacagcgtcacctaccactgcagccgggggcttaccctgcgtggctcccagcggcgaacgtgtcaggaaggtggctcttggagcgggacggagccttcctgccaagactccttcatgtacgacacccctcaagaggtggccgaagctttcctgtcttccctgacagagaccatagaaggagtcgatgctgaggatgggcacggcccaggggaacaacagaagcggaagatcgtcctggacccttcaggctccatgaacatctacctggtgctagatggatcagacagcattggggccagcaacttcacaggagccaaaaagtgtctagtcaacttaattgagaaggtggaatcctcctatccctgaactcgggggaatggaatctcgctgatcttccaggactagctccctgatcattccagcccctctgaacaacagggccccaggaaaatctccaggtcctattctgtcctccttccctttta

SEQ ID NO: 185155 - DNA, 2300 bp, Homo Sapiens
aactttgtacaaaaaagttgggaccaggtctaggtctggagtttcagcttggacactgagccaagcagacaagcaaagcaagccaggacacaccatcctgccccaggcccagcttctctcctgccttccaacgccatggggagcaatctcagcccccaactctgcctgatgccctttatcttgggcctcttgtctggaggtgtgaccaccactccatggtctttggcccggccccagggatcctgctctctggagggggtagagatcaaaggcggctccttccgacttctccaagagggccaggcactggagtacgtgtgtccttctggcttctacccgtaccctgtgcagacacgtacctgcagatctacggggtcctggagcaccctgaagactcaagaccaaaagactgtcaggaaggcagagtgcagagcaatccactgtccaagaccacacgacttcgagaacggggaatactggccccggtctccctactacaatgtgagtgatgagatctctttccactgctatgacggttacactctccggggctctgccaatcgcacctgccaagtgaatggccggtggagtgggcagacagcgatctgtgacaacggagcggggtactgctccaacccgggcatccccattggcacaaggaaggtgggcagccagtaccgccttgaagacagcgtcacctaccactgcagccgggggcttaccctgcgtggctcccagcggcgaacgtgtcaggaaggtggctcttggagcgggacggagccttcctgccaagactccttcatgtacgacacccctcaagaggtggccgaagctttcctgtcttccctgacagagaccatagaaggagtcgatgctgaggatgggcacggcccaggggaacaacagaagcggaagatcgtcctggacccttcaggctccatgaacatctacctggtgctagatggatcagacagcattggggccagcaacttcacaggagccaaaaagtgtctagtcaacttaattgagaaggtggcaagttatggtgtgaagccaagatatggtctagtgacatatgccacataccccaaaatttgggtcaaagtgtctgaagcagacagcagtaatgcagactgggtcacgaagcagctcaatgaaatcaattatgaagaccacaagttgaagtcagggactaacaccaagaaggccctccaggcagtgtacagcatgatgagctggccagatgacgtccctcctgaaggctggaaccgcacccgccatgtcatcatcctcatgactgatggattgcacaacatgggcggggacccaattactgtcattgatgagatccgggacttgctatacattggcaaggatcgcaaaaacccaagggaggattatctggatgtctatgtgtttggggtcgggcctttggtgaaccaagtgaacatcaatgctttggcttccaagaaagacaatgagcaacatgtgttcaaagtcaaggatatggaaaacctggaagatgttttctaccaaatgatcgatgaaagccagtctctgagtctctgtggcatggtttgggaacacaggaagggtaccgattaccacaagcaaccatggcaggccaagatctcagtcattcgcccttcaaagggacacgagagctgtatgggggctgtggtgtctgagtactttgtgctgacagcagcacattgtttcactgtggatgacaaggaacactcaatcaaggtcagcgtaggtaaggatgcaactgaaggtcctgggctgcacctatgctctccaggcaacacctcccactttctacagatcctacactccacccatcctcaatgcagccccattccttgcaccccagaccagtcagggatgggggaagacgtgaagttaggaatgacacggggccagaggcaggaagctgcccacaaagaggtggtacctactctcctacttcaggaggggagaagcgggacctggagatagaagtagtcctatttcaccccaactacaacattaatgggaaaaaagaagcaggaattcctgaattttatgactatgacgttgccctgatcaagctcaagaataagctgaaatatggccagactatcaggtgagagcgtccagatccctgaggaaaggctgggaaaggctggaggactggggtgaggagcagcctggtttgctgttctccttgtcctttataggcccatttgtctcccctgcaccgagggaacaactcgagctttgagcttcctccaactaccacttgccagcaaccaaaa

SEQ ID NO: 185156 - DNA, 1416 bp, Homo Sapiens
ctttgtacaaaaaagttggcgacacccctcaagaggtggccgaagctttcctgtcttccctgacagagaccatagaaggagtcgatgctgaggatgggcacggcccaggggaacaacagaagcggaagatcgtcctggacccttcaggctccatgaacatctacctggtgctagatggatcagacagcattggggccagcaacttcacaggagccaaaaagtgtctagtcaacttaattgagaaggtggcaagttatggtgtgaagccaagatatggtctagtgacatatgccacataccccaaaatttgggtcaaagtgtctgaagcagacagcagtaatgcagactgggtcacgaagcagctcaatgaaatcaattatgaagaccacaagttgaagtcagggactaacaccaagaaggccctccaggcagtgtacagcatgatgagctggccagatgacgtccctcctgaaggctggaaccgcacccgccatgtcatcatcctcatgactgatggattgcacaacatgggcggggacccaattactgtcattgatgagatccgggacttgctatacattggcaaggatcgcaaaaacccaagggaggattatctggatgtctatgtgtttggggtcgggcctttggtgaaccaagtgaacatcaatgctttggcttccaagaaagacaatgagcaacatgtgttcaaagtcaaggatatggaaaacctggaagatgttttctaccaaatgatcgatgaaagccagtctctgagtctctgtggcatggtttgggaacacaggaagggtaccgattaccacaagcaaccatggcaggccaagatctcagtcattcgcccttcaaagggacacgagagctgtatgggggctgtggtgtctgagtactttgtgctgacagcagcacattgtttcactgtggatgacaaggaacactcaatcaaggtcagcgtaggaggggagaagcgggacctggagatagaagtagtcctatttcaccccaactacaacattaatgggaaaaaagaagcaggaattcctgaattttatgactatgacgttgccctgatcaagctcaagaataagctgaaatatggccagactatcaggcccatttgtctcccctgcaccgagggaacaactcgagctttgaggcttcctccaactaccacttgccagcaacaaaaggaagagctgctccctgcacaggatatcaaagctctgtttgtgtctgaggaggagaaaaagctgactcggaaggaggtctacatcaagaatggggataagaaaggcagctgtgagagagatgctcaatatgccccaggctatgacaaagtcaaggacatctcagaggtggtcacccctcggttcctttgtactggaggagtgagtccctatg

SEQ ID NO: 185157 - DNA, 945 bp, Homo Sapiens
ctttgtacaaaaaagttggggaggattatctggatgtctatgtgtttggggtcgggcctttggtgaaccaagtgaacatcaatgctttggcttccaagaaagacaatgagcaacatgtgttcaaagtcaaggatatggaaaacctggaagatgttttctaccaaatgatcgatgaaagccagtctctgagtctctgtggcatggtttgggaacacaggaagggtaccgattaccacaagcaaccatggcaggccaagatctcagtcattcgcccttcaaagggacacgagagctgtatgggggctgtggtgtctgagtactttgtgctgacagcagcacattgtttcactgtggatgacaaggaacactcaatcaaggtcagcgtaggaggggagaagcgggacctggagatagaagtagtcctatttcaccccaactacaacattaatgggaaaaaagaagcaggaattcctgaattttatgactatgacgttgccctgatcaagctcaagaataagctgaaatatggccagactatcaggcccatttgtctcccctgcaccgagggaacaactcgagctttgaggcttcctccaactaccacttgccagcaacaaaaggaagagctgctccctgcacaggatatcaaagctctgtttgtgtctgaggaggagaaaaagctgactcggaaggaggtctacatcaagaatggggataagaaaggcagctgtgagagagatgctcaatatgccccaggctatgacaaagtcaaggacatctcagaggtggtcacccctcggttcctttgtactggaggagtgagtccctatgctgaccccaatacttgcagaggtgattctggcggccccttgatagttcacaagagaagtcgtttcattcaagttggtgtaatcagctggggagtagtggatgtctgcaaaaacc

SEQ ID NO: 185158 - DNA, 3641 bp, Homo Sapiens
ttgggacagaagttctcaaatttgcatattacatcaactggaaccagcagtgaatcttaatgttcacttaaatcagaacttgcataagaaagagaatgggagtctggttaaataaagatgactatatcagagacttgaaaaggatcattctctgttttctgatagtgtatatggccattttagtgggcacagatcaggatttttacagtttacttggagtgtccaaaactgcaagcagtagagaaataagacaagctttcaagaaattggcattgaagttacatcctgataaaaacccgaataacccaaatgcacatggcgattttttaaaaataaatagagcatatgaagtactcaaagatgaagatctacggaaaaagtatgacaaatatggagaaaagggacttgaggataatcaaggtggccagtatgaaagctggaactattatcgttatgattttggtatttatgatgatgatcctgaaatcataacattggaaagaagagaatttgatgctgctgttaattctggagaactgtggtttgtaaatttttactccccaggctgttcacactgccatgatttagctcccacatggagagactttgctaaagaagtggatgggttacttcgaattggagctgttaactgtggtgatgatagaatgctttgccgaatgaaaggagtcaacagctatcccagtctcttcatttttcggtctggaatggccccagtgaaatatcatggagacagatcaaaggagagtttagtgagttttgcaatgcagcatgttagaagtacagtgacagaactttggacaggaaattttgtcaactccatacaaactgcttttgctgctggtattggctggctgatcactttttgttcaaaaggaggagattgtttgacttcacagacacgactcaggcttagtggcatgttggatggtcttgttaatgtaggatggatggactgtgccacccaggataacctttgtaaaagcttagatattacaacaagtactactgcttattttcctcctggagccactttaaataacaaagagaaaaacagtattttgtttctcaactcattggatgctaaagaaatatatttggaagtaatacataatcttccagattttgaactactttcggcaaacacactagaggatcgtttggctcatcatcggtggctgttattttttcattttggaaaaaatgaaaattcaaatgatcctgagctgaaaaaactaaaaactctacttaaaaatgatcatattcaagttggcaggtttgactgttcctctgcaccagacatctgtagtaatctgtatgtttttcagccgtctctagcagtatttaaaggacaaggaaccaaagaatatgaaattcatcatggaaagaagattctatatgatatacttgcctttgccaaagaaagtgtgaattctcatgttaccacgcttggacctcaaaattttcctgccaatgacaaagaaccatggcttgttgatttctttgccccctggtgtccaccatgtcgagctttactaccagagttacgaagagcatcaaatcttctttatggtcagcttaagtttggtacactagattgtacagttcatgagggactctgtaacatgtataacattcaggcttatccaacaacagtggtattcaaccagtccaacattcatgagtatgaaggacatcactctgctgaacaaatcttggagttcatagaggatcttatgaatccttcagtggtctcccttacacccaccaccttcaacgaactagttacacaaagaaaacacaacgaagtctggatggttgatttctattctccgtggtgtcatccttgccaagtcttaatgccagaatggaaaagaatggcccggacattaactggactgatcaacgtgggcagtatagattgccaacagtatcattctttttgtgcccaggaaaacgttcaaagataccctgagataagattttttcccccaaaatcaaataaagcttatcattatcacagttacaatggttggaatagggatgcttattccctgagaatctggggtctaggatttttacctcaagtatccacagatctaacacctcagactttcagtgaaaaagttctacaagggaaaaatcattgggtgattgatttctatgctccttggtgtggaccttgccagaattttgctccagaatttgagctcttggctaggatgattaaaggaaaagtgaaagctggaaaagtagactgtcaggcttatgctcagacatgccagaaagctgggatcagggcctatccaactgttaagttttatttctacgaaagagcaaagagaaattttcaagaagagcagataaataccagagatgcaaaagcaatcgctgccttaataagtgaaaaattggaaactctccgaaatcaaggcaagaggaataaggatgaactttgataatgttgaagatgaagaaaaagtttaaaagaaattctgacagatgacatcagaagacacctatttagaatgttacatttatgatgggaatgaatgaacattatcttagacttgcagttgtactgccagaattatctacagcactggtgtaaaagaagggtctgcaaactttttctgtaaagggccggtttataaatattttagactttgcaggctataatatatggttcacacatgagaacaagaatagagtcatcatgtattctttgttatttgcttttaacaacctttaaaaaatattaaaacgattcttagctcagagccatacaaaagtaggctggattcagtccatggaccatagattgctgtccccctcgacggacttataatgtttcaggtggctggcttgaacatgagtctgctgtgctatctacataaatgtctaagttgtataaagtccactttcccttcacgttttttggctgacctgaaaagatgtaacttattttttggtcacttgttctcctaaaaatgctatccctaaccatatatttatatttcgttttaaaaacacccatgatgtggcacagtaaacaaaccctgttatgctgtattattatgaggagattcttcattgttttctttccttctcaaaggttgaaaaaatgcttttaatttttcacagccgagaaacagtgcctcagtatatgtgcacaccccctccctccaatttgagcaacagtaactgcacagattctgtagtttgctgtatcattcaccaaaacctgacggaaaaaaattatagcaattaactgggcattgttcagtatcctaaatatgttatcaaatatttacagttctatattttacagatatatgtgttcatgtattttctgaaattgctttcgtagaaattttcccactgatagttgatttttgaggcatctaatatttacatatttgccttctgaactttgttttgacctgtatcctttatttacattgggtttttctttcatagattaggtttttcactcctgtccagtctatttattattcaaataggaaaaattactttacaggttgttttactgtagcttataatgatactgtaattattccagttactcgtttactgtccagaggggctgcctcttttcagat

SEQ ID NO: 185159 - DNA, 1761 bp, Homo Sapiens
  misc_feature (1422)..(1451): n is a, c, g, or t
actttgtacaaaaaagttgggttgatccaaatttgcatagctgtttaatgttaagtcatgacaatttatttttcttggcatgctatgtaaacttgaatttcctatgtatttttattgtggtgttttaaatatggggaggggtattgagcattttttagggagaaaaataaatatatgctgtagtggccacaaataggcctatgatttagctggcaggccaggttttctcaagagcaaaatcaccctctggccccttggcaggtaaggcctcccggtcagcattatcctgccagacctcggggaggatacctgggagacagaagcctctgcacctactgtgcagaactctccacttccccaaccctccccaggtgggcagggcggagggagcctcagcctccttagactgacccctcaggcccctaggctggggggttgtaaataacagcagtcaggttgtttaccagccctttgcacctccccaggcagagggagcctctgttctggtgggggccacctccctcagaggctctgctagccacactccgtggcccaccctttgttaccagttcttcctccttcctcttttcccctgcctttctcattccttccttcgtctccctttttgttcctttgcctcttgcctgtcccctaaaacttgactgtggcactcagggtcaaacagactatccattccccagcatgaatgtgccttttaattagtgatctagaaagaagttcagccgaacccacaccccaactccctcccaagaacttcggtgcctaaagcctcctgttccacctcaggttttcacaggtgctcccaccccagttgaggctcccacccacagggctgtctgtcacaaacccacctctgttgggagctattgagccacctgggatgagatgacacaaggcactcctaccactgagcgcctttgccaggtccagcctgggctcaggttccaagactcagctgcctaatcccagggttgagccttgtgctcgtggcggaccccaaaccactgccctcctgggtaccagccctcagtgtggaggctgagctggtgcctggccccagtcttatctgtgcctttactgctttgcgcatctcagatgctaacttggttctttttccagaagcctttgtattggttaaaaattattttccattgcagaagcagctggactatgcaaaaagtatttctctgtcagttccccactctataccaaggatattattaaaactagaaatgactgcattgagagggagttgtgggaaataagaagaatgaaagcctctctttctgtccgcagatcctgacttttccaaagtgccttaaaagaaatcagacaaatgccctgagtggtaacttctgtgttattttactcttaaaaccaaactctaccttttcttgttgnnnnnnnnnnnnnnnnnnnnnnnnnnnnnnggttaccttctcattcatgtcaagtatgtggttcattcttaaaaccaagggaaatactgctccccccatttgctgacgtagtgctctcatgggctcacctgggcccaaggcacagccagggcacagttaggcctggatgtttgcctggtccgtgagatgccgcgggtcctgtttccttactggggatttcagggctgggggttcagggagcatttccttttcctgggagttatgaccgcgaagttgtcatgtgccgtgcccttttctgtttctgtgtatcctattgctggtgactctgtgtgactgggcc

SEQ ID NO: 185160 - DNA, 547 bp, Homo Sapiens
  misc_feature (223)..(251): n is a, c, g, or t
ctttgtacaaaaaagttggcccactctataccaaggatattattaaaactagaaatgactgcattgagagggagttgtgggaaataagaagaatgaaagcctctctttctgtccgcagatcctgacttttccaaagtgccttaaaagaaatcagacaaatgccctgagtggtaacttctgtgttattttactcttaaaaccaaactctaccttttcttgttgnnnnnnnnnnnnnnnnnnnnnnnnnnnnnggttaccttctcattcatgtcaagtatgtggttcattcttaaaaccaagagaaatactgctccccccatttgctgacctagtgctctcatgggctcacctgggcccaaggcacagccagggcacagttaggcctggatgtttgcctggtccgtgaaatgccgcgggtcctgtttccttactggggatttcatggctgggggttcaaggagcatttccttttcctgggagttaagaccgccaagttgtcatgtgccctggccttttctgtttctgtgtaacctattgctggtgactc

SEQ ID NO: 185161 - DNA, 1843 bp, Homo Sapiens
  misc_feature (1698)..(1717): n is a, c, g, or t
ttggaataggcaacggagcgcggtgaagctcatttttctccttcctcgcagccgcgccagggagctcgcggcgcgcggcccctgtcctccggcccgagatgaatcctgcggcagaagccgagttcaacatcctcctggccaccgactcctacaaggttactcactataaacaatatccacccaacacaagcaaagtttattcctactttgaatgccgtgaaaagaagacagaaaactccaaattaaggaaggtgaaatatgaggaaacagtattttatgggttgcagtacattcttaataagtacttaaaaggtaaagtagtaaccaaagagaaaatccaggaagccaaagatgtctacaaagaacatttccaagatgatgtctttaatgaaaagggatggaactacattcttgagaagtatgatgggcatcttccaatagaaataaaagctgttcctgagggctttgtcattcccagaggaaatgttctcttcacggtggaaaacacagatccagagtgttactggcttacaaattggattgagactattcttgttcagtcctggtatccaatcacagtggccacaaattctagagagcagaagaaaatattggccaaatatttgttagaaacttctggtaacttagatggtctggaatacaagttacatgattttggctacagaggagtctcttcccaagagactgctggcataggagcatctgctcacttggttaacttcaaaggaacagatacagtagcaggacttgctctaattaaaaaatattatggaacgaaagatcctgttccaggctattctgttccagcagcagaacacagtaccataacagcttgggggaaagaccatgaaaaagatgcttttgaacatattgtaacacagttttcatcagtgcctgtatctgtggtcagcgatagctatgacatttataatgcgtgtgagaaaatatggggtgaagatctaagacatttaatagtatcgagaagtacacaggcaccactaataatcagacctgattctggaaaccctcttgacactgtgttaaaggttttggagattttaggtaagaagtttcctgttactgagaactcaaagggttacaagttgctgccaccttatcttagagttattcaaggggatggagtagatattaataccttacaagagattgtagaaggcatgaaacaaaaaatgtggagtattgaaaatattgccttcggttctggtggaggtttgctacagaagttgacaagagatctcttgaattgttccttcaagtgtagctatgttgtaactaatggccttgggattaacgtcttcaaggacccagttgctgatcccaacaaaaggtccaaaaagggccgattatctttacataggacgccagcagggaattttgttacactggaggaaggaaaaggagaccttgaggaatatggtcaggatcttctccatactgtcttcaagaatggcaaggtgacaaaaagctattcatttgatgaaataagaaaaaatgcacagctgaatattgaactggaagcagcacatcattaggctttatgactgggtgtgtgttgtgtgtatgtaatacataatgtttattgtacagatgtgtggggtttgtgttttatgatacattacagccaaattatttgttggtttatggacatactgcccnnnnnnnnnnnnnnnnnnnnccagtgtttaggtgatctcaaattacggaaatgcattttaaccatgtaaagatgagtgctaaagtaagctttttaagggccccttttgcccataaggtagtcattcaatctggtattgatcctttt

SEQ ID NO: 185162 - DNA, 981 bp, Homo Sapiens
  misc_feature (380)..(389): n is a, c, g, or t
  misc_feature (547)..(610): n is a, c, g, or t
tgtacaaaaaagttggggaagagcagaccttataaagaaaaaaagccaccggaggaaaggaaaaaacatcggccaacctagaaacgttttcattcgtcattccaagagagagagaggaaagaaaaatacaactttcattctttctttgcacgttcataaacattctacatacgtattctcttttgtctcttcatttataactgctgtgaattgtacatttctgtgttttttggaggtgcagttaaacttttaagcttaagtgtgacaggactgataaatagaagatcaagagtagatccgactttagaagcctactttgtgaccaaggagctcaatttttgttttgaagctttactaatctaccagagcattgtagatannnnnnnnnnacatctattgtttaaaatagatgattataacggggcagagaactttcttttctctgcaagaatgttacatattgtatagataaatgagtgacatttcataccatgtatatatagagatgttctataagtgtgagaaagtatatgctttaatagatacnnnnnnnnnnnnnnnnnnnnnnnnnnnnnnnnnnnnnnnnnnnnnnnnnnnnnnnnnnnnnnnnatctatgggaatatttcttttggaaaatcatttttcagctcaattacagagctcttgatatcttgaatgtcttttctgtttggcctggctcttaatttgcttttgttttgcccagtatagactcggaagtaacagttatagctagtggtcttgcatgattgcatgagatgtttaatcacaaattaaacttgttctgagtccattcaaatgtgtttttttaaatgtagattgaaatctttgtatttgaagcatacatgttgaaaatacaccttatcagtttttaagtacagggttttatagtgtaatatatacagagtaagtgtttgtttttgtttttcaactgaggtcaaaatggattctgaatgattttg

SEQ ID NO: 185163 - DNA, 2593 bp, Homo Sapiens
  misc_feature (59)..(105): n is a, c, g, or t
  misc_feature (2149)..(2158): n is a, c, g, or t
ttggcttcctgccgatgccggtgtggacgctgtgaatcgtggctggcccggttctccgnnnnnnnnnnnnnnnnnnnnnnnnnnnnnnnnnnnnnnnnnnnnnnngtcgactgttgcttgctggtcgcagactccctgacccctccctcacccctccctaacctcggtgccaccggattgcccttcttttcctgttgcccagcccagccctagtgtcagggcgggggcctggagcagcccgaggcactgcagcagaagagagaaaagacaacgacgaccctcagctcgccagtccggtcgctggcttcgccgccgccatggcaatgagacagacgccgctcacctgctctggccacacgcgacccgtggttgatttggccttcagtggcatcacgccttatgggtatttcttaatcagcgcttgcaaagatggtaaacctatgctacgccagggagatacaggagactggattggaacatttttgggtcataaaggtgctgtttggggtgcaacactgaataaggatgccaccaaagcagctacagcagctgcagatttcacagccaaagtgtgggatgctgtctcaggagatgaattgatgaccctggctcataaacacattgtcaagactgtggatttcacgcaggatagtaattatttgttaaccgggggacaggataaactgttacgcatatatgacttgaacaaacctgaagcagaacctaaggaaattagtggtcatacttctggtataaaaaaagctctgtggtgcagtgaggataaacagattctttctgctgatgacaaaactgttcgactttgggatcatgctactatgacagaagtgaaatctctaaattttaatatgtctgttagtagtatggaatatattcctgagggagagattttggttataacttatggacgatctattgcttttcatagtgcagtaagtttggacccaattaaatcctttgaagctcctgcaaccatcaattctgcatctcttcatcctgagaaagaatttcttgttgcaggcggtgaagattttaaactttataagtatgattataatagtggagaagaattagaatcctacaagggacactttggtcctattcactgtgtgagatttagtcctgatggagaactctatgccagtggttcagaagatggaacattgagactatggcaaactgtggtaggaaaaacgtatggcctttggaaatgtgtgcttcctgaagaagatagtggtgagctggcaaagccaaagattggttttccagagacaacagaagaggagctagaagaaattgcttcagagaattcagattgcatctttccttcagctcctgatgttaaggcctgagcgtcaatcatatgttgcagttagtatacaactgactaaaacaagcaagcagagaaaagcatcagccttccagagttactgtctgcttaaggcagaaacagcagtaaataatgaggaaaatgaattagctccagtgctggaacaactaactaacttggtgttacctgtaagtgaaaactcaagtgtcagatgaagggaggtggagttatcctcttatagtacagtggcctgttatctttttaatgaatatatacaagccaacatccaatttctattattacaattaaggttcttgtagctgtttatgttaatatggagaagaaaactatattggctgattttttctgatcttaaagcagaatgccttttctttttttgcttcagttgtaaagaagagggaatacatgataaagtaactggtttgatttctcgttcattgtacactgcctctgaacatctaattgtttttagttgtctaaataaaatgcctctaaaacaaaacaatgtttggtttttttggggaaaaactactaatgtgagttttataagtggaaatagccagaaggtttttctgtatcataaccatagcaaaaggtaagccaattaatctgtagtaaacattattttataatattgagattcagttacttgtcctgaatttttgaaattcttatgtcctttactagtgtttcatttaccttctctattcccagattggatagaagtgcttgacatgcctttttaaacaattatttaaataatacatgctagttataagnnnnnnnnnntcaactgaaatttagcagtaagctgaaagatcacttaaaatcctaccactcctcaaaaaactattaaaatcaaatgaccatgaatgcatgttagggcatctctgtatgtatatacagatagatagaatggattttataaaaatgggattactatagtcctgcagtggtttaagaagtatggaattttacctcattctttaaatttgggtggcattcagaaagcccttctaaaaccttctaataaattggatcagctgagtttagacttgtaatttattttttaaaacaaagagggcatattaaatgagtaatttgggaatacttcagatgaataaataacatctctgcaacttcctttttctcctgatcagtcctgtgagtgacccttgataacttttcttaaaagccatatggagtcaaccaaagaataagaat

SEQ ID NO: 185164 - DNA, 1637 bp, Homo Sapiens
ttggcattgatcctgaactagcaactcagattaagccacctgaagttcttgagaaccaggaaaaggaagatctcctaaagaagcaggaaggggctgtggataccttcacccttatccaccatgagctggaaatttccaccaacccagctcagtatgccatgatcctggacattgtcaacaacctgctgctccatgtagaacctaagcggaaggaacatagtgagaagaagcaacgggtcaggttccagcttgagatctctagcaatccagaggagcaacgcagcagcatactgcatttgcaggaggctgtgcggcagcatgtggcccaaatacgacagctggagaagcagatgtattctatcatgaagtctttgcaggatgacagcaagaatgagaatctgcttgacctgaaccagaagcttcagttgcagctaaaccaggagaaggccaacctgcagctggaaagtgaagaactgaatatcctcatcaggtgttttaaggatttccaactgcagcgggctaacaagatggagctgcgaaagcagcaagaagatgtgagtgtggtccgtcgcactgagttttactttgctcaggcacggtggcgcctgacagaggaagatggacagctgggaattgctgaattagaactgcagaggttcctctacagcaaggtgaataagtctgatgacacagcagaacatcttctggagttgggctggtttaccatgaacaacctcctccccaatgctgtctataaggtagtactgcggccccagagctcctgccagtctgggcgacagctagctctccgcctcttcagcaaagttcggccccctgttgggggtatctctgttaaggagcattttgaggtaaatgtggtgcctctcaccatccagctgacacaccagttcttccacagaatgatgggctttttctttcctggccgaagtgtggaagatgatgaagttggtgatgaagaggataagtccaaactggtgactactggaataccagtggtgaagcctcggcagctgattgcaacagatgatgcagtaccactgggccctgggaagggtgtggcacagggtttgactcggagttctggggtcagaaggtcatttcgcaaatcgccagagcaccctgtggatgacattgacaagatgaaagagcgagctgccatgaacaactccttcatctacataaagattccacaggttccactgtgtgtcagctacaagggtgagaagaacagtgtggactggggtgaccttaacctggtgctgccctgtctggagtaccacaacaacacatggacatggctagactttgccatggctgtcaaaagggacagccgcaaagccctggttgcccaggtaatcaaagagaagctaaggctgaagtctgcaacaggctctgaggtccggggaaagctagaaactaaatcggacctgaacatgcaacagcaggaagaggaggagaaagcccggctcctcattgggttaagtgtgggcgacaagaaccctggcaagaagtccatctttggcaggcgcaaatgatttggcgattcgagtggctgcagtacagaatctgactctggctcaggctccaggacttgtggggtgggaggggcttcccgt

SEQ ID NO: 185165 - DNA, 1047 bp, Homo Sapiens
ttggcccaggctggaccgcgggccccggcctgggggccactgctgccaccgccgccgccacctcgtctcctccccgtccccgcccagccccaggtctccccgcctcactcgggcccgtggccggggtcactccccgccgccccaccccgcacggatgccgaaggtgaaggcgctgcagtgcgccctggcgctggagatcagctcagtaacttgcccaggagtcgtgcttaaagacaaagaggacatctatcttagcatctgtgtgtttggccaatacaaaaagacacaatgtgtcccagccacttttcccctggtcttcaatgccagaatggtgtttgaaaaggtgttcccggacgcagtagatcctggagatgtggttacacagcttgaatatgatacagcagtgttcgagttgatacagctagttccaccagtgggtgaaacactgtctacgtatgacgaaaatacacgagatttcatgtttccgggtccaaaccaaatgtctggacaccatgattcaaaccgccaggttaccatgaggaggatttctggccttcgaggaaatgctccaaggctggaattttctacgacttcagtgattactgaatgtctgataagttcaaggaaatgccacactcaggataaatttatttaccatttggctccagttgaaaaatcacatggcagactgcaaaacagaacatcaagatcacaaaagaaaaaatccaagtcacctgagagaagtaaatactgtataaatgcaaaaaactacgaacagcctacaatttcttcaaaatcacactctccatctccctacacaaaaagacgcatgtgtgagctatctgaagacaccaggcggcggctggcccatttaaatctgggaccctatgagttcaaaaaagaaacagataaacctccatttgtgattagacatgttgatccccaagtcccagggctgatactttattgggatcttctggaagagactgtgaaagagatggatggtcaagggtgcacaatgatcattctcatcttggctgctgccga

SEQ ID NO: 185166 - DNA, 880 bp, Homo Sapiens
ttgggttctgtgtacacagcaccttcttcactcccaacaacaaagttgttgacatctccaacagggaaggacatagatgtcaacaactttgttgttgggagtgaagaaggttctgtgtacacagcatgccgccatggcagcaaagctggaatcagtgagatgtttgaggggcatcaaggaccaatcactggcatccattgtcatgcagctgttggagcagtagacttctcacatctttttgtcacttcatcgtttgactggacagtaaagctttggacaactaagaataacaagcctttgtattcatttgaagataatgcagactatgtttatgatgttatgtggtcacctacccacccagccctgtttgcctgtgtggatggcatggggagattggatttgtggaatctcaataatgacacagaggtaccaactgccagcatttctgtggagggtaatcctgctcttaatcgtgtgagatggacccattctggcagagagattgctgtgggtgattctgaaggacagattgttatatacgatgtgggagagcagattgctgttccccgcaatgatgaatgggcacggtttggccgaacacttgcagaaattaatgcaaaccgagctgatgcagaggaggaagcagctacccgaatacctgcttagttcctgaaaaggggagtgtaactagtggatttgggaaaggttcttaagtagatcctgagactatttgcatgcttctgtctaaatgataattaaaaggaaatttcatggattaaaccatgggtttaacgcagcaaggaaacttacaatgtccctttatatataacatgcatcttgttttggatttgtgtcattttttaatatagctgattgactt

SEQ ID NO: 185167 - DNA, 1848 bp, Homo Sapiens
  misc_feature (50)..(58): n is a, c, g, or t
tgtacaaagaaggaagctgttgctcctgtgcaagaagaatcagatcttgnnnnnnnnnggagagaagctgaagcattgcttcaaagcatggggctaactccagaatcccccattgtccctcctcctatgtctccatcctccaaatctgtgagcactccaagtgaagctggaagccaagactctggagatggcgccgtgggatctagacgaggacctattaaacttggaatggctaaaatcacgcaagtcgactttcctcctcgagaaattgtcacgtatacaaaggaaactcagactccagttatggctcaacccaaagaagatgaagaggaagatgatgatgtagtggctcctaaaccacctattgaacctgaagaagagaaaactttaaagaaagatgaggaaaatgatagtaaagctccccctcatgagctgactgaagaagaaaagcaacaaatcttgcactctgaggaatttttaagtttctttgaccattctacaagaattgtagaaagagctctttctgagcagattaacatcttctttgactatagtgggagagatttggaagacaaagaaggagagattcaagcaggtgctaaactgtcattaaatcgacaattttttgacgaacgttggtcaaagcatcgggtggttagttgtttggattggtcatctcagtatccggagttactcgtggcttcctataacaacaatgaagatgcccctcatgagcctgatggtgtggcccttgtatggaatatgaaatacaaaaaaactaccccagagtatgtgtttcactgccagtcagctgtgatgtctgccacatttgcaaaatttcatccaaatcttgttgttggtggtacatattcaggccaaattgtgctttgggataaccgtagcaataaaagaactccagtgcaaagaactccactgtcagcagctgcacacacacaccctgtatattgtgtaaatgttgttggaacacaaaatgctcacaatctgattagcatctctactgatggaaaaatttgttcatggagtctggacatgctttcccatccacaggatagcatggagttggttcataaacagtcaaaagcagtagctgtgacatctatgtccttccctgttggagatgtcaacaactttgttgttgggagtgaagaaggttctgtgtacacagcatgccgccatggcagcaaagctggaatcagtgagatgtttgaggggcatcaaggaccaatcactggcatccattgtcatgcagctgttggagcagtagacttctcacatctttttgtcacttcatcgtttgactggacagtaaagctttggacaactaagaataacaagcctttgtattcatttgaagataatgcagactatgtttatgatgttatgtggtcacctacccacccagccctgtttgcctgtgtggatggcatggggagattggatttgtggaatctcaataatgacacagaggtaccaactgccagcatttctgtggagggtaatcctgctcttaatcgtgtgagatggacccattctggcagagagattgctgtgggtgattctgaaggacagattgttatatacgatgtgggagagcagattgctgttccccgcaatgatgaatgggcacggtttggccgaacacttgcagaaattaatgcaaaccgagctgatgcagaggaggaagcagctacccgaatacctgcttagttcctgaaaaggggagtgtaactagtggatttgggaaagttcttaagtagatcctgagactatttgcatgctttctgtctaatgataattaaaaggaaatttcatggattaaaccatggg

SEQ ID NO: 185168 - DNA, 1008 bp, Homo Sapiens
  misc_feature (201)..(238): n is a, c, g, or t
  misc_feature (342)..(374): n is a, c, g, or t
  misc_feature (768)..(786): n is a, c, g, or t
gttttggtaatcaaacccatgtagatcagaccttacatatttaatacagtgcgttacccctgtacaaatggaaaaaaattaagtttaacgtttctagaccaatatggctgttaatttctgtacaatgccaactcaacacagtaaaccgggatactttttccaaagttgacagcacaggtaaagtttccaaaaattcaaatnnnnnnnnnnnnnnnnnnnnnnnnnnnnnnnnnnnnnnaaaagaccaatagcagtatgttatgcatcaatagcagcaacagcttttccaggttctgcagtcatctgaataaaattatagagacatccagcacactccatttnnnnnnnnnnnnnnnnnnnnnnnnnnnnnnnnnccccagaaaattgcaaagttctgttactgttgtggtacctggcaccgttttttaaaattagcttctgaatcatcatctggaaagaaaacattctagaataacatcattaaaaacagctctgataaagcacggtcactactaagtatcataaagcaggtacaagatattttacattcacagaggtatgatacagtactgtcctatatttataatactagaggatacaattaaaaaggcattatttgagacttgattttacttttccagcagagggcccaaaggatggcatgacacagctctgtaaagaaatgcaccttcttaggatttcctttaattagtggcacagttctaggtactcactgtttttcataaacaccagctaaaaactggtatnnnnnnnnnnnnnnnnnnncccccaaatcatgggattcatacaaagatgactgagtgggggcaaggaagactcaacctaaccagcattttaccaaatctgtcatgtttgaatcgtgagagctccatggaagaaaggagatgataagtagcgcttcaaagcttcagaccacaaccaaaacacagcaccatttcaaatagaagcagtagccaaacactggtcactttgatccaacttttttgt

SEQ ID NO: 185169 - DNA, 1431 bp, Homo Sapiens
  misc_feature (1202)..(1220): n is a, c, g, or t
ttggcaaccatttcctacacagtttgcaccccagaagagagctgtgggaagaggactcagccacaagacatttggtcctaggtgttggcaaagcagagagcagaggttcttcagtccacgcaacggttcttctctgaacagcaacagagcaaacagataggaggaggcaaagcccagaaagtggacagtgattcaagtaaacctcctgaaacactgaccgaccctcctggggtctgtcaggaaaaagtagaagaaaagccaccccctgcaccctccatagccaccaaacctgttagaactggaccaatcaaacctcaggcgatcaaaaccgaagaaacaaaatcttaaaggctatggtttattgcaggggattgggaggggggcgggaaaacatggagaattaagtcagataatgctggcagccaaaggggcaaaatggcctgtgacattatcctgttcagagcttggagatgtacaagggacataggagcaatttacactgacacacagctgctgtaccagtgaaaacgaggctttgcaagcttgtacctactatataacatgtgcttggttgatggccatgcattttcagtcagaatttatatataaatatatgcacccatttttttgagtgcatataatttagacctaaaaatccttatgattaggtgaaacaccaaaaatataaggaaaataacacagcagaggaatagctcagcctgaacagtgtgatggtcccagctactacatcagatgcggtttttttgctcccttatgttcttcggatatggttatggcatttgtaggcttggaggtaaagaactgaagataactggtgctggatagaggagccttattttttattatggcagcttgctatttttataacatggtgattgagttgaacacaatcaaagtacagtagtaactgatgtccccttcttcctggatgaatgagcagataaatattgatgtcagcatccttgaaccatatcaaagtgagcagtgtttggctactgcttctatttgaaatggtgctgtgttttggttgtggtctgaagctttgaagcgctacttagcatctcctttcttccatggagctctcacgattcaaacatgacagatttggtaaaatgctggttaggttgagtcttccttgcccccactcagtcatctttgtatgaatcccatgatttgggggnnnnnnnnnnnnnnnnnnnataccagtttttagctggtgtttatgaagaacagtgagtacctagaactgtgccactaattaaaggaaatcctaagaaggtgcatttctttacagagctgtgtcatgccatcctttgggccctctgctggaaaagtagaatcaagtctcaataatgcctttttaattgtatcctctagtattaatagatataggacagtactgtatcatac

SEQ ID NO: 185170 - DNA, 2106 bp, Homo Sapiens
  misc_feature (366)..(383): n is a, c, g, or t
  misc_feature (1695)..(1713): n is a, c, g, or t
ttggatttgacgtaagtatatttttgggggcacatagtcaaaactaagaaattatttaccagctcagaatgtggtaggagctatcagaacttagtgatcaagtgaagtcgtagttactaatttctgatgctcttcccctgcagaagagagctgtgggaagaggactcagccacaagacatttggtcctaggtgttggtaatgccacaatataagtgcttccttttcattttattgtagaccacatattgataactagaagttttaagtgttacatgtatgtttttagatttgcaagcaggttccctaaataaaatttaatatgagagggcagaccttgaaaaggtggtgggaggtggtcctgtggnnnnnnnnnnnnnnnnnnaaatcacatgaaatatttcaaaaataggaagaaatctattcattaaaagctcaaagatcaatgaggtacttttggctttggccaaaccagtgtggggaaaactgatttgtgattggtaaaagaatttgaaccaagattgatttgacaggctttggtaatgctgcagtattttcagttgttctttctcattttttaaggcaaagcagagagcagaggttcttcagtccacgcaacggttcttctctgaacagcaacagagcaaacagataggaggaggcaaagcccagaaagtggacagtgattcaagtaaacctcctgaaacactgaccgaccctcctggggtctgtcaggaaaaagtagaagaaaagccaccccctgcaccctccatagccaccaaacctgttagaactggaccaatcaaacctcaggcgatcaaaaccgaagaaacaaaatcttaaaggctatggtttattgcaggggattgggaggggggcgggaaaacatggagaattaagtcagataatgctggcagccaaaggggcaaaatggcctgtgacattatcctgttcagagcttggagatgtacaagggacataggagcaatttacactgacacacagctgctgtaccagtgaaaacgaggctttgcaagcttgtacctactatataacatgtgcttggttgatggccatgcattttcagtcagaatttatatataaatatatgcacccatttttttgagtgcatataatttagacctaaaaatccttatgattaggtgaaacaccaaaaatataaggaaaataacacagcagaggaatagctcagcctgaacagtgtgatggtcccagctactacatcagatgcggtttttttgctcccttatgttcttcggatatggttatggcatttgtaggcttggaggtaaagaactgaagataactggtgctggatagaggagccttattttttattatggcagcttgctatttttataacatggtgattgagttgaacacaatcaaagtacagtagtaactgatgtccccttcttcctggatgaatgagcagataaatattgatgtcagcatccttgaaccatatcaaagtgagcagtgtttggctactgcttctatttgaaatggtgctgtgttttggttgtggtctgaagctttgaagcgctacttagcatctcctttcttccatggagctctcacgattcaaacatgacagatttggtaaaatgctggttaggttgagtcttccttgcccccactcagtcatctttgtatgaatcccatgatttgggggnnnnnnnnnnnnnnnnnnnataccagtttttagctggtgtttatgaagaacagtgagtacctagaactgtgccactaattaaaggaaatcctaagaaggtgcatttctttacagagctgtgtcatgccatcctttgggccctctgctggaaaagtagaatcaagtctcaaataatgcctttttaattgtatcctctagtatttatagatataggacagtactgtatcatacctctgtgaatgtaaaatatcttgtacctgctttatgatacgtagtagtgaccgtgctttatcagagctgtttttaatgatgttattctagaatgttttctttccagatgatgattcaaagctattttaaaaacggtgccgggtaccacaacagtaacagaccttgcaaattttcctgggag

SEQ ID NO: 185171 - DNA, 942 bp, Homo Sapiens
  misc_feature (543)..(561): n is a, c, g, or t
ttggattaggtgaaacaccaaaaatataaggaaaataacacagcagaggaatagctcagcctgaacagtgtgatggtcccagctactacatcagatgcggtttttttgctcccttatgttcttcggatatggttatggcatttgtaggcttggaggtaaagaactgaagataactggtgctggatagaggagccttattttttattatggcagcttgctatttttataacatggtgattgagttgaacacaatcaaagtacagtagtaactgatgtccccttcttcctggatgaatgagcagataaatattgatgtcagcatccttgaaccatatcaaagtgagcagtgtttggctactgcttctatttgaaatggtgctgtgttttggttgtggtctgaagctttgaagcgctacttagcatctcctttcttccatggagctctcacgattcaaacatgacagatttggtaaaatgctggttaggttgagtcttccttgcccccactcagtcatctttgtatgaatcccatgatttgggggnnnnnnnnnnnnnnnnnnnataccagtttttagctggtgtttatgaagaacagtgagtacctagaactgtgccactaattaaaggaaatcctaagaaggtgcatttctttacagagctgtgtcatgccatcctttgggccctctgctggaaaagtagaatcaagtctcaaataatgcctttttaattgtatcctctagtattatagatataggacagtactgtatcatacctctgtgaatgtaaaatatcttgtacctgctttatgatacgtagtagtgaccgtgctttatcagagctgtttttaatgatgttattctagaatgttttctttccagatgatgattcaaagctaattttaaaaaacggtgccaggtaccacaacagtaacagaccttgcca

SEQ ID NO: 185172 - DNA, 1238 bp, Homo Sapiens
  misc_feature (437)..(455): n is a, c, g, or t
  misc_feature (839)..(881): n is a, c, g, or t
  misc_feature (985)..(1022): n is a, c, g, or t
ttggcccttatgttcttcggatatggttatggcatttgtaggcttggaggtaaagaactgaagataactggtgctggatagaggagccttattttttattatggcagcttgctatttttataacatggtgattgagttgaacacaatcaaagtacagtagtaactgatgtccccttcttcctggatgaatgagcagataaatattgatgtcagcatccttgaaccatatcaaagtgagcagtgtttggctactgcttctatttgaaatggtgctgtgttttggttgtggtctgaagctttgaagcgctacttagcatctcctttcttccatggagctctcacgattcaaacatgacagatttggtaaaatgctggttaggttgagtcttccttgcccccactcagtcatctttgtatgaatcccatgatttgggggnnnnnnnnnnnnnnnnnnnataccagtttttagctggtgtttatgaagaacagtgagtacctagaactgtgccactaattaaaggaaatcctaagaaggtgcatttctttacagagctgtgtcatgccatcctttgggccctctgctggaaaagtagaatcaagtctcaaataatgcctttttaattgtatcctctagtattatagatataggacagtactgtatcatacctctgtgaatgtaaaatatcttgtacctgctttatgatacgtagtagtgaccgtgctttatcagagctgtttttaatgatgttattctagaatgttttctttccagatgatgattcagaagctaattttaaaaaacggtgccaggtaccacaacagtaacagaactttgcaannnnnnnnnnnnnnnnnnnnnnnnnnnnnnnnnnnnnnnnnnnaaatggagtgtgctggatgtctctataattttattcagatgactgcagaacctggaaaagctgttgctgctattgatgcataacatactgctattggtcttttnnnnnnnnnnnnnnnnnnnnnnnnnnnnnnnnnnnnnnatttgaatttttggaaactttagctgtgctgtcaactttggaaaaagtatcccggtttactgtgttgagttggcattgtacagaaattaacagccatattggtctagaaacgttaaacttaatttttttccatttgtacaggggtaacgcactgtattaaatatgtaaggtcttatctacatgggtttgattacagaaactaataaagtattctct

SEQ ID NO: 185173 - DNA, 1055 bp, Homo Sapiens
  misc_feature (225)..(262): n is a, c, g, or t
  misc_feature (366)..(398): n is a, c, g, or t
  misc_feature (792)..(810): n is a, c, g, or t
cattatttagagaatactttattagtttctgtaatcaaacccatgtagataagaccttacatatttaatacagtgcgttacccctgtacaaatggaaaaaaattaagtttaacgtttctagaccaatatggctgttaatttctgtacaatgccaactcaacacagtaaaccgggatactttttccaaagttgacagcacagctaaagtttccaaaaattcaaatnnnnnnnnnnnnnnnnnnnnnnnnnnnnnnnnnnnnnnaaaagaccaatagcagtatgttatgcatcaatagcagcaacagcttttccaggttctgcagtcatctgaataaaattatagagacatccagcacactccatttnnnnnnnnnnnnnnnnnnnnnnnnnnnnnnnnnccccagaaaattgcaaagttctgttactgttgtggtacctggcaccgttttttaaaattagcttctgaatcatcatctggaaagaaaacattctagaataacatcattaaaaacagctctgataaagcacggtcactactacgtatcataaagcaggtacaagatattttacattcacagaggtatgatacagtactgtcctatatctataatactagaggatacaattaaaaaggcattatttgagacttgattctacttttccagcagagggcccaaaggatggcatgacacagctctgtaaagaaatgcaccttcttaggatttcctttaattagtggcacagttctaggtactcactgttcttcataaacaccagctaaaaactggtatnnnnnnnnnnnnnnnnnnncccccaaatcatgggattcatacaaagatgactgagtgggggcaaggaagactcaacctaaccagcattttaccaaatctgtcatgtttgaatcgtgagagctccatggaagaaaggagatgctaagtagcgcttcaaagcttcagaccacaaccaaaacacagcaccatttcaaatagaagcagtagccaaacactgctcactttgatatggttcaaggatgctgacatcaatatttatcccaa

SEQ ID NO: 185174 - DNA, 1168 bp, Homo Sapiens
  misc_feature (228)..(265): n is a, c, g, or t
  misc_feature (369)..(401): n is a, c, g, or t
  misc_feature (795)..(813): n is a, c, g, or t
tttcattatttagagaatactttattagtttctgtaatcaaacccatgtagataagaccttacatatttaatacagtgcgttacccctgtacaaatggaaaaaaattaagtttaacgtttctagaccaatatggctgttaatttctgtacaatgccaactcaacacagtaaaccgggatactttttccaaagttgacagcacagctaaagtttccaaaaattcaaatnnnnnnnnnnnnnnnnnnnnnnnnnnnnnnnnnnnnnnaaaagaccaatagcagtatgttatgcatcaatagcagcaacagcttttccaggttctgcagtcatctgaataaaattatagagacatccagcacactccatttnnnnnnnnnnnnnnnnnnnnnnnnnnnnnnnnnccccagaaaattgcaaagttctgttactgttgtggtacctggcaccgttttttaaaattagcttctgaatcatcatctggaaagaaaacattctagaataacatcattaaaaacagctctgataaagcacggtcactactacgtatcataaagcaggtacaagatattttacattcacagaggtatgatacagtactgtcctatatctataatactagaggatacaattaaaaaggcattatttgagacttgattctacttttccagcagagggcccaaaggatggcatgacacagctctgtaaagaaatgcaccttcttaggatttcctttaattagtggcacagttctaggtactcactgttcttcataaacaccagctaaaaactggtatnnnnnnnnnnnnnnnnnnncccccaaatcatgggattcatacaaagatgactgagtgggggcaaggaagactcaacctaaccagcattttaccaaatctgtcatgtttgaatcgtgagagctccatggaagaaaggagatgctaagtagcgcttcaaagcttcagaccacaaccaaaacacagcaccatttcaaatagaagcagtagccaaacactgctcactttgatatggttcaaggatgctgacatcaatatttatctgctcattcatccaggaagaaggggacatcagttactactgtactttgattgtgttcaactcaatcaccatgttataaaaatagcaagctgccataataaaaaataaggcccaa

SEQ ID NO: 185175 - DNA, 704 bp, Homo Sapiens
ttggcatcctgacccttgtgcagatagcccgggtcatcttggagtatattgaccacaagctcagaggagtgcagaaccctgtagcccgctgcatcatgtgctgtttcaagtgctgcctctggtgtctggaaaaatttatcaagttcctaaaccgcaatgcatacatcatgatcgccatctacgggaagaatttctgtgtctcagccaaaaatgcgttcatgctactcatgcgaaacattgtcagggtggtcgtcctggacaaagtcacagacctgctgctgttctttgggaagctgctggtggtcggaggcgtgggggtcctgtccttcttttttttctccggtcgcatcccggggctgggtaaagactttaagagcccccacctcaactattactggctgcccatcatgacctccatcctgggggcctatgtcatcgccagcggcttcttcagcgttttcggcatgtgtgtggacacgctcttcctctgcttcctggaagacctggagcggaacaacggctccctggaccggccctactacatgtccaagagccttctaaagattctgggcaagaagaacgaggcgcccccggacaacaagaagaggaagaagtgacagctccggccctgatccaggactgcaccccacccccaccgtccagccatccaacctcacttcgccttacaggtctccattttgtgg

SEQ ID NO: 185176 - DNA, 1357 bp, Homo Sapiens
ttggctgagccatggggggaaagcagcgggacgaggatgacgaggcctacgggaagccagtcaaatacgacccctcctttcgaggccccatcaagaacagaagctgcacagatgtcatctgctgcgtcctcttcctgctcttcattctaggttacatcgtggtggggattgtggcctggttgtatggagacccccggcaagtcctctaccccaggaactctactggggcctactgtggcatgggggagaacaaagataagccgtatctcctgtacttcaacatcttcagctgcatcctgtccagcaacatcatctcagttgctgagaacggcctacagtgccccacaccccaggtgtgtgtgtcctcctgcccggaggacccatggactgtgggaaaaaacgagttctcacagactgttggggaagtcttctatacaaaaaacaggaacttttgtctgccaggggtaccctggaatatgacggtgatcacaagcctgcaacaggaactctgccccagtttcctcctcccctctgctccagctctgggacgctgctttccatggaccaacattactccaccggcgctcccagggatcaccaatgacaccaccatacagcaggggatcagcggtcttattgacagcctcaatgcccgagacatcagtgttaagatctttgaagattttgcccagtcctggtattggattcttgttgccctgggggtggctctggtcttgagcctactgtttatcttgcttctgcgcctggtggctgggcccctggtgctggtgctgatcctgggagtgctgggcgtgctggcatacggcatctactactgctgggaggagtaccgagtgctgcgggacaagggcgcctccatctcccagctgggtttcaccaccaacctcagtgcctaccagagcgtgcaggagacctggctggccgccctgatcgtgttggcggtgcttgaagccatcctgctgctgatgctcatcttcctgcggcagcggattcgtattgccatcgccctcctgaaggaggccagcaaggctgtgggacagatgatgtctaccatgttctacccactggtcacctttgtcctcctcctcatctgcattgcctactgggccatgactgctctgtacctggctacatcggggcaaccccagtatgtgctctgggcatccaacatcagctccctcggctgtgagaaagtgccaataaatacatcatgcaaccccacggcccaccttgtgaactcctcgtgcccagggctgatgtgcgtcttccacggctactcatccaaagcctaatccaacgttctgtcttcaatctgcaaatctatggggtcctgggg

SEQ ID NO: 185177 - DNA, 994 bp, Homo Sapiens
ttggcatcaaatacccagcctgttcaatttgccagaaagggttttggtagacgttgcagaggctgctctggaatgggaatgctgagtgagtgccttcccctctgattgagactgagggagctgattatgcttatgctataggcagaccaaactgagtttgagcctggagatggaactctccgacagaacttgattcccgcagtccagagaagctacttcccacctgtcaactctgggaggggcaggagctactgggaatgggacgcccaggctccatactgaggcccccgatgcctgagcctactctatccccgtctaccctcccaggcccaccttgtgaactcctcgtgcccagggctgatgtgcgtcttccagggctactcatccaaaggcctaatccaacgttctgtcttcaatctgcaaatctatggggtcctggggctcttctggacccttaactgggtactggccctgggccaatgcgtcctcgctggagcctttgcctccttctactgggccttccacaagccccaggacatccctaccttccccttaatctctgccttcatccgcacactccgttaccacactgggtcattggcatttggagccctcatcctgacccttgtgcagatagcccgggtcatcttggagtatattgaccacaagctcagaggagtgcagaaccctgtagcccgctgcatcatgtgctgtttcaagtgctgcctctggtgtctggaaaaatttatcaagttcctaaaccgcaatgcatacatcatgatcgccatctacggggaagaatttctgtgtctcagccaaaaatgcgttcatgctactcatgcgaaacattgtcaggttaggctgctcccccccgctttgtggctccctcctctgatctcccacccaagctggcttcgtgggtgtgctgtgctcagtcgggccctagacttagtttagtgctctgctcttgccatcttgaaacgtgaacaatttt

SEQ ID NO: 185178 - DNA, 2096 bp, Homo Sapiens
  misc_feature (1702)..(1711): n is a, c, g, or t
  misc_feature (1944)..(1968): n is a, c, g, or t
actttgtacaaaaaagttgggaggcggaggagcggtaactaccccggctgcgcacagctcggcgctccttcccgctccctcacacaccggcctcagcccgcaccggcagtagaagatggtgaaagaaacaacttactacgatgttttgggggtcaaacccaatgctactcaggaagaattgaaaaaggcttataggaaactggctttgaagtaccatcctgataagaacccaaatgaaggagagaagtttaaacagatttctcaagcttacgaagttctctctgatgcaaagaaaagggaattatatgacaaaggaggagaacaggcaattaaagagggtggagcaggtggcggttttggctcccccatggacatctttgatatgttttttggaggaggaggaaggatgcagagagaaaggagaggtaaaaatgttgtacatcagctctcagtaaccctagaagacttatataatggtgcaacaagaaaactggctctgcaaaagaatgtgatttgtgacaaatgtgaaggtagaggaggtaagaaaggagcagtagagtgctgtcccaattgccgaggtactggaatgcaaataagaattcatcagataggacctggaatggttcagcaaattcagtctgtgtgcatggagtgccagggccatggggagcggatcagtcctaaagatagatgtaaaagctgcaacggaaggaagatagttcgagagaagaaaattttagaagttcatattgacaaaggcatgaaagatggccagaagataacattccatggtgaaggagaccaagaaccaggactggagccaggcgatattatcattgtgttagatcagaaggaccatgctgtttttactcgacgaggagaagaccttttcatgtgtatggacatacagctcgttgaagcactgtgtggcttccagaagccaatatctactcttgacaaccgaaccatcgtcatcacctctcatccaggtcagattgtcaagcatggagatatcaagtgtgtactaaatgaaggcatgccaatttatcgtagaccatatgaaaagggtcgcctaatcatcgaatttaaggtaaactttcctgagaatggctttctctctcctgataaactgtctttgctggaaaaactcctacccgagaggaaggaagtggaagagactgatgagatggaccaagtagaactggtggactttgatccaaatcaggaaagacggcgccactacaatggagaagcatatgaggatgatgaacatcatcccagaggtggtgttcagtgtcagacctcttaatgggccagtgaataacactcactgctggcatttaatgtgcagtagtgaatgagtgaaggactgtaatcataatatgctcactacttgctcttgtttttgttttaataaactatagtagtgttataaaaagttaaatgaagaataaacgcaaatataaaagctctgattttgccctgtatgtatgatgacttcagtgtgcaagatgaagtttaatacctgtaaaaactacaaagaagttcccctagcatttctaggccaaaccttgtaattgacttcagctatgtacgtggacaagcttagactgaaatgctaggtatatgtattggcttcagtgtatgacccttcattgttaagctatgaaagtaaaactctgtatttaactggcaatgaggnnnnnnnnnnttttgtagagaagtgttggtctgtatagttctttatattaagtgggattcattgtaatgcctctgcatttattctgttgcctcagctgttacttgaagatggcgtaatatataatttatcctgtggtatcagtgataaaaatgatacctttctgtaggaggggtttatcataatatgctgcttcttgaaggcttgcacttccagaattgtgtttccttctgctgtgccattcnnnnnnnnnnnnnnnnnnnnnnnnnatcttgaccagtcctggtcatttgctcccctccttgtctgtggaccatgataagcccaagtagtgacttcagagctgggtaacagaaattaaaagtgaaaagaccttttacgtggagaatttgcatgc

SEQ ID NO: 185179 - DNA, 1529 bp, Homo Sapiens
  misc_feature (591)..(638): n is a, c, g, or t
  misc_feature (1328)..(1382): n is a, c, g, or t
ttggcactgctccaagggacaggtgggcctggcggcctgtgggtttgggtgcctcctgcagtttgggagacatggaccagcatctggtcttgtttccaggagcatagaagccacatcgttgagacatcaggaaggtaaaaacccagcggcttagccaagccctaagcctgtccccagaccaaccctgggacctatacagaacagagggccagagctagggctgctgcttctgctccagcccctttgcctctgtcctcccatcccctcaacaccctgcttctcccggggacgcttttgagtgggccctgcccggggagctgcagagcagcagcacctttctctgagaagaggtccttggttgggtcaaggacagggctgagcgtggaagggggaggagtcaggggctctgtgttaggatgcggctttctctgcctctgggcagcctgctttggcctttccttgtatgtgggtgtttattacaagtggctttgtgtcagacacgctcggctccccacctggacacacactcaccagtggcctttcagtgtagcgggaggaagccggtgtccctggatgtgaagctcacactgnnnnnnnnnnnnnnnnnnnnnnnnnnnnnnnnnnnnnnnnnnnnnnnnacagagctgaggatttcctggagtgccctgcaggcacagaggaggtcagcaaaggtcttgaatagattttctctggaaataaagaatccttagatgcctaaaaattcccttcctgttccctcctggtcctggacacctcccaggggactgttccttatttctctctcctggtgtgggtaaagggacagttacaaaccaggtcaccatcctcagaggctgagccctgtacccaccccagcacagccacctccgccagaccccgtggctctgggagagccagctttgctattcccattgtgacagcgatggcaggcctgacccacggggcagttagagcagcctcgtggagctcgcccctcccctcagcctgcccacctctccctgcatcctgaggccagtggcccccgggcctgcacagatacctcatcatccacccgctgcccctccccgtccctgtcccccagcatcgggggcctgcaaatctagtgccgaatgactatgtccagattggtgacgatgggtgttgctgtttttcttgtcgtttgtgaacgctgtgatgctgtgtgcccaagtgggcagtcaccacccagcccttccttgggcgtctcccccagagtgctgtcgggaccacatctgtcctcaccctgtgggaccgcctggccctccctccctagcccttccagcctgggnnnnnnnnnnnnnnnnnnnnnnnnnnnnnnnnnnnnnnnnnnnnnnnnnnnnnnntcttacctctcatgcgtgttttaccttttgatgttcacagtggctcactggctgggagtcgttacctcggggagagggggaggttggttccttggggggcccacataaagcaaggaatgctctgtagggtaactgggggggccacca

SEQ ID NO: 185180 - DNA, 1718 bp, Homo Sapiens
ttggagtgaagggtggcccaggtggggccaggctgactgaaaaagatggatactatgatgctgaatgtgcggaatctgtttgagcagcttgtgcgccgggtggagattctcagtgaaggaaatgaagtccaatttatccagttggcgaaggactttgaggatttccgtaaaaagtggcagaggactgaccatgagctggggaaatacaaggatcttttgatgaaagcagagactgagcgaagtgctctggatgttaagctgaagcatgcacgtaatcaggtggatgtagagatcaaacggagacagagagctgaggctgactgcgaaaagctggaacgacagattcagctgattcgagagatgctcatgtgtgacacatctggcagcattcaactaagcgaggagcaaaaatcagctctggcttttctcaacagaggccaaccatccagcagcaatgctgggaacaaaagactatcaaccattgatgaatctggttccattttatcagatatcagctttgacaagactgatgaatcactggattgggactcttctttggtgaagactttcaaactgaagaagagagaaaagaggcgctctactagccgacagtttgttgatggtccccctggacctgtaaagaaaactcgttccattggctctgcagtagaccaggggaatgaatccatagttgcaaaaactacagtgactgttcccaatgatggcgggcccatcgaagctgtgtccactattgagactgtgccatattggaccaggagccgaaggaaaacaggtactttacaaccttggaacagtgactccaccctgaacagcaggcagctggagccaagaactgagacagacagtgtgggcacgccacagagtaatggagggatgcgcctgcatgactttgtttctaagacggttattaaacctgaatcctgtgttccatgtggaaagcggataaaatttggcaaattatctctgaagtgtcgagactgtcgtgtggtctctcatccagaatgtcgggaccgctgtccccttccctgcattcctaccctgataggaacacctgtcaagattggagagggaatgctggcagactttgtgtcccagacttctccaatgatcccctccattgttgtgcattgtgtaaatgagattgagcaaagaggtctgactgagacaggcctgtataggatctctggctgtgaccgcacagtaaaagagctgaaagagaaattcctcagagtgaaaactgtacccctcctcagcaaagtggatgatatccatgctatctgtagccttctaaaagactttcttcgaaacctcaaagaacctcttctgacctttcgccttaacagagcctttatggaagcagcagaaatcacagatgaagacaacagcatagctgccatgtaccaagctgttggtgaactgccccaggccaacagggacacattagctttcctcatgattcacttgcagagagtggctcagagtccacatactaaaatggatgttgccaatctggctaaagtctttggccctacaatagtggcccatgctgtgcccaatccagacccagtgacaatgttacaggacatcaagcgtcaacccaaggtggttgagcgcctgctttccttgcctctggagtattggagtcagttcatgatggtggagcaagagaacattgaccccctacatgtcattgaaaa

SEQ ID NO: 185181 - DNA, 1388 bp, Homo Sapiens
cctataaaagccaactttgtacaaaaaagttggaacagagcctttatggaagcagcagaaatcacagatgaagacaacagcatagctgccatgtaccaagctgttggtgaactgccccaggccaacagggacacattagctttcctcatgattcacttgcagagagtggctcagagtccacatactaaaatggatgttgccaatctggctaaagtctttggccctacaatagtggcccatgctgtgcccaatccagacccagtgacaatgttacaggacatcaagcgtcaacccaaggtggttgagcgcctgctttccttgcctctggagtattggagtcagttcatgatggtggagcaagagaacattgaccccctacatgtcattgaaaactcaaatgccttttcaacaccacagacaccagatattaaagtgagtttactgggacctgtgaccactcctgaacatcagcttctcaagactccttcatctagttccctgtcacagagagtccgttccaccctcaccaagaacactcctagatttgggagcaaaagcaagtctgccactaacctaggacgacaaggcaacttttttgcttctccaatgctcaagtgaagtcacatctgcctgttacttcccagcattgactgactataagaaaggacacatctgtactctgctctgcagcctcctgtactcattactacttttagcattctccaggcttttactcaagtttaattgtgcatgagggttttattaaaactatatatatctccccttccttctcctcaagtcacataatatcagcactttgtgctggtcattgttgggagcttttagatgagacatctttccaggggtagaagggttagtatggaattggttgtgattctttttggggaagggggttattgttcctttggcttaaagccaaatgctgctcatagaatgatctttctctagtttcatttagaactgatttccgtgagacaatgacagaaaccctacctatctgataagattagcttgtctcagggtgggaagtgggagggcagggcaaagaaaggattagaccagaggatttaggatgcctccttctaagaaccagaagttctcattccccattatgaactgagctataatatggagctttcataaaaatgggatgcattgaggacagaactagtgatgggagtatgcgtagctttgatttggatgattacgtctttaatagtgttgagtggcacaaccttgtaaatgtgaaagtacaactcgtatttatctctgatgtgccgctggctgaactttgggttcatttggggtcaaagccagtttttcttttaaaattgaattcattctgatgcttggcccccaataccccc

SEQ ID NO: 185182 - DNA, 1194 bp, Homo Sapiens
tttgtacaaaaaagttgggttgctgatgaaggcattgacattgcacagtgcaatcttgtcatcctttatgagtatgtgggcaatgtcatcaaaatgatccaaaccagaggcagaggaagagcaagaggtagcaagtgcttccttctgactagtaatgctggtgtaattgaaaaagaacaaataaacatgtacaaagaaaaaatgatgaatgactctattttacgccttcagacatgggacgaagcagtatttagggaaaagattctgcatatacagactcatgaaaaattcatcagagatagtcaagaaaaaccaaaacctgtacctgataaggaaaataaaaaactgctctgcagaaagtgcaaagccttggcatgttacacagctgacgtaagagtgatagaggaatgccattacactgtgcttggagatgcttttaaggaatgctttgtgagtagaccacatcccaagccaaagcagttttcaagttttgaaaaaagagcaaagatattctgtgcccgacagaactgcagccatgactggggaatccatgtgaagtacaagacatttgagattccagttataaaaattgaaagttttgtggtggaggatattgcaactggagttcagacactgtactcgaagtggaaggactttcattttgagaagataccatttgatccagcagaaatgtccaaatgatatcaggtcctcaatcttcagctacagggaatgagtaactttgagtggagaagaaacaaacatagtgggtataatcatggatcgcttgtacccctgtgaaaatatattttttaaaaatatctttagcagtttgtactatattatatatgcaaagcacaaatgagtgaatcacagcactgagtattttgtaggccaacagagctcatagtacttgggaaaaattaaaaagcctcatttctagccttctttttagagtcaactgccaacaaacacacagtaatcactctgtacacactgggatagatgaatgaatggaatgttgggaatttttatctccctttgtctccttaacctactgtaaactggcttttgcccttaacaatctactgaaattgttcttttgaagttaccagtgactctggttgccaaatccactgggcacttcttaaccttctatttgacctctgcgcatttggccctgttgagcactct

SEQ ID NO: 185183 - DNA, 2741 bp, Homo Sapiens
  misc_feature (1520)..(1834): n is a, c, g, or t
  misc_feature (2177)..(2186): n is a, c, g, or t
ctttgtacaaaaaagttggcactctcattgcctgctacactgggagtgagaagcctagcattttggttgaaaaatgcatctcacccccagaaggtgatcctgagtctgctgtgactgagcttcaatgcatttggcacaacctgagctacatgaagtgttcttggctccctggaaggaataccagtcccgacactaactatactctctactattggcacagaagcctggaaaaaattcatcaatgtgaaaacatctttagagaaggccaatactttggttgttcctttgatctgaccaaagtgaaggattccagttttgaacaacacagtgtccaaataatggtcaaggataatgcaggaaaaattaaaccatccttcaatatagtgcctttaacttcccgtgtgaaacctgatcctccacatattaaaaacctctccttccacaatgatgacctatatgtgcaatgggagaatccacagaattttattagcagatgcctattttatgaagtagaagtcaataacagccaaactgagacacataatgttttctacgtccaagaggctaaatgtgagaatccagaatttgagagaaatgtggagaatacatcttgtttcatggtccctggtgttcttcctgatactttgaacacagtcagaataagagtcaaaacaaataagttatgctatgaggatgacaaactctggagtaattggagccaagaaatgagtataggtaagaagcgcaattccacactctacataaccatgttactcattgttccagtcatcgtcgcaggtgcaatcatagtactcctgctttacctaaaaaggctcaagattattatattccctccaattcctgatcctggcaagatttttaaagaaatgtttggagaccagaatgatgatactctgcactggaagaagtacgacatctatgagaagcaaaccaaggaggaaaccgactctgtagtgctgatagaaaacctgaagaaagcctctcagtgatggagataatttatttttaccttcactgtgaccttgagaagattcttcccattctccatttgttatctgggaacttattaaatggaaactgaaactactgcaccatttaaaaacaggcagctcataagagccacaggtctttatgttgagtcgcgcaccgaaaaactaaaaataatgggcgctttggagaagagtgtggagtcattctcattgaattataaaagccagcaggcttcaaactaggggacaaagcaaaaagtgatgatagtggtggagttaatcttatcaagagttgtgacaacttcctgagggatctatacttgctttgtgttctttgtgtcaacatgaacaaattttatttgtaggggaactcatttggggtgcaaatgctaatgtcaaacttgagtcacaaagaacatgtagaaaacaaaatggataaaatctgatatgtattgtttgggatcctattgaaccatgtttgtggctattaaaactcttttaacagtctgnnnnnnnnnnnnnnnnnnnnnnnnnnnnnnnnnnnnnnnnnnnnnnnnnnnnnnnnnnnnnnnnnnnnnnnnnnnnnnnnnnnnnnnnnnnnnnnnnnnnnnnnnnnnnnnnnnnnnnnnnnnnnnnnnnnnnnnnnnnnnnnnnnnnnnnnnnnnnnnnnnnnnnnnnnnnnnnnnnnnnnnnnnnnnnnnnnnnnnnnnnnnnnnnnnnnnnnnnnnnnnnnnnnnnnnnnnnnnnnnnnnnnnnnnnnnnnnnnnnnnnnnnnnnnnnnnnnnnnnnnnnnnnnnnnnnnnnnnnnnnnnnnnnnnnnnnnncctcttaatattctggagtcatcattcccttcgacagcattttcctctgctttgaaagccccagaaatcagtgttggccatgatgacaactacagaaaaaccagaggcagcttctttgccaagacctttcaaagccattttaggctgttaggggcagtggaggtagaatgactccttgggtattagagtttcaaccatgaagtctctaacaatgtattttcttcacctctgctactcaagtagcatttactgtgtctttggtttgtgctaggcccccgggtgtgaagcacagaccccttccaggggtttacagtctatttgagactcctcagttcttgccacnnnnnnnnnnaatctccaccagtcatttttcagaccttttaactcctcaattccaacactgatttccccttttgcattctccctccttcccttccttgtagccttttgactttcattggaaattaggatgtaaatctgctcaggagacctggaggagcagaggataattagcatctcaggttaagtgtgagtaatctgagaaacaatgactaattcttgcatattttgtaacttccatgtgagggttttcagcattgatatttgtgcattttctaaacagagatgaggtggtatcttcacgtagaacattggtattcgcttgagaaaaaaagaatagttgaacctatttctctttctttacaagatgggtccaggattcctctttgtctctgccataaatgattaattaaatagcttttgtgtcttacattggtagccagccagccaaggctctgtttatgcttttggggggcatatattgggttccattctcacctatccacacaacatatccgtatatatcccctctactcttacttccccaaatttaaagaagtatgggaaa

SEQ ID NO: 185184 - DNA, 1608 bp, Homo Sapiens
  misc_feature (153)..(162): n is a, c, g, or t
ttggccatgaagtccctaacaatgtattttcttcacctctgctactcaagtagcatttactgtgtctttggtttgtgctaggcccccgggtgtgaagcacagaccccttccaggggtttacagtctatttgagactcctcagttcttgccacnnnnnnnnnnaatctccaccagtcatttttcagaccttttaactcctcaattccaacactgatttccccttttgcattctccctccttcccttccttgtagccttttgactttcattggaaattaggatgtaaatctgctcaggagacctggaggagcagaggataattagcatctcaggttaagtgtgagtaatctgagaaacaatgactaattcttgcatattttgtaacttccatgtgagggttttcagcattgatatttgtgcattttctaaacagagatgaggtggtatcttcacgtagaacattggtattcgcttgagaaaaaaagaatagttgaacctatttctctttctttacaagatgggtccaggattcctcttttctctgccataaatgattaattaaatagcttttgtgtcttacattggtagccagccagccaaggctctgtttatgcttttggggggcatatattgggttccattctcacctatccacacaacatatccgtatatatcccctctactcttacttcccccaaatttaaagaagtatgggaaatgagaggcatttcccccaccccatttctctcctcacacacagactcatattactggtaggaacttgagaactttatttccaagttgttcaaacatttaccaatcatattaatacaatgatgctatttgcaattcctgctcctaggggaggggagataagaaaccctcactctctacaggtttgggtacaagtggcaacctgcttccatggccgtgtagaagcatggtgccctggcttctctgaggaagctggggttcatgacaatggcagatgtaaagttattcttgaagtcagattgaggctgggagacagccgtagtagatgttctactttgttctgctgttctctagaaagaatatttggttttcctgtataggaatgagattaattcctttccaggtattttataattctgggaagcaaaacccatgcctccccctagccatttttactgttatcctatttagatggccatgaagaggatgctgtgaaattcccaacaaacattgatgctgacagtcatgcagtctgggagtggggaagtgatcttttgttcccatcctcttcttttagcagtaaaatagctgagggaaaagggagggaaaaggaagttatgggaatacctgtggtggttgtgatccctaggtcttgggagctcttggaggtgtctgtatcagtggatttcccatcccctgtgggaaattagtaggctcatttactgttttaggtctagcctatgtggattttttcctaacatacctaagcaaacccagtgtcaagatggtaattcttattctttcattcagttaagtttttcccttcatctgggcactgaagggatatgtgaaacaatgttaacatttttggtagtcttcaaccaaggattgtttc

SEQ ID NO: 185185 - DNA, 2023 bp, Homo Sapiens
  misc_feature (1381)..(1399): n is a, c, g, or t
  misc_feature (1501)..(1509): n is a, c, g, or t
ttggcgttggaacggaacgtggaggtggccctggccggggaggaggggcggcggcgaatgctgggagagtccgacgagcgctgcactaacgcaggatccggctgccgaaggtcctcgccagcaggatgaagttaaaggaagtagatcgtacagccatgcaggcatggagccctgcccagaatcaccccatttacctagcaacaggaacatctgctcagcaattggatgcaacatttagtacgaatgcttcccttgagatatttgaattagacctctctgatccatccttggatatgaaatcttgtgccacattctcctcttctcacaggtaccacaagttgatttgggggccttataaaatggattccaaaggagatgtctctggagttctgattgcaggtggtgaaaatggaaatattattctctatgatccttctaaaattatagctggagacaaggaagttgtgattgcccagaatgacaagcatactggcccagtgagagccttggatgtgaacattttccagactaatctggtagcttctggtgctaatgaatctgaaatctacatatgggatctaaataattttgcaaccccaatgacaccaggagccaaaacacagccgccagaagatatcagctgcattgcatggaacagacaagttcagcatattttagcatcagccagtcccagtggccgggccactgtatgggatcttagaaaaaatgagccaatcatcaaagtcagtgaccatagtaacagaatgcattgttctgggttggcatggcatcctgatgttgctactcagatggtccttgcctccgaggatgaccggttaccagtgatccagatgtgggatcttcgatttgcttcctctccacttcgtgtcctggaaaaccatgccagggggattttggcaattgcttggagcatggcagatcctgaattgttactgagctgtggaaaagatgctaagattctctgctccaatccaaacacaggagaggtgttatatgaacttcccaccaacacacagtggtgcttcgatattcagtggtgtccccgaaatcctgctgtcttatcagctgcttcgtttgatgggcgtatcagtgtttattctatcatgggaggaagcacagatggtttaagacagaaacaagttgacaagctttcatcatcttttgggaatcttgatccctttggcacaggacagccccttcctccgttacaaattccacagcagactgctcagcatagtatagtgctgcctctgaagaagccgcccaagtggattcgaaggcctgttggtgcttctttttcatttggaggcaaactggttacgtttgagaatgtcagaatgccttctcatcagggagctgnnnnnnnnnnnnnnnnnnnccatgtgttcattagtcaggttgtaacagaaaaggagttcctcagccgatcagaccaacttcagcaggctgtgcagtcacaaggatttatcaattattgccnnnnnnnnnttgatgcttctcagactgaatttgagaaaaatgtgtggtcctttttgaaggtaaactttgaggatgattctcgtggaaaataccttgaacttctaggatacagaaaagaagatctaggaaagaagcacattaaagaggaaaaagaagaatctgaatttctaccctcatctggaggaacatttaatatctctgtcagtggggacattgatggtttaattactcaggctttgctgacgggcaattttgagagtgctgttgacctttgtttacatgataaccgcatggccgatgccattatattggccatagcaggtggacaagaactcttggctcgaacccagaaaaaatacttcgcaaaatcccaaagcaaaattaccaggctcatcactgcagtggtgatgaagaactggaaagagattgttgagtcttgtgatcttaaaaattggagagaggctttagctgcagtattgacttatgcaaagccagatgaattttcagccctttgtgatctttt

SEQ ID NO: 185186 - DNA, 2591 bp, Homo Sapiens
ttggctcccttctccttggatcttagcaagaccaagcgacaccttgtgcctggggcccccttcctgctgcaggccttggtccgtgagatgtcaggctccccagcttctggcattcctgtcaaagtttctgccacggtgtcttctcctgggtctgttcctgaagtccaggacattcagcaaaacacagacgggagcggccaagtcagcattccaataattatccctcagaccatctcagagctgcagctctcagtatctgcaggctccccacatccagcgatagccaggctcactgtggcagccccaccttcaggaggccccgggtttctgtctattgagcggccggattctcgacctcctcgtgttggggacactctgaacctgaacttgcgagccgtgggcagtggggccaccttttctcattactactacatgatcctatcccgagggcagatcgtgttcatgaatcgagagcccaagaggaccctgacctcggtctcggtgtttgtggaccatcacctggcaccctccttctactttgtggccttctactaccatggagaccacccagtggccaactccctgcgagtggatgtccaggctggggcctgcgagggcaagctggagctcagcgtggacggtgccaagcagtaccggaacggggagtccgtgaagctccacttagaaaccgactccctagccctggtggcgctgggagccttggacacagctctgtatgctgcaggcagcaagtcccacaagcccctcaacatgggcaaggtctttgaagctatgaacagctatgacctcggctgtggtcctgggggtggggacagtgcccttcaggtgttccaggcagcgggcctggccttttctgatggagaccagtggaccttatccagaaagagactaagctgtcccaaggagaagacaacccggaaaaagagaaacgtgaacttccaaaaggcgattaatgagaaattgggtcagtatgcttccccgacagccaagcgctgctgccaggatggggtgacacgtctgcccatgatgcgttcctgcgagcagcgggcagcccgcgtgcagcagccggactgccgggagcccttcctgtcctgctgccaatttgctgagagtctgcgcaagaagagcagggacaagggccaggcgggcctccaacgagccctggagatcctgcaggaggaggacctgattgatgaggatgacattcccgtgcgcagcttcttcccagagaactggctctggagagtggaaacagtggaccgctttcaaatattgacactgtggctccccgactctctgaccacgtgggagatccatggcctgagcctgtccaaaaccaaaggcctatgtgtggccaccccagtccagctccgggtgttccgcgagttccacctgcacctccgcctgcccatgtctgtccgccgctttgagcagctggagctgcggcctgtcctctataactacctggataaaaacctgactgtgagcgtccacgtgtccccagtggaggggctgtgcctggctgggggcggagggctggcccagcaggtgctggtgcctgcgggctctgcccggcctgttgccttctctgtggtgcccacggcagccgccgctgtgtctctgaaggtggtggctcgagggtccttcgaattccctgtgggagatgcggtgtccaaggttctgcagattgagaaggaaggggccatccatagagaggagctggtctatgaactcaaccccttggaccaccgaggccggaccttggaaatacctggcaactctgatcccaatatgatccctgatggggactttaacagctacgtcagggttacagcctcaaatccattggacactttaggctctgagggggccttgtcaccaggaggcgtggcctccctcttgaggcttcctcgaggctgtggggagcaaaccatgatctacttggctccgacactggctgcttcccgctacctggacaagacagagcagtggagcacactgcctcccgagaccaaggaccacgccgtggatctgatccagaaaggctacatgcggatccagcagtttcggaaggcggatggttcctatgcggcttggttgtcacgggacagcagcacctggctcacagcctttgtgttgaaggtcctgagtttggcccaggagcaggtaggaggctcgcctgagaaactgcaggagacatctaactggcttctgtcccagcagcaggctgacggctcgttccaggacccctgtccagtgttagacaggagcatgcaggggggtttggtgggcaatgatgagactgtggcactcacagcctttgtgaccatcgcccttcatcatgggctggccgtcttccaggatgagggtgcagagccattgaagcagagagtggaagcctccatctcaaaggcaaactcatttttgggggagaaagcaagtgctgggctcctgggtgcccacgcagctgccatcacggcctatgccctgacactgaccatgcgcctgtggacctgctcggtgttgcccacaacaacctcatggcaatggccaggagactggagataacc

SEQ ID NO: 185187 - DNA, 2281 bp, Homo Sapiens
tgtacagaaaagttggggaaggggccatccatagagaggagctggtctatgaactcaaccccttggaccaccgaggccggaccttggaaatacctggcaactctgatcccaatatgatccctgatggggactttaacagctacgtcagggttacagcctcagatccattggacactttaggctctgagggggccttgtcaccaggaggcgtggcctccctcttgaggcttcctcgaggctgtggggagcaaaccatgatctacttggctccgacactggctgcttcccgctacctggacaagacagagcagtggagcacactgcctcccgagaccaaggaccacgccgtggatctgatccagaaaggctacatgcggatccagcagtttcggaaggcggatggttcctatgcggcttggttgtcacgggacagcagcacctggctcacagcctttgtgttgaaggtcctgagtttggcccaggagcaggtaggaggctcgcctgagaaactgcaggagacatctaactggcttctgtcccagcagcaggctgacggctcgttccaggacccctgtccagtgttagacaggagcatgcaggggggtttggtgggcaatgatgagactgtggcactcacagcctttgtgaccatcgcccttcatcatgggctggccgtcttccaggatgagggtgcagagccattgaagcagagagtggaagcctccatctcaaaggcaaactcatttttgggggagaaagcaagtgctgggctcctgggtgcccacgcagctgccatcacggcctatgccctgacactgaccaaggcgcctgtggacctgctcggtgttgcccacaacaacctcatggcaatggcccaggagactggagataacctgtactggggctcagtcactggttctcagagcaatgccgtgtcgcccaccccggctcctcgcaacccatccgaccccatgccccaggccccagccctgtggattgaaaccacagcctacgccctgctgcacctcctgcttcacgagggcaaagcagagatggcagaccaggctgcggcctggctcacccgtcagggcagcttccaagggggattccgcagtacccaagacacggtgattgccctggatgccctgtctgcctactggattgcctcccacaccactgaggagaggggtctcaatgtgactctcagctccacaggccggaatgggttcaagtcccacgcgctgcagctgaacaaccgccagattcgcggcctggaggaggagctgcagttttccttgggcagcaagatcaatgtgaaggtgggaggaaacagcaaaggaaccctgaaggtccttcgtacctacaatgtcctggacatgaagaacacgacctgccaggacctacagatagaagtgacagtcaaaggccacgtcgagtacacgatggaagcaaacgaggactatgaggactatgagtacgatgagcttccagccaaggatgacccagatgcccctctgcagcccgtgacacccctgcagctgtttgagggtcggaggaaccgccgcaggagggaggcgcccaaggtggtggaggagcaggagtccagggtgcactacaccgtgtgcatctggcggaacggcaaggtggggctgtctggcatggccatcgcggacgtcaccctcctgagtggattccacgccctgcgtgctgacctggagaagctgacctccctctctgaccgttacgtgagtcactttgagaccgaggggccccacgtcctgctgtattttgactcggtccccacctcccgggagtgcgtgggctttgaggctgtgcaggaagtgccggtggggctggtgcagccggccagcgcaaccctgtacgactactacaaccccgagcgcagatgttctgtgttttacggggcaccaagtaagagcagactcttggccaccttgtgttctgctgaagtctgccagtgtgctgaggggaagtgccctcgccagcgtcgcgccctggagcggggtctgcaggacgaggatggctacaggatgaagtttgcctgctactacccccgtgtggagtacggcttccaggttaagttctccgagaagacagcagagctgctttccgcctctttgagaccaagatcacccaagtcctgcacttcaccaaggatgtcaaggccgctgctaatcagatgcgcaacttcctggttcgagcctcctgccgccttcgcttggaacctgggaaagaatatttgatcatgggtctagatggg

SEQ ID NO: 185188 - DNA, 1202 bp, Homo Sapiens
ttggatctttgggatcttggctctgtatgatgtgcgggagaaaaagaagatctcggagaacttctacttcgacctgaactcggactccatgaaggggctgcttcgggctcatggcacccaccctgccatctccaccctggcccgctctgccatcttctctgtgacctacccctcacctgacatcttcctggtcatcaagttggagaaggtgcttcagcaaggggacatcagtgagtgctgtgagccttacatggtgttgaaagaagtggacacagccaagaacaaagagaagctagagaagctgcgcctggcggccgagcagttctgcacccgcctgggccgctaccgcatgcccttcgcctggacggccgtgcacttggccaacatcgtgagcagcgctgggcagctggaccgggactctgactcggagggcgagcgccggccagcctggacagaccgccgccgtcgggggccccaggaccgggcgagtagtggggacgacgcctgcagcttctctggcttccgtccagccacgctaactgtcacaaacttctttaagcaggaggctgagcgactcagtgacgaggacctcttcaagttcctggctgacatgaggcgcccgtcgtccctgctgcggcgactacgtcctgtgactgctcaagatcgacatttctccggctcctgaaaatccccacttctgcctctcccctgagctgcttcatatcaagccctacccggaccccaggggccggcccaccaaggagattctggagttccccgcccgcgaagtctatgccccccataccagctacaggaacctgctgtacgtgtacccgcacagcctcaacttcagcagccgccagggctccgtgcgcaaccttgctgtgcgagtgcagtacatgacaggcgaggaccccagccaggctctgccggtcatctttggcaagtccagctgcagtgaatttacccgcgaggccttcacaccggtggtctaccataacaagtcccccgagttctacgaggagttcaagctgcatcttccagcctgcgtgacagagaaccatcacctgctgttcaccttctaccatgtcagctgccagccccggccgggcactgccctggagacacccgtgggctttacttggatcccactgctgcagcacgggcgcctgagaccggccccttctgtctcccagtgtctg

SEQ ID NO: 185189 - DNA, 1240 bp, Homo Sapiens
  misc_feature (310)..(318): n is a, c, g, or t
ttggcgagcgggctccgggacggacagagaggcgggcggggatggtgtgcggggctgcggctcctgcgtccctcccagcggcgcgtgagcggcactgatttgtccctggggcggcagcgcggacccgcccggagatgaggcgtcgattagcaaggtaaaagtaacagaaccatggctcagtttccaacaccttttggtggcagcctggatatctgggccataactgtagaggaaagagcgaagcatgatcagcagttccatagtttaaagccaatatctggattcattactggtgatcaagctagaaacnnnnnnnnncaatctgggttacctcaacctgttttagcacagatatgggcactagctgacatgaataatgatggagaatggatcaagtggagttttccatagctatgaaacttatcaaactgaagctacaaggatatcagctaccctctgcacttccccctgtcatgaaacagcaaccagttgctatttctagcgcaccagcatttggtatgggaggtatcgccagcatgccaccgcttacagctgttgctccagtgccaatgggatccattccagttgttggaatgtctccaaccctagtatcttctgttcccacagcagctgtgccccccctggctaacggggctccccctgttatacaacctctgcctgcatttgctcatcctgcagccacattgccaaagagttcttcctttagtagatctggtccagggtcacaactaaacactaaattacaaaaggcacagtcatttgatgtggccagtgtcccaccagtggcagagtgggctgttcctcagtcatcaagactgaaatacaggcaattattcaatagtcatgacaaaactatgagtggacacttaacaggtccccaagcaagaactattcttatgcagtcaagtttaccacaggctcagctggcttcaatatggaatctttctgacattgatcaagatggaaaacttacagcagaggaatttatcctggcaatgcacctcattgatgtagctatgtctggccaaccactgccacctgtcctgcctccagaatacattccaccttcttttagaagagttcgatctggcagtggtatatctgtcataagctcaacatctgtagatcagaggctaccagagaaaccagttttagaagatgaacaacaacaattagaaaagaaattacctgtaacgtttgaagatcagaagcgggagaa

SEQ ID NO: 185190 - DNA, 1794 bp, Homo Sapiens
  misc_feature (1209)..(1218): n is a, c, g, or t
  misc_feature (1591)..(1636): n is a, c, g, or t
tggcattaactttcttaaatagaagcataacacttactagtttagagaaatggtagatgaaatgctctttacattcaattttctgtgtgtggtgctaatttccattgtgactttggaatttagggaagtgagtagctgatcaacaccttaaaattcatttaatacttatttaaaaagaagatgagagattcaaaaatatcagaaaagttggccatggtaaataattttcagaattcttttttaaaattttaattagatttccttttcctagtaagagttgatgtctgctagtggtattttcattaaatgtcatattcttacaacagtgacattggaatcatttccataggaggtaatttccatagcaactaatcatagtgacccaaacaggattataaagtcaagtgaggaataaatagcagaaaaataccttaaaggaacaaaaaatccattttttataataatgctttttgtaaacaagagcagaacagttttaaaaatctaattagaatttccaaataaaacagtttccataaggtgtcagcaacagcactaaaaatctcaaatcacactgaaccctaaatgtcattgcaagaaataaaaatttaagaattaaattgctgccctgcgtataatcccttgagatctttttaaagctagcaagaactctatttggatcagaactacattattacaaaacaaaatgaacacttgaccaaaaaaccacattaatttaaatggagcctttcattattttcagatagcggggtcttttccatttatagagaatgatgtaactgccaggacacttttgtgtttgcccaggactcctagtaagaattgaatcttgagggagtaatgataacaaaaggtttcttgtgactggtaacatcaggacagacagagtttttggtgagaagaaaatactatatgcctgcttgatagcatgtagagatcatcacatgtatggaaaccttaaaaagtaaacttattttttctaactagaaggctctcataagtttctgttatgattgccatttcaataaatgacattaaaaatctaaaggatattattgtttgaatttttgggttattttttaaaacttcattgctgtttttgacagcatttgtgactgtcattgccactaaattattgagctagaagatgctgcagggaaaattgttttgaagctggcatctaagctttcnnnnnnnnnncctagttgatgccttcctttattacaaatcagtattaaaacttccagattatattcttgtcatttttcctcatgcagataacagcaggaaggacttaaggtgtataagaaaaagaaagtattcatacagaaattacctagcagttgtgccctcagagtagaactttgaaacaggactgaagccctttttacctagaaccatttaaaagcctgagcaaggaccaccaccccctccccaccaaattattcggtctctttctggggggcccagcttactgtatgttacaagtctttgaaatgggtctggtgtcttcagctcctgaaatgctaatttaccccttacctaaggagtgtagttataatacagagttggnnnnnnnnnnnnnnnnnnnnnnnnnnnnnnnnnnnnnnnnnnnnnntccttcattcattccctctgtccgtctctccttccctccttcccaccttccttcctttttgtctttgtttctttctctggccccctgtcctctctctctgtctcatccccttttcccactttcctcctgtctctccttcctccctttctttacagttt

SEQ ID NO: 185191 - DNA, 1513 bp, Homo Sapiens
ctttgtacaaaaaagttggctcttggtctcgatttggagaaaggactgttacccatttttttggtgtgtttatggaagtgcatgtagagcgtcctgccctttgaaatcagactgggtgtgtgtcttccctggacatcactgcctctccagggcattctcaggcccgggggtctccttccctcaggcagctccagtggtgggttctgaagggtgctttcaaaacggggcacatctggctgggaagtcacatggactcttccagggagagagaccagctgaggcgtctctctctgaggttgtgttgggtctaagcgggtgtgtgctgggctccaaggaggaggagcttgctgggaaaagacaggagaagtactgactcaactgcactgaccatgttgtcataattagaataaagaagaagtggtcggaaatgcacattcctggataggaatcacagctcaccccaggatctcacaggtagtctcctgagtagttgacggctagcggggagctagttccgccgcatagttatagtgttgatgtgtgaacgctgacctgtcctgtgtgctaagagctatgcagcttagctgaggcgcctagattactagatgtgctgtatcacggggaatgaggtgggggtgcttattttttaatgaactaatcagagcctcttgagaaattgttactcattgaactggagcatcaagacatctcatggaagtggatacggagtgatttggtgtccatgcttttcactctgaggacatttaatcggagaacctcctggggaattttgtgggagacacttgggaacaaaacagacaccctgggaatgcagttgcaagcacagatgctgccaccagtgtctctgaccaccctggtgtgactgctgactgccagcgtggtacctcccatgctgcaggcctccatctaaatgagacaacaaagcacaatgttcactgtttacaaccaagacaactgcgtgggtccaaacactcctcttcctccaggtcatttgttttgcatttttaatgtctttattttttgtaatgaaaaagcacactaagctgcccctggaatcgggtgcagctgaataggcacccaaaagtccgtgactaaatttcgtttgtctttttgatagcaaattatgttaagagacagtgatggctagggctcaacaattttgtattcccatgtttgtgtgagacagagtttgttttcccttgaacttggttagaattgtgctactgtgaacgctgatcctgcatatggaagtcccacttcggtgacatttcctggccattcttgtttccattgtgtggatggtgggttgtgcccacttcctggagtgagacagctcctggtgtgtagaattcccggagcgtccgtggttcagagtaaacttgaagcagatctgtgcatgcttttcctctgcaacaattggctcgtttctcttttttgttctcttttgataggatcctgtttcctatgtgtgcaaaataaaaataaatttggg

SEQ ID NO: 185192 - DNA, 1488 bp, Homo Sapiens
ttggccaaatcccggcccaggagcccagcagccggggccgccctattacaccgacccaggaggaccggggatgaaccctgtcgggaattccatggcaatggctttccaggtcccacccaactcaccccaggggagtgtggcctgcccgccccctccagcctactgcaacacgcctccgcccccgtacgaacaggtagtgaaggccaagtagtggggtgcccacgtgcaagaggagagacaggagagggcctttccctggcctttctgtcttcgttgatgttcacttccaggaacggtctcgtgggctgctaagggcagttcctctgatatcctcacagcaagcacagctctctttcaggctttccatggagtacaatatatgaactcacactttgtctcctctgttgcttctgtttctgacgcagtctgtgctctcacatggtagtgtggtgacagtccccgagggctgacgtccttacggtggcgtgaccagatctacaggagagagactgagaggaagaaggcagtgctggaggtgcaggtggcatgtagaggggccaggccgagcatcccaggcaagcatccttctgcccggggattaataggaagccccatgccgggcggctcagccgatgaagcagcagccgactgagctgagcccagcaggtcatctgctccagcctgtcctctcgtcagccttcctcttccagaagctgttggagagacattcaggagagagcaagccccttgtcatgtttctgtctctgttcatatcctaaagatagacttctcctgcaccgccagggaagggtagcacgtgcagctctcaccgcaggatggggcctagaatcaggcttgccttggaggcctgacagtgatctgacatccactaagcaaatttatttaaattcatgggaaatcacttcctgccccaaactgagacattgcattttgtgagctcttggtctgatttggagaaaggactgttacccatttttttggtgtgtttatggaagtgcatgtagagcgtcctgccctttgaaatcagactgggtgtgtgtcttccctggacatcactgcctctccagggcattctcaggcccgggggtctccttccctcaggcagctccagtggtgggttctgaagggtgctttcaaaacggggcacatctggctgggaagtcacatggactcttccagggagagagaccagctgaggcgtctctctctgaggttgtgttgggtctaagcgggtgtgtgctgggctccaaggaggaggagcttgctgggaaaagacaggagaagtactgactcaactgcactgaccatgttgtcataattagaataaagaagaagtggtcggaaatgcacattcctggataggaatcacagctcaccccagatctcacaggtagtctcctgagtagttgacggctagcggggagctagttccgccgcatagttatagtgttgatgtgtgaacgctga

SEQ ID NO: 185193 - DNA, 1268 bp, Homo Sapiens
ctttgtacaaaaaagttgggtcctctctatctagctccagcctctcgcctgcgccccactccccgcgtcccgcgtcctagccgaccatggccgggcccctgcgcgccccgctgctcctgctggccatcctggccgtggccctggccgtgagccccgcggccggctccagtcccggcaagccgccgcgcctggtgggaggccccatggacgccagcgtggaggaggagggtgtgcggcgtgcactggactttgccgtcggcgagtacaacaaagccagcaacgacatgtaccacagccgcgcgctgcaggtggtgcgcgcccgcaagcagatcgtagctggggtgaactacttcttggacgtggagctgggccgaaccacgtgtaccaagacccagcccaacttggacaactgccccttccatgaccagccacatctgaaaaggaaagcattctgctctttccagatctacgctgtgccttggcagggcacaatgaccttgtcgaaatccacctgtcaggacgcctaggggtctgtaccgggctggcctgtgcctatcacctcttatgcacacctcccaccccctgtattcccacccctggactggtggcccctgccttggggaaggtctccccatgtgcctgcaccaggagacagacagagaaggcagcaggcggcctttgttgctcagcaaggggctctgccctccctccttccttcttgcttctcatagccccggtgtgcggtgcatacacccccacctcctgcaataaaatagtagcatcggctccctctgagttcttggctgtctggggatgtgcacacaggcagggtttccgcagttcctttatgaagcctccttgtcctgctggtgtgaagatgagaggagtacctgggagctgacgcggccacagcaaggccatcaggaccctgatgaaaagactgaggaaaatgctgcctttcctgaatggctaccaggcagggaatgatgctgggaagtgtttaccccacaggctctgtgccttctctgactgggcagctcatgctgtatgcatggaggcatcattaccaaacacacctctgaggccagcggccagcgtctgactcacaagccatgactgccccaccttcttacaacaacaatagcagtttccccgtgaggattcacccctcctcccctctcactccgcctttttccagggaagctgactctaccctttggaccacagcttgagcacttgaccctggctaagctggtcagggcagcggg

SEQ ID NO: 185194 - DNA, 1093 bp, Homo Sapiens
  misc_feature (94)..(110): n is a, c, g, or t
ttggagagcttagacatccaaaactaatcaatgctgaggtggctaaatacctagccttttacatgtaaacctgtctgcaaaattagcttttttnnnnnnnnnnnnnnnnnttgggggggttaatttatcattcagaaatcttgcattttcaaaaattcagtgcaagcgccaggcgatttgtgtctaaggatacgattttgaaccatatgggcagtgtacaaaatatgaaacaactgtttccacacttgcacctgatcaagagcagtgcttctccatttgttttgcagagaaatgtttttcatttcccgtgtgtttccatttccttctgaaattctgattttatccatttttttaaggctcctctttatctcctttcttaaggcactgttgctatggcacttttctataaccttttcattcctgtgtacagtagcttaaaattgcagtgattgagcataacctacttgtttgtataaattattgaaatccatttgcaccctgtaagaatggacttaaaagtactgctggacaggcatgtgtgctcaaagtacattgattgctcaaatataaggaaatggcccaatgaacgtggttgtgggaggggaaagaggaaacagagctagtcagatgtgaattgtatctgttgtaataaacatgttaaaacaaacaaaaattgttatttttcttttccttcggtcagtgcacattagcatttgaactacctggggattctttatcagaactgttcttgttgaatatttatacttaattgaaataattccttaagggaggttttgtttaaaacgtattaacaggaaattgtgtatgagatatttaatgaaataagaaattcaacaagaatgattaagtcacttcccaagtggttgtcatttgttaaaccctggtttacctgtcttgctattatgacatttcatttggaaggatgtttgtgttgtagctaactgttcaagtctggtgctgactgctgttcttagccatcacaaaacgctaaatttgtgtaattggagcttcctgctgttatctggaaatagcaggaaagcgcagctttgtatattgtttcctaaagtatatt

SEQ ID NO: 185195 - DNA, 922 bp, Homo Sapiens
ttgggcgctttgcccgcctggccctgggactctgaccctcggctaccctttcctgccccactagcgtggccgcgagcctcggtgagccggccgtattcccgctctcgcttagggggcacaggcgcaggcatcggcccggccactccaagccttcggtgcgcgggcgcgtctgggatacgggcccgggaggcgccgccctccgtccgcccggtgcctctcaggaacagcgaaccggagagagcgccggagagttgggctcagtgcggagctcggcgccggggcccatgcccgtgcgcccccgcaggccggcgccatggcctccgggagtgtggccgagtgcctgcagcaggagaccacctgccccgtgtgcctgcagtacttcgcagagcccatgatgctcgactgcggccataacatctgttgcgcgtgcctcgcccgctgctggggcacggcagagactaacgtgtcgtgcccgcagtgccgggagaccttcccgcagaggcacatgcggcccaaccggcacctggccaacgtgacccaactggtaaagcagctgcgcaccgagcggccgtcggggcccggcggcgagatgggcgtgtgcgagaagcaccgcgagcccctgaagctgtactgcgaggaggaccagatgcccatctgcgtggtgtgcgaccgctcccgcgagcaccgcggccacagcgtgctgccgctcgaggaggcggtggagggcttcaaggagcaaatccagaaccagctcgaccatttaaaaagagtgaaagatttaaagaagagacgtcgggcccagggggaacaggcacgagctgaactcttgagcctaacccagatggagagggagaagattgtttgggagtttgagcagctgtatcactccttaaaggagcatgagtatcgcctcctggccccg

SEQ ID NO: 185196 - DNA, 1910 bp, Homo Sapiens
tgtacaaaaagttgggactggggagcgggagctcgagaatactgcccagttactctagcgcgccaggccgaaccgcagcttcttggcttaggtacttctactcacagcggccgattccgaggccaactccagcaatggcttttgcaaatctgcggaaagtgctcatcagtgacagcctggacccttgctgccggaagatcttgcaagatggagggctgcaggtggtggaaaagcagaaccttagcaaagaggagctgatagcggagctgcaggactgtgaaggccttattgttcgctctgccaccaaggtgaccgctgatgtcatcaacgcagctgagaaactccaggtggtgggcagggctggcacaggtgtggacaatgtggatctggaggccgcaacaaggaagggcatcttggttatgaacacccccaatgggaacagcctcagtgccgcagaactcacttgtggaatgatcatgtgcctggccaggcagattccccaggcgacggcttcgatgaaggacggcaaatgggagcggaagaagttcatgggaacagagctgaatggaaagaccctgggaattcttggcctgggcaggattgggagagaggtagctacccggatgcagtcctttgggatgaagactatagggtatgaccccatcatttccccagaggtctcggcctcctttggtgttcagcagctgcccctggaggagatctggcctctctgtgatttcatcactgtgcacactcctctcctgccctccacgacaggcttgctgaatgacaacacctttgcccagtgcaagaagggggtgcgtgtggtgaactgtgcccgtggagggatcgtggacgaaggcgccctgctccgggccctgcagtctggccagtgtgccggggctgcactggacgtgtttacggaagagccgccacgggaccgggccttggtggaccatgagaatgtcatcagctgtccccacctgggtgccagcaccaaggaggctcagagccgctgtggggaggaaattgctgttcagttcgtggacatggtgaaggggaaatctctcacgggggttgtgaatgcccaggcccttaccagtgccttctctccacacaccaagccttggattggtctggcagaagctctggggacactgatgcgagcctgggctgggtcccccaaagggaccatccaggtgataacacagggaacatccctgaagaatgctgggaactgcctaagccccgcagtcattgtcggcctcctgaaagaggcttccaagcaggcggatgtgaacttggtgaacgctaagctgctggtgaaagaggctggcctcaatgtcaccacctcccacagccctgctgcaccaggggagcaaggcttcggggaatgcctcctggccgtggccctggcaggcgccccttaccaggctgtgggcttggtccaaggcactacgcctgtactgcaggggctcaatggagctgtcttcaggccagaagtgcctctccgcagggacctgcccctgctcctattccggactcagacctctgaccctgcaatgctgcctaccatgattggcctcctggcagaggcaggcgtgcggctgctgtcctaccagacttcactggtgtcagatggggagacctggcacgtcatgggcatctcctccttgctgcccagcctggaagcgtggaagcagcatgtgactgaagccttccagttccacttctaaccttggagctcactggtccctgcctctggggcttttctgaagaaacccacccactgtgatcaatagggagagaaaatccacattcttgggctgaacgcgggcctctgacactgcttacactgcactctgaccctgtagtacagcaataaccgtctaataaagaacctacccccc

SEQ ID NO: 185197 - DNA, 2288 bp, Homo Sapiens
  misc_feature (2082)..(2090): n is a, c, g, or t
ttgggtcgtcgctgccgctgccgctgccactgccactgccacctcgcggatcaggagccagcgttgttcgcccgacgcctcgctgccggtgggaggaagcgagagggaagccgcttgcgggtttgtcgccgctgctcgcccaccgcctggaagagccgagccccggcccagtcggtcgcttgccaccgctcgtagccgttacccgcgggccgccacagccgccggccgggagaggcgcgcgccatggcttctggagccgattcaaaaggtgatgacctatcaacagccattctcaaacagaagaaccgtcccaatcggttaattgttgatgaagccatcaatgaggacaacagtgtggtgtccttgtcccagcccaagatggatgaattgcagttgttccgaggtgacacagtgttgctgaaaggaaagaagagacgagaagctgtttgcatcgtcctttctgatgatacttgttctgatgagaagattcggatgaatagagttgttcggaataaccttcgtgtacgcctaggggatgtcatcagcatccagccatgccctgatgtgaagtacggcaaacgtatccatgtgctgcccattgatgacacagtggaaggcattactggtaatctcttcgaggtataccttaagccgtacttcctggaagcgtatcgacccatccggaaaggagacatttttcttgtccgtggtgggatgcgtgctgtggagttcaaagtggtggaaacagatcctagcccttattgcattgttgctccagacacagtgatccactgcgaaggggagcctatcaaacgagaggatgaggaagagtccttgaatgaagtagggtatgatgacattggtggctgcaggaagcagctagctcagataaaggagatggtggaactgcccctgagacatcctgccctctttaaggcaattggtgtgaagcctcctagaggaatcctgctttacggacctcctggaacaggaaagaccctgattgctcgagctgtagcaaatgagactggagccttcttcttcttgatcaatggtcctgagatcatgagcaaattggctggtgagtctgagagcaaccttcgtaaagcctttgaggaggctgagaagaatgctcctgccatcatcttcattgatgagctagatgccatcgctcccaaaagagagaaaactcatggcgaggtggagcggcgcattgtatcacagttgttgaccctcatggatggcctaaagcagagggcacatgtgattgttatggcagcaaccaacagacccaacagcattgacccagctctacggcgatttggtcgctttgacagggaggtagatattggaattcctgatgctacaggacgcttagagattcttcagatccataccaagaacatgaagctggcagatgatgtggacctggaacaggtagccaatgagactcacgggcatgtgggtgctgacttagcagccctgtgctcagaggctgctctgcaagccatccgcaagaagatggatctcattgacctagaggatgagaccattgatgccgaggtcatgaactctctagcagttactatggatgacttccggtgggccttgagccagagtaacccatcagcactgcgggaaaccgtggtagaggtgccacaggtaacctgggaagacatcgggggcctagaggatgtcaaacgtgagctacaggagctggtccagtatcctgtggagcacccagacaaattcctgaagtttggcatgacaccttccaagggagttctgttctatggacctcctggctgtgggaaaactttgttggccaaagccattgctaatgaatgccaggccaacttcatctccatcaagggtcctgagctgctcaccatgtggtttggggagtctgaggccaatgtcagagaaatctttgacaaggcccgccaagctgccccctgtgtgctattctttgatgagctggattcgattgccaaggctcgtggaggtaacattggagatggtggtggggctgctgaccgagtcatcaaccagatcctgacagaaatggatggcatgtccacnnnnnnnnntgtgttcatcattggcgctaccaaccggcctgacatcattgatcctgccatcctcagacctggccgtcttgatcagctcatctacatcccacttcctgatgagaagtcccgtgttgccatcctcaaggctaacctgcgcaagtcccccagttgccaggatgtggacttgggagttcctggctaaatgactaatggctt

SEQ ID NO: 185198 - DNA, 1387 bp, Homo Sapiens
  misc_feature (1202)..(1210): n is a, c, g, or t
actttgtacaaaaaagttgggtggaactgcccctgaaacatcctgccctctttaaggcaattggtgtgaagcctcctagaggaatcctgctttacggacctcctggaacaggaaagaccctgattgctcgagctgtagcaaatgagactggagccttcttcttcttgatcaatggtcctgagatcatgagcaaattggctggtgagtctgagagcaaccttcgtaaagcctttgaggaggctgagaagaatgctcctgccatcatcttcattgatgagctagatgccatcgctcccaaaagagagaaaactcatggcgaggtggagcggcgcattgtatcacagttgttgaccctcatggatggcctaaagcagagggcacatgtgattgttatggcagcaaccaacagacccaacagcattgacccagctctacggcgatttggtcgctttgacagggaggtagatattggaattcctgatgctacaggacgcttagagattcttcagatccataccaagaacatgaagctggcagatgatgtggacctggaacaggtagccaatgagactcacgggcatgtgggtgctgacttagcagccctgtgctcagaggctgctctgcaagccatccgcaagaagatggatctcattgacctagaggatgagaccattgatgccgaggtcatgaactctctagcagttactatggatgacttccggtgggccttgagccagagtaacccatcagcactgcgggaaaccgtggtagaggtgccacaggtaacctgggaagacatcgggggcctagaggatgtcaaacgtgagctacaggagctggtccagtatcctgtggagcacccagacaaattcctgaagtttggcatgacaccttccaagggagttctgttctatggacctcctggctgtgggaaaactttgttggccaaagccattgctaatgaatgccaggccaacttcatctccatcaagggtcctgagctgctcaccatgtggtttggggagtctgaggccaatgtcagagaaatctttgacaaggcccgccaagctgccccctgtgtgctattctttgatgagctggattcgattgccaaggctcgtggaggtaacattggagatggtggtggggctgctgaccgagtcatcaaccagatcctgacagaaatggatggcatgtccacnnnnnnnnntgtgttcatcattggcgctaccaaccggcctgacatcattgatcctgccatcctcagacctggccgtcttgatcagctcatctacatcccacttcctgatgagaagtcccgtgttgccatcctcaaggctaacctgcgcaagtccccagttgccaaggatgtggacttggagttcct

SEQ ID NO: 185199 - DNA, 2240 bp, Homo Sapiens
  misc_feature (448)..(457): n is a, c, g, or t
  misc_feature (478)..(728): n is a, c, g, or t
  misc_feature (943)..(951): n is a, c, g, or t
ttggggatgcttctgtttagttaggtttctttcaaaatgtggaggtagccttgaaccctctttccttttcctcctagtatcctgtggagcacccagacaaattcctgaagtttggcatgacaccttccaagggagttctgttctatggacctcctggctgtgggaaaactttgttggccaaagccattgctaatgaatgccaggccaacttcatctccatcaagggtcctgagctgctcaccatgtggtttggggagtctgaggccaatgtcagagaaatctttgacaaggtgagctgcaataggctgaactatgtattgatttgcctgagggcaaggaatagaggctgtttttctttaagagggttgaaatattcttagtgctggctgctcaactgcacagtaagtcacttgattttctttctgaggtctgagagacctagtgttannnnnnnnnnctctctctctctcgagacagnnnnnnnnnnnnnnnnnnnnnnnnnnnnnnnnnnnnnnnnnnnnnnnnnnnnnnnnnnnnnnnnnnnnnnnnnnnnnnnnnnnnnnnnnnnnnnnnnnnnnnnnnnnnnnnnnnnnnnnnnnnnnnnnnnnnnnnnnnnnnnnnnnnnnnnnnnnnnnnnnnnnnnnnnnnnnnnnnnnnnnnnnnnnnnnnnnnnnnnnnnnnnnnnnnnnnnnnnnnnnnnnnnnnnnnnnnnnnnnnnnnnnnnnnnngtgtgagccaccacgtttgcctagagacatctagttttgttagtgcttgaatcaatccattcctcctacaagcccgccaagctgccccctgtgtgctattctttgatgagctggattcgattgccaaggctcgtggaggtaacattggagatggtggtggggctgctgaccgagtcatcaaccagatcctgacagaaatggatggcatgtccacnnnnnnnnntgtgttcatcattggcgctaccaaccggcctgacatcattgatcctgccatcctcagacctgggtcttgatcagctcatctacatcccacttcctgatgagaagtcccgtgttgccatcctcaaggctaacctgcgcaagtccccagttgccaaggatgtggacttggagttcctggctaaaatgactaatggcttctctggagctgacctgacagagatttgccagcgtgcttgcaagctggccatccgtgaatccatcgagagtgagattaggcgagaacgagagaggcagacaaacccatcagccatggaggtagaagaggatgatccagtgcctgagatccgtcgagatcactttgaagaagccatgcgctttgcgcgccgttctgtcagtgacaatgacattcggaagtatgagatgtttgcccagacccttcagcagagtcggggctttggcagcttcagattcccttcagggaaccagggtggagctggccccagtcagggcagtggaggcggcacaggtggcagtgtatacacagaagacaatgatgatgacctgtatggctaagtggtggtggccagcgtgcagtgagctggcctgcctggaccttgttccctgggggtgggggcgcttgcccaggagagggaccaggggtgcgcccacagcctgctccattctccagtctgaacagttcagctacagtctgactctggacagggggtttctgttgcaaaaatacaaaacaaaagcgataaaataaaagcgattttcatttggtaggcggagagtgaattaccaacagggaattgggccttgggcctatgccatttctgttgtagtttggggcagtgcaggggacctgtgtggggtgtgaaccaaggcactactgccacctgccacagtaaagcatctgcacttgactcaatgctgcccgagccctcccttccccctatccaacctgggtaggtgggtaggggccacagttgctggatgtttatatagagagtaggttgatttattttacatgcttttgagttaatgttggaaaactaatcacaagcagtttctaaaccaaaaaatgacatgttgtaaaaggacaataaacgttgggtcaaaatggagcctgagtcctgggccctgtgcctgcttcttttcctgggaacagccttgggctacccaccactcccaaggcattcttccaaatgtgaaatcctggaagtaagattgcaccttcttcctctcctgatcacatcggtatgatgtctcctgttgcctcaccctttg

SEQ ID NO: 185200 - DNA, 1998 bp, Homo Sapiens
  misc_feature (309)..(347): n is a, c, g, or t
  misc_feature (1655)..(1663): n is a, c, g, or t
ttgggtctgctgccccgacggggccaggactccacagcgctttctcagtcacaagccatgatgaattggtgactcagacgctttgtgctttttcctttgcttcttgagaccggggtgtgtgtggctcagcttccacggcgtgtttggttcggtccatgtgtgtgcgtgtgtatacttgaagagaactgtcgtgtctgatttgcactattggaggaggactaaagttgcctgacaactttatgtgttatgccagaactctgagggcaaactgctgaaaaacaaagggtttaaggatgacatttctgaccnnnnnnnnnnnnnnnnnnnnnnnnnnnnnnnnnnnnnnnaatgtagacaatacagctttggaaggggaagtctcatacaggttataggtctttctctctctagatttcaggtgcttgcaactggactgcagactctaccaatcacgggcattttatcttctctgaacactgcagtttgttagactagagctgaggttggaggattccatagtgctttaaacgtgatgcatgttttaatggagaaaaaatagctggtttctattaattatatagacagtaaacaaaaaccttaatacttactatcttcttttcagaattagtttatttttgtcagttacagtcctagatatacttactgctggtacagttgtactctaagattggtatttgatattcactttactcacaagtagtgcgggaggccagctcctggcaggccctcgcgatgagcagtgggtcagctgcggtgtgggatgctggagtttggctgcaggctgacatcatttatttttgcatccctgtctgctttgttacaagctcccaggggaggtggggtttgtgtcttccaacttccctacatgcagaaactgctccctttgaactctcttggctgaacagcagattactgacagacaatctgtgatatggtgttttatacgcttcctcgtacgctggggccaaggcagtatacattcctctgactttatactgttattactgcatttattatttgctatattaatagctactaactagaaattagatgaagcaagcatgacagacacagctgtggaggtcacagctgctcctttttggtcaatgagcgtttctatcccctccccctggggtgtgctgtgtcccacctggcccaccagaggctcacgacgatggcacctgaccaggtgacgtgggcgtggtcacctcacctgcaaggctttgtggactctgcacaccgtatgacccccggttttacagtttttagctgttgaattttggaaattggcactgggtgaaaaggtcggaggactggctcttgtagtcacagagtggctgcaggcctttgaaaagtggaggaaagaaaagcccttctccttgccccgcacacatttcactcccactgtactgggcttccaagctttggcattcaggcccctatattttctgtaggaaaaatcgttgagaacacttttctatatgggtgattttgagaccatcgttacgctgtgcgtaaagaatgtacagagaaatttgtaggtattttttgaagaacattaatttgttaatgatatgtagctatttaatttttccctttcctattgtaatcattcattttttttgttgttcggnnnnnnnnngttgatcttttattttgtcgtagatttgtctgtaaaagtgcaggaacagttattctatgagaacactgcatctgcattcatagccacgagtttgttattgctacaggctactgagcgtcgtaacaggaaaaccacccacagctgaccggctcggtggaggacactcctgggacaggtctctttgtcagtgaacaatggcgtcactctgggcaggggtcgggcggtgctggcggccgggtccctggtgcactgacctatctgggatatgcagtaccctgtagggggcctggggcataggaggcagcagaaaccaaacatttcactgaaaaagcccc

SEQ ID NO: 185201 - DNA, 884 bp, Homo Sapiens
  misc_feature (408)..(416): n is a, c, g, or t
ttggctctgcacaccgtatgacccccggttttacagtttttagctgttgaattttggaaattggcactgggtgaaaaggtcggaggactggctcttgtagtcacagagtggctgcaggcctttgaaaagtggaggaaagaaaagcccttctccttgccccgcacacatttcactcccactgtactgggcttccaagctttggcattcaggcccctatattttctgtaggaaaaatcgttgagaacacttttctatatgggtgattttgagaccatcgttacgctgtgcgtaaagaatgtacagagaaatttgtaggtattttttgaagaacattaatttgttaatgatatgtagctatttaatttttccctttcctattgtaatcattcattttttttgttgttcggnnnnnnnnngttgatctttttttttgtcgtagatttgtctgtaaaagtgcaggaacagttattctatgagaacactgcatctgcattcatagccacgagtttgttattgctacaggctactgagcgtcgtaacaggaaaaccacccacagctgaccggctcggtggaggacactcctgggacaggtctctttgtcagtgaacaagggcgtcactctgggaggggtcggcggtgctggcggccgggtccctggtgcactgacctatctgggataggcagtaccctggaatgggggcctggggcagaggaggcagctttaaaaccaaacatttcactgagaaagccccctccctgctctaagaagggctccgtgaagttcttcccagagccgcgctgcctgcagtgcgctctgaccttctcttcatgtgtgtaaatctgtaatataccatttctctgtggcctgtttttcctgggagaa

SEQ ID NO: 185202 - DNA, 1399 bp, Homo Sapiens
acaaaaaagttgggtctcagatgacccctgttatagagaaacatgtccatatatacgggatcctttaaatggccaagcagtccctgcaaatgggacttacgagtttggttatcagatgcactttatttgtaatgagggttattacttaattggtgaagaaattctatattgtgaacttaaaggatcagtagcaatttggagcggtaagcccccaatatgtgaaaaggttttgtgtacaccacctccaaaaataaaaaatggaaaacacacctttagtgaagtagaagtatttgagtatcttgatgcagtaacttatagttgtgatcctgcacctggaccagatccattttcacttattggagagagcacgatttattgtggtgacaattcagtgtggagtcgtgctgctccagagtgtaaagtggtcaaatgtcgatttccagtagtcgaaaatggaaaacagatatcaggatttggaaaaaaattttactacaaagcaacagttatgtttgaatgcgataagggtttttacctcgatggcagcgacacaattgtctgtgacagtaacagtacttgggatcccccagttccaaagtgtcttaaagtgtcgacttcttccactacaaaatctccagcgtccagtgcctcaggtcctaggcctacttacaagcctccagtctcaaattatccaggatatcctaaacctgaggaaggaatacttgacagtttggatgtttgggtcattgctgtgattgttattgccatagttgttggagttgcagtaatttgtgttgtcccgtacagatatcttcaaaggaggaagaagaaagggaaagcagatggtggagctgaatatgccacttaccagactaaatcaaccactccagcagagcagagaggctgaatagattccacaacctggtttgccagttcatcttttgactctattaaaatcttcaatagttgttattctgtagtttcactctcatgagtgcaactgtggcttagctaatattgcaatgtggcttgaatgtaggtagcatcctttgatgcttctttgaaacttgtatgaatttgggtatgaacagattgcctgctttcccttaaataacacttagatttattggaccagtcagcacagcatgcctggttgtattaaagcagggatatgctgtattttataaaattggcaaaattagagaaatatagttcacaatgaaattatattttctttgtaaagaaagtggcttgaaatcttttttgttcaaagattaatgccaactcttaagattattctttcaccaactatagaatgtattttatatatcgttcattgtaaaagcccttaaaaatatgtgtatactactttggctcttgtgcataaaacagaacactgaaa

SEQ ID NO: 185203 - DNA, 1276 bp, Homo Sapiens
caactttgtacaaaaaagttgggcactggatgctttgtgagttggggattgttgcgtcccatatctggacccagaagggacttccctgctcggctggctctcggtttctctgctttcctccggagaaataacagcgtcttccgcgccgcgcatggagcctcccggccgccgcgagtgtccctttccttcctggcgctttcctgggttgcttctggcggccatggtgttgctgctgtactccttctccgatgcctgtgaggagccaccaacatttgaagctatggagctcattggtaaaccaaaaccctactatgagattggtgaacgagtagattataagtgtaaaaaaggatacttctatatacctcctcttgccacccatactatttgtgatcggaatcatacatggctacctgtctcagatgacgcctgttatagagaaacatgtccatatatacgggatcctttaaatggccaagcagtccctgcaaatgggacttacgagtttggttatcagatgcactttatttgtaatgagggttattacttaattggtgaagaaattctatattgtgaacttaaaggatcagtagcaatttggagcggtaagcccccaatatgtgaaaaggttttgtgtacaccacctccaaaaataaaaaatggaaaacacacctttagtgaagtagaagtatttgagtatcttgatgcagtaacttatagttgtgatcctgcacctggaccagatccattttcacttattggagagagcacgatttattgtggtgacaattcagtgtggagtcgtgctgctccagagtgtaaagtggtcaaatgtcgatttccagtagtcgaaaatggaaaacagatatcaggatttggaaaaaaattttactacaaagcaacagttatgtttgaatgcgataagggtttttacctcgatggcagcgacacaattgtctgtgacagtaacagtacttgggatcccccagttccaaagtgtcttaaaggtcctaggcctacttacaagcctccagtctcaaattatccaggatatcctaaacctgaggaaggaatacttgacagtttggatgtttgggtcattgctgtgattgttattgccatagttgttggagttgcagtaatttgtgttgtcccgtacagatatcttcaaaggaggaagaagaaagggaaagcagatggtggagctgaatatgccacttaccagactaaatcaaccactccagcagagcagagaggctgaatagattccacaacc

SEQ ID NO: 185204 - DNA, 1042 bp, Homo Sapiens
actttgtacaaaaaagttgggttaaacatgccctctaaaagtaggtggttttgaagagaataaattcatcagataacctcaagtcacatgagaatcttagtccatttacattgccttggctagtaaaagccatctatgtatatgtcttacctcatctcctaaaaggcagagtacaaagtaagccatgtatctcaggaaggtaacttcattttgtctatttgctgttgattgtaccaagggatggaagaagtaaatatagctcaggtagcactttatactcaggcagatctcagccctctactgagtcccttagccaagcagtttctttcaaagaagccagcaggcgaaaagcagggactgccactgcatttcatatcacactgttaaaagttgtgttttgaaattttatgtttagttgcacaaattgggccaaagaaacattgccttgaggaagatatgattggaaaatcaagagtgtagaagaataaatactgttttactgtccaaagacatgtttatagtgctctgtaaatgttcctttcctttgtagtctctggcaagatgctttaggaagataaaagtttgaggagaacaaacaggaattctgaattaagcacagagttgaagtttatacccgtttcacatgcttttcaagaatgtcgcaattactaagaagcagataatggtgttttttagaaacctaattgaagtatattcaaccaaatactttaatgtataaaataaatattatacaatatacttgtatagcagtttctgcttcacatttgattttttcaaatttaatatttatattagagatctatatatgtataaatatgtattttgtcaaatttgttacttaaatatatagagaccagttttctctggaagtttgtttaaatgacagaagcgtatatgaatttcaaaaaaatttaagctgcaaaaatgtatttgctataaaatgagaagtctcactgatagaggttctttattgctcattttttaaaaatggactcttgaaatctgttaaataaaattgtac

SEQ ID NO: 185205 - DNA, 709 bp, Homo Sapiens
catcctcacattactttcatgatggttatcttctaagatttccattataaaatacagagtgtggtgagcattcttgtacatacatcttacatacttgtgcaaatatatatgtaggttaaattctaagatgtggaattgcaaagtttgtaaagtgtgtagttttcatttgataaacttaaaaaatcaatatcaaaattaaagtcataattttatattgataaggccctggtgaatttataaaatcaaacttatttttctaggtcctaggcctacttacaagcctccagtctcaaattatccaggatatcctaaacctgaggaaggaatacttgacagtttggatgtttgggtcattgctgtgattgttattgccatagttgttggagttgcagtaatttgtgttgtcccgtacagatatcttcaaaggaggaagaagaaagggaaagcagatggtggagctgaatatgccacttaccagactaaatcaaccactccagcagagcagagaggctgaatagattccacaacctggtttgccagttcatcttttgactctattaaaatcttcaatagatgttattctgtagtttcactctcatgagtgcaactgtggcttagctaatattgcaatgtggcttgaatgtgatagcatcctttgatgcttctttgaaacttgtatgaatttggggtatgaacagattgcctgctt

SEQ ID NO: 185206 - DNA, 2409 bp, Homo Sapiens
  misc_feature (164)..(211): n is a, c, g, or t
ggcaaatgtggtcagggcaattgttgtgtgtggggttcattttcattaaaaaaacatttcaaaatgtatgctttcaggattataagacatattttagaacaacatattcctaaactgaactaccttggcaaaaattgctttcaaggaatataaatatttacgtnnnnnnnnnnnnnnnnnnnnnnnnnnnnnnnnnnnnnnnnnnnnnnnntgccttagcctgaacaataggaatcttaaagaattgtggttttgccacagaaagaagttactaagaagagaggaggataataaaaaaattaaacttcagaacttgatactcttcgtagatactcaacttattacacgttttacagaaaccaattttaatgcacacataaaggccaccacaaagtgtcttttcttattgcctctttttggcttttgaagtaaaatactggttatatttttttatattctacttattcactgaacacactggagtctaaagctaaaataagttttcataatgaaaaaacataaattatcagcacttcaaatgctctataaacatctctagaatttggcctatgttatgaaccagctgacttaagaaaaacaaaaataagacaaaaggacagcaatcaattttgaccacacttttttcagcaagtgcttaaggtggtattataatcaatccaattaattgcacaccagtgtttttatactgatatacacgtaagtatatatatttacctgcatctacaaatattaaattctaggggttaaaaaaaacttatgtaaacttttaaaaaagcaatttgccatttatctctctcgatgtattcattttgaccattcatactttttctttctttctaagaagataattgagctgagtgctttgcaaatgattttaacagtagtgtattgaattaattatgtctattattccatcatttctcaatctgtaattccttactgataaaacttttgtgcctgttttatgaagaaaatagattacatatatttataagattgatagcattttttgttatgaacaatgttaacattatatctcagaacatactatagaatacaaagactactgtcaggtaggagtacataagagacaattgtgtatacatgtgggtttattatactcatatgtagacacattctcacaaaagctagaaatgtcctggcacttaacacatagctcactttaataatcaaataggatagctcttgtttcagtgtgaagataaaagatacgaaaagtcaatacctctacatttatctcctaggtttttttgttttcggaatattgtgatttttaataaagaccaaaccaacttgaacactggtcccaggccaaatcagatctttctagttcactgattcaatggtagagaacttctacttgaacatgaagtttattatgacttgaagcaaaatcaggaggaaaatgatgaagtagtctttttgttgcagaaaataatccgtggccggtgtgcttgaaactaaatgatttcgaagagccataatatttcttttaatttcttcctgtgtttgttttatagattcgatggaactctgaatgtctcccagttctattcctttctttcttcttgtacttggttttactgattgagcttcacttccagaggagtcttgaatgtcaggttctggggaggaatagccttttgctactttcttctgttgcctggttggcttatgtttcattttggggacgctaaccattggagtacgatgtttcactttggtctgaataacaccatctttttcaaactgtatcatatcattaagtgggtcccatggtcgggtatctgcaaacttgtaatgccattctcctgtgagtggatcaagttcaaataatttgcaagaccactcttcattttttgttttccgatccctggcagcttgtctttgagcttcttccaaaacatacttctcttgggtagcttcagtttggtctttggcatttatggctcgagttacccgttgccagagtttctctgattcaaaatctccctgttcttcaaattttacagtgtgccttattaatctccattgcttaatgtcaggtgttggattccagaaaacctctgaattatcagtctttttatcagtaataaaaacttcactatcccaatgaccttccaaagtagctaggacttcttttcccagtttaagtttccctgatatttgattaacacagtcactactccctaggaatggctttagtttaaattcaagtattgcactgtatccagttttttgacatgtaatattgactgttccaccaagctccagtgtcattgtaccataaagaattcctttacaatgagcgtatggcattgtcattacataatcttcacctctattcaagaaagttaaccgtgccaa

SEQ ID NO: 185207 - DNA, 815 bp, Homo Sapiens
ccctaaaaaaaacctcgccacaagcctggcccggaacatggaccggctctcactggatgaggagcactacaaccggcaggaggagtggcggcggcagctccccgagagcctgggcgaggggcttcgacagggcctgtcccggctgggcatcagcctgcttggtgcaattgctggtatagttgatcagccgatgcagaacttccagaaaacatctgaggcacaggcttcagcaggacacaaggccaagggtgtcatctcgggtgtggggaaaggaatcatgggggtgttcacaaagcccatcgtaggatctgctgagctggtgtcacagactggctatggtatttcccctggagctggactttctcagcttcccaaacagccgccatcagccaagtgatctacatgctgaccaggctccaaacagccatgtcaaatatgtctggaaaatgcttcattctctgggcagaccagaagtccacatggccctggacgtggttctggtgaggggctcaggccaggagcatgaagggtgcttgctgctgacatcagaagtgctcttcgtggtgagtgtcagtgaggacacacagcagcaggccttccccgtcacagaaatcgactgtgcacaggacagcaagcagaacaacttactcacagtgcagctcaagcaacccttattggcctgtgatgtggaggtagatggagtccgagacagactgtcatagcaacattacaacagactggtggactacatcacaaatacatcttgtcacctggcccccagctgttcttccttgcgaataccatgccctgtggtg

SEQ ID NO: 185208 - DNA, 1326 bp, Homo Sapiens
  misc_feature (808)..(842): n is a, c, g, or t
ttggcaatattactggctcgtgtggcctgcttcatgctcctggaataaattcaataaccaccagttgccccttatgttcccagcccaggattcaaactgtgcttcatgcagaatgggcactctaatggaaggatttggctccaggatagatacaaaactgtacctggtgtttgttggtgtaaagtggtagttaagaagagaacaatgacactacaaaatacaagccaaaaagggaaagtgttagcatttaacatcatagtttatggatattgggatacattgaccattgctttcttctttggtgtccttgatagttactgattctgcagaactgcaggcgtatccagcacttgtggtggagaaaatgttgaaagctttaaaattaaattccaatgaagccagattgaagtttcctagattacttcagattatagaacggtatccagaggagactttgagcctcatgacaaaagagatctcttccgttccctgctggcagttcatcagctggatcagccacatggtggccttactggacaaagaccaagccgttgctgttcagcactctgtggaagaaatcactgataactacccgcaggctattgtttatcccttcatcataagcagcgaaagctattccttcaaggatacttctactggtcataagaataaggagtttgtggcaaggattaaaagtaagttggatcaaggaggagtgattcaagattttattaatgccttagatcagctctctaatcctgaactgctctttaaggattggagcaatgatgtaagagctgaactagcnnnnnnnnnnnnnnnnnnnnnnnnnnnnnnnnnnntgtatgaaagaatgtatgcagccttgggtgacccaaaggctccaggcctgggggcctttagaaggaagtttattcagacttttggaaaagaatttgataaacattttgggaaaggaggttctaaactactgagaatgaagctcagtgacttcaacgacattaccaacatgctacttttaaaaatgaacaaagactcaaagccccctgggaatctgaaagaatgttcaccctggatgagcgacttcaaagtggagttcctgagaaatgagctggagattcccggtcagtatgacggtaggggaaagccattgccagagtaccacgtgcgaatcgccgggtttgatgagcgggtgacagtcatggcgtctctgcgaaacccaagcgcatcatcatccgtggccatgacgagagggaacaccctttcctggtgaatggtggcgaggacctgcggcagaaccagcgcgtgtagcagctcttccaggtc

SEQ ID NO: 185209 - DNA, 1423 bp, Homo Sapiens
  misc_feature (1291)..(1325): n is a, c, g, or t
ttggccagatgctaaaatggacccaatgaacatctgggatgacatcatcacaaatcgatgtttctttctcagcaaaatagaggagaagcttacccctcttccagaagataatagtatgaatgtggatcaagatggtgaccccagtgacaggatggaagtgcaagagcaggaagaagatatcagctccctgatcaggagttgcaagttttccatgaaaatgaagatgatagacagtgcccggaagcagaacaatttctcacttgctatgaaactactgaaggagctgcataaagagtcaaaaaccagagacgattggctggtgagctgggtgcagagctactgccgcctgagccactgccggagccggtcccagggctgctctgagcaggtgctcactgtgctgaaaacagtctctttgttggatgagaacaacgtgtcaagctacttaagcaaaaatattctggctttccgtgaccagaacattctcttgggtacaacttacaggatcatagcgaatgctctcagcagtgagccagcctgccttgctgaaatcgaggaggacaaggctagaagaatcttagagctttctggatccagttcagaggattcagagaaggtgatcgcgggtctgtaccagagagcattccagcacctctctgaggctgtgcaggcggctgaggaggaggcccagcctccctcctggagctgtgggcctgcagctggggtgattgatgcttacatgacgctggcagatttctgtgaccaacagctgcgcaaggaggaagagaatgcatcagttactgattctgcagaactgcaggcgtatccagcacttgtggtggagaaaatgttgaaagctttaaaattaaattccaatgaagccagattgaagtttcctagattacttcagattatagaacggtatccagaggagactttgagcctcatgacaaaagagatctcttccgttccctgctggcagttcatcagctggatcagccacatggtggccttactggacaaagaccaagccgttgctgttcagcactctgtggaagaaatcactgataactacccgcaggctattgtttatcccttcatcataagcagcgaaagctattccttcaaggatacttctactggtcataagaataaggagtttgtggcaaggattaaaagtaagttggatcaaggaggagtgattcaagattttattaatgccttagatcagctctctaatcctgaactgctctttaaggattggagcaatgatgtaagagctgaactagcnnnnnnnnnnnnnnnnnnnnnnnnnnnnnnnnnnntgtatgaaagaatgtatgcagccttgggtgacccaaaggctccaggcctgggggcctttagaagaagtttattcagacttttggaaaagatttgataa

SEQ ID NO: 185210 - DNA, 2425 bp, Homo Sapiens
  misc_feature (87)..(121): n is a, c, g, or t
  misc_feature (2213)..(2273): n is a, c, g, or t
ttggattttattaatgccttagatcagctctctaatcctgaactgctctttaaggattggagcaatgatgtaagagctgaactagcnnnnnnnnnnnnnnnnnnnnnnnnnnnnnnnnnnntgtatgaaagaatgtatgcagccttgggtgacccaaaggctccaggcctgggggcctttagaaggaagtttattcagacttttggaaaagaatttgataaacattttgggaaaggaggttctaaactactgagaatgaagctcagtgacttcaacgacattaccaacatgctacttttaaaaatgaacaaagactcaaagccccctgggaatctgaaagaatgttcaccctggatgagcgacttcaaagtggagttcctgagaaatgagctggagattcccggtcagtatgacggtaggggaaagccattgccagagtaccacgtgcgaatcgccgggtttgatgagcgggtgacagtcatggcgtctctgcgaaggcccaagcgcatcatcatccgtggccatgacgagagggaacaccctttcctggtgaagggtggcgaggacctgcggcaggaccagcgcgtggagcagctcttccaggtcatgaatgggatcctggcccaagactccgcctgcagccagagggccctgcagctgaggacctatagcgttgtgcccatgacctccaggttaggattaattgagtggcttgaaaatactgttaccttgaaggaccttcttttgaacaccatgtcccaagaggagaaggcggcttacctgagtgatcccagggcaccgccgtgtgaatataaagattggctgacaaaaatgtcaggaaaacatgatgttggagcttacatgctaatgtataagggcgctaatcgtactgaaacagtcacgtcttttagaaaacgagaaagtaaagtgcctgctgatctcttaaagcgggccttcgtgaggatgagtacaagccctgaggctttcctggcgctccgctcccacttcgccagctctcacgctctgatatgcatcagccactggatcctcgggattggagacagacatctgaacaactttatggtggccatggagactggcggcgtgatcgggatcgactttgggcatgcgtttggatccgctacacagtttctgccagtccctgagttgatgccttttcggctaactcgccagtttatcaatctgatgttaccaatgaaagaaacgggccttatgtacagcatcatggtacacgcactccgggccttccgctcagaccctggcctgctcaccaacaccatggatgtgtttgtcaaggagccctcctttgattggaaaaattttgaacagaaaatgctgaaaaaaggagggtcatggattcaagaaataaatgttgctgaaaaaattggtacccccgacagaaaatatgttacgctaagagaaagttagcaggtgccaatccagcagtcattacttgtgatgagctactcctgggtcatgagaaggcccctgccttcagagactatgtggctgtggcacgaggaagcaaagatcacaacattcgtgcccaagaaccagagagtgggctttcagaagagactcaagtgaagtgcctgatggaccaggcaacagaccccaacatccttggcagaacctgggaaggatgggagccctggatgtgaggtctgtgggagtctgcagatagaaagcattacattgtttaaagaatctactatactttggttggcagcattccatgagctgattttcctgaaacactaaagagaaatgtcttttgtgctacagtttcgtagcatgagtttaaatcaagattatgatgagtaaatgtgtatgggttaaatcaaagataaggttatagtaacatcaaagattaggtgaggtttatagaaagatagatatccaggcttaccaaagtattaagtcaagaatataatatgtgatcagctttcaaagcatttacaagtgctgcaagttagtgaaacagctgtctccgtaaatggaggaaatgtggggaagccttggaatgcccttctggttctggcacattggaaagcacactcagaaggcttcatcaccaagattttgggagagtaaagctaagtatagttgatgtaacattgtagaagcagcataggaacaataagaacaataggtaaagctataattatggcttatatttagaaatgactgcnnnnnnnnnnnnnnnnnnnnnnnnnnnnnnnnnnnnnnnnnnnnnnnnnnnnnnnnnnnnngacattttatgatagatttgctctctagaaggaaacgtctttatttaggagggcaaaaattttggtcatagcattcacttttgctattccaatctacaaactggaagatacataaaagtgctttgcattgaatttgggataacttccaaaaa

SEQ ID NO: 185211 - DNA, 1725 bp, Homo Sapiens
  misc_feature (1369)..(1377): n is a, c, g, or t
ttgaaaaaattccataaacccaacttaaaatcaaagaactcagagagcttcaatgcggagtcatcagcaactcgcaggaaccacacacatgattggacaagtctgtacataaaaccccaaaagaacatcagttttgtggacaatggtttcctctgctgtaaagaaacgtatgcatatatgatcagtaagcagctcacatctttctgaatgtcaaggtctacaggattgtctctgtccacctttggtcaatgggttcaggaagtgactcatgggaactgcactcttaggagaaacacttttgggaataattttattgaataacaaccaccactcaattacactaagcttcagaaattgttggatttgtttaattttgctgtgtacctatacattgtttagaaagtttcttttggcttaaactgaccatttccccccttctttttgagttttccatgataaaacttgcccaaataaaaacataacaatccatatgcaaagcatatctgccaccacctcccactgcttcctgggccgcaaacagaaaaataaacagtgattaaaaaaaatgccaaagtgaaggtttctctttcttctatcacaacatagttgggtcgttcccttaaagtacatcattgctataagttggtatcactgcaaatctcaagtcccaaataatctctttttctggatagaaagttattcaaaagggagcacaaaagagcaagctttggggcatactgacaaacacttcattggttagaagagaataattttaaaaatcaaataaaattgaggctggcataggaagtacagattaaatacaggttaaatagctaccagaaacacagaagaggtggttaataaaaactgagattgcttcagaggacacaggagggttgatgagacagtctattttccttccaccatcttccatgagagtcaggaaaagagttctgtgagcacccaacctggagcggtcacctgtctcttccatacacaggaggatgctaagacccagttagctttaaatggtttttagaaagacttacctagtcaaaagtggttaatttgaacttttcaaacttgcaaaagcatatacatttgatatcatcatctgagaagcaattcttagaaaaaaatgtttgcttcaatgtctaaagaaatccagtgaaagttttagaaacattgccagctagacgtctccgagttagagttgattgatatactggattgggatggagaggatgagaactgaaaaagaactgctccagcctctgcctcagaagaggaaactcagcttggagatgacagaattgggtagcggagtagatgctagagcccatgacagatagaaaactacccccatttnnnnnnnnncaacaactcattaactctatctctttgaggttttggagaacaggaagtttatgtgaagttatcgaacacgtcatattaagaacatttcataactaaccccaaaccaaaatgtagatgcatagctagctgtgcaagtttcccaatgctcttcctatctcctaataagtcacacagaaagactatgtgatagcctggattttcttgaagaaattttaaaagaactgattttcctatcatcattgaggccccttttacttcatgccatcagtatgcacttaagagtcccaaggaagtcaaatgttcccaaatgtagccctttacccaacttttttgtacaaagttggcttt

SEQ ID NO: 185212 - DNA, 1986 bp, Homo Sapiens
  misc_feature (344)..(385): n is a, c, g, or t
  misc_feature (1862)..(1870): n is a, c, g, or t
ttggcatgctttggggctgtgcttaagaatttaagctctgttttaaagccgaagaagaaaacatttgaatttaccttcatatgccactaagaacaaaagctctgaagttcttcctgctggcaccaaatattaggattacaagctgtctctctgacaccagtggtaaaaaagcaagtagaatagtttctgagtctgtgttgcagcctctgacacgtggctcaccgctgtcatttgggggatggaatgaacagtcactgttctatagcatcctcctgtgctcttacctaaggaatctaaattgtcctagccttccattgctatgcactgaatgaggactactctcnnnnnnnnnnnnnnnnnnnnnnnnnnnnnnnnnnnnnnnnnntggatctactaacatgtttagcaaatggctctgacagggtggccatgagcagatgagaccagctcttgcttggttggaagccacactgcagtttgcagtttagcctttggtgtctcagtggcctcttgcttattccatgctttttctatcccatcctctctctgtgccctcctgcaatggcagccttggcacaatgcctgggtgtcctcatccttgctttactctggaaagtgtggggatggagaggatggtgcatttccagtgcttccttacctgtcaataacaatggtggccacctgggtcccagcacttggctggtggagagatttttttcattatggagctagtaaagggtccctacgttttacattgattaatgaattatcacccagacatgtgcagatgaaatgtcaatataagaaaaatcaaggtatttgggaaacatgggcataatcaggtagttttgctaaaattcctcttccttggtctacataaagaagacatgggtctgtcatagaatggggacattagactgaaaactgggacaacccccttccttattttatagagactaggagttaaggggcctgcctaagattgcagtgataaagaactgaaccctaaatcagctcccactaatgaaaccctgctttccttgtatcttttaaactcagttctgcatccaacttgagaagaaaaaaagcttctttccatatcaagtaccatatgagttcatttaaactgcaccttgcagaaatgcattgccagaaagcaccagtagcctcctatctgcaagcagagtagtgctctgctctggggaggggtcattggaaaccataatgcagagtgggccccctactccatttcccagcaaaaggctccagctggagggatgggttgtggggcaacctggttcctgctaactgccagattgaatgtgtgggctagaatgcctgcacatttagttaaactgggctcagcatgcttgtcctcaaaatgtccatcctggtcacagcacacaagatggctattggtctgcttttaccctaccctgtactatacatgaaaattccagttattaacacactcaaactggtggagcttgttcaccctaggaaggggattgtatatatggcaggcttccctggtgccgatgtaaagggctacatttgggaacatttgacttccttgggactcttaagtgcataatgatggcatgaagtaaaaggggcctcaatgatgataggaaaatcagttcttttaaaatttcttcaagaaaatccaggctatcacatagtctttctgtgtgacttattaggagataggaagagcattgggaaacttgcacagctagctatgcatctacattttggtttggggttagttatgaaatgttcttaatatgacgtgttcaataacttcacataaacttcctgttctccaaaacctcaaagagatagagttaatgagttgttgnnnnnnnnnaaatgggggtagttttctatctgtcatgggctctagcatctactccgctacccaattctgtcatctccaagctgagtttctcttctgaggcagaggctgggagcaggtctttttca

SEQ ID NO: 185213 - DNA, 1051 bp, Homo Sapiens
  misc_feature (811)..(819): n is a, c, g, or t
acaaaggagtgcagtgagtgctggtggcaacaggagcggggagcaggtagggatcacaggcacagcagcgcggagccggcagggccacctcctcctctacacacaagcatgtggcacttagcgcgccaacacacacctgctcagtttcacagggaacacgacacagcttttcaaaaggaattcttctaaacatttgctttcatatttccaaaaggggagggagggcaggaagaaccacacaccttccaacatttgaaaaaattccataaacccaacttaaaatcaaagaactcagagagcttcaatgcggagtcatcagcaactcgcaggaaccacacacatgattggacaagtctgtacataaaaccccaaaagaacatcagttttgtggacaatggtttcctctgctgtaaagaaacgtatgcatatatgatcagtaagcagctcacatctttctgaatgtcaaggtctacaggattgtctctgtccacctttggtcaatgggttcaggaagtgactcatgggaactgcactcttaggagaaacacttttgggaataattttattgaataacaaccaccactcaattacactaagcttcagaaattgttggatttgtttaattttgctgtgtacctatacattgtttagaaagtttcttttggcttaaactgaccatttccccccttctttttgagttttccatgattaaacttgcccaaataaaaacataacaatccatatgcaaagcatatctgccaccacctcccactgcttcctgggccgcaaacagaaaaataaacagtgattnnnnnnnnntgccaaagtgaaggtttctctttcttctatcacaacatagttgggtagttcccttaaagtacatcattgctataagttggtatcactgcaaatctcaagtcccaaataatctctttttctggatagaaagttattcaaaagggagcacaaaagagcaagctttggggcatactgacaaacacttcattggttagaagagaataattttaaaaatcaaataaaattgagccaa

SEQ ID NO: 185214 - DNA, 1154 bp, Homo Sapiens
  misc_feature (971)..(979): n is a, c, g, or t
actttgtacaaaaaagtttgtccccgacgaaaactgggacaacccccttccttattttataaagactaggagttaaggggcctgcctaagattgcagtgataaaaaactgaaccctaaatcagctcccactaatgaaaccctgctttccttgtatcttttaaactcagttctgcatccaacttgagaagaaaaaaagcttctttccatatcaagtaccatatgagttcatttaaactgcaccttgcagaaatgcattgccagaaagcaccagtagcctcctatctgcaagcagagtagtgctctgctctggggaggggtcattggaaaccataatgcagagtgggccccctactccatttcccagccaaaggctccagctggagggatgggttgtggggcaacctggttcctgctaactgccagattgaatgtgtgggctagaatgcctgcacatttagttaaactgggctcagcatgcttgtcctcaaaatgtccatcctggtcacagcacacaagatggctattggtctgcttttaccctaccctgtactatacatgaaaattccagttattaacacactcaaactggtggagcttgttcaccctaggaaggggattgtatatatggcaggcttccctggtgccgatgtaaagggctacatttgggaacatttgacttccttgggactcttaagtgcatactgatggcatgaagtaaaaggggcctcaatgatgataggaaaatcagttcttttaaaatttcttcaagaaaatccaggctatcacatagtctttctgtgtgacttattaggagataggaagagcattgggaaacttgcacagctagctatgcatctacattttggtttggggttagttatgaaatgttcttaatatgacgtgttcgataacttcacataaacttcctgttctccaaaacctcaaagagatagagttaatgagttgttgnnnnnnnnnaaatgggggtagttttctatctgtcatgggctctagcatctactccgctacccaattctgtcatctccaagctgagtttcctcttctgaggcagaggctggagcagttctttttcagttctcatcctctccatcccaatccagtatatcaatcaactctaactcggagacgtcta

SEQ ID NO: 185215 - DNA, 1289 bp, Homo Sapiens
  misc_feature (1003)..(1011): n is a, c, g, or t
taaaagccaactttgtacaaaaaagttggattaggagataggaagagcattgggaaacttgcacagctagctatgcatctacattttggtttggggttagttatgaaatgttcttaatatgacgtgttcgataacttcacataaacttcctgttctccaaaacctcaaagagatagagttaatgagttgttgttttttttaaatgggggtagttttctatctgtcatgggctctagcatctactccgctacccaattctgtcatctccaagctgagtttcctcttctgaggcagaggctggagcagttctttttcagttctcatcctctccatcccaatccagtatatcaatcaactctaactcggagacgtctagctggcaatgtttctaaaactttcactggatttctttagacattgaagcaaacatttttttctaagaattgcttctcagatgatgatatcaaatgtatatgcttttgcaagtttgaaaagttcaaattaaccacttttgactaggtaagtctttctaaaaaccatttaaagctaactgggtcttagcatcctcctgtgtatggaagagacaggtgaccgctccaggttgggtgctcacagaacccttttcctgactctcgtggaagatggtggaaggaaaatagactgtctcatcaaccctcctgtgtcctctgaagcaatctcagtttttattaaccacctcttctgtgtttctggtagctatttaacctgtatttaatctgtacttcctatgccagcctcaattttatttgatttttaaaattattctcttctaaccaatgaagtgtttgtcagtatgccccaaagcttgctcttttgtgctcccttttgaataactttctatccagaaaaagagattatttgggacttgagatttgcagtgataccaacttatagcaatgatgtactttaagggaactacccaactatgttgtgatagaagaaagagaaaccttcactttggcannnnnnnnnaatcactgtttatttttctgtttgcggcccaggaagcagtgggagtggtggcagatatgctttgcatatggattgttatgtttttatttgggcaagtttaatcatggaaaactcaaaaagaaggggggaaatggtcagtttaagccaaaagaaactttctaaacaatgtataggtacacagcaaaatttaacaaatccaacaatttctgagcttagtgtaattgagtggtggttgttattcaataaaattattcccaaagtgtttctcctaagagtgc

SEQ ID NO: 185216 - DNA, 1813 bp, Homo Sapiens
  misc_feature (1088)..(1107): n is a, c, g, or t
  misc_feature (1130)..(1365): n is a, c, g, or t
ttggcgagtcctccgtgtcggtggccggcagtcatctcgcggccgttcaggataagccagagacatgggaaaaccaatggaagtgtttcaaagttcttctctttaatcacttctgtatccagctgcctttgatttgtggaacctattattttacagagtatttcaatattccttatgattgggaaagaatgccaagatggtattttcttttggcaagatgctttggttgtgcagtcattgaagatacttggcactattttctgcatagactcttacaccacaaaagaatatacaagtatattcataaagttcatcatgagtttcaggctccatttggaatggaagctgaatatgcacatcctttggagactctaattcttggaactggatttttcattggaatcgtgcttttgtgtgatcatgtaattcttctttgggcatgggtgaccattcgtttattagaaactattgatgtccatagtggttatgatattcctctcaaccctttaaatctgatccctttctatgctggttctcggcatcatgatttccaccacatgaacttcattggaaactatgcttcaacatttacatggtgggatcgaatttttggaacagactctcagtataatgcctataatgaaaagaggaagaagtttgagaaaaagactgaataaatatctcacgtaaaccttcctgaaagataaacgttttcctgaattcagaaactagtagctaacattgcttctggagagcagaaataagcatgtcttctggctactaagtgataaaaagaacattaacaacctttaattaccttcctagtgggaactttttctactttacctacaagttctatatatgtagaaatgaataaatatatatttaagtacagttttcatgaggaagttttaaaagaccatgttcctaagcttccaagaaggttttggatactagaagtattaatctatggcttttctcccagtaaaaccataggcctgaagttcacattgggtctttaaatcttttagatatatactggtcatttcagaaaattcttcatagtggtattggccttatatttaacnnnnnnnnnnnnnnnnnnnngagacaaagccacactctgtctnnnnnnnnnnnnnnnnnnnnnnnnnnnnnnnnnnnnnnnnnnnnnnnnnnnnnnnnnnnnnnnnnnnnnnnnnnnnnnnnnnnnnnnnnnnnnnnnnnnnnnnnnnnnnnnnnnnnnnnnnnnnnnnnnnnnnnnnnnnnnnnnnnnnnnnnnnnnnnnnnnnnnnnnnnnnnnnnnnnnnnnnnnnnnnnnnnnnnnnnnnnnnnnnnnnnnnnnnnnnnnnnnnnnnnnnnnnngtgtaagccactgcgcccggcctttttaactttaaacatgttttagaattcacctaaagatcaaaatatcatggattgaacctcatcaattgatagcagtgagtgactgaagcttccaaatcaagaaaagccggcaccaagaacttccattctaatctagagctgaccagtttgagctgattctctctttgaagagtccttcttgattgcagtgcagtactggcatttctgaatggatgtaagtggagtattttagtctaaaggcttttcaaattacttgaatttttttaaaattgaggagctttatttctatttacccttcccatttttgtgtatcaaatttccattgtcattaaaactgtatcttgaaacttttgtgaaactgacctgctggtatttgcacctttgagctcttgaaataaatgtgattttttgtgtgaatatctgg

SEQ ID NO: 185217 - DNA, 1409 bp, Homo Sapiens
ctttgtacaaaaaagttggcacaagatgagtacccagaaatcaactttgtggggctgctcatcgggcccagagggaacaccctgaagaacatagagaaggagtgcaatgccaagattatgatccgggggaaagggtctgtgaaagaagggaaggttgggcgcaaagatggccagatgttgccaggagaagatgagccacttcatgccctggttactgccaatacaatggagaacgtcaaaaaggcagtggaacagataagaaacatcctgaagcagggtatcgagactccagaggaccagaatgatctacggaagatgcagcttcgggagttggctcgcttaaatgggacccttcgggaagacgataacaggatcttaagaccctggcagagctcagagacccgcagcattaccaacaccacagtgtgtaccaagtgtggaggggctggccacattgcttcagactgtaaattccaaaggcctggtgatcctcagtcagctcaggataaagcacggatggataaagaatatttgtccctcatggctgaactgggtgaagcacctgtcccagcatctgtgggctccacctctgggcctgccaccacacccctggccagcgcacctcgtcctgctgctcccgccaacaacccacctccaccgtctctcatgtctaccacccagagccgcccaccctggatgaattctggcccttcagagagtcggccctaccacggcatgcatggaggtggtcctggtgggcccggaggtggcccccacagcttcccacacccattacccagcctgacaggtgggcatggtggacatcccatgcagcacaaccccaatggacccccacccccttggatgcagccaccaccaccaccgatgaaccagggcccccaccctcctgggcaccatggccctcctccaatggatcagtacctgggaagtacgcctgtgggctctggggtctatcgcctgcatcaagggaaaggtatgatgccgccgcctcccagtgggcagcccccaccccctccctctggtcctcttcccccatggcaacaacagcagcagcagcctccgccaccccctccgcccagcagcagtatggcttccagtacccccttgccatggcagcaaaatacgacgactaccaccacgagcgctggcacagggtccatcccgccatggcaacagcagcaggcggctgccgcagcttctccaggagcccctcagatgcaagcaaccccactatggtgcccctgccccccggggtccagccgcctctgccgcctggggcccctccccctccgccgcctccaccgcctggattccgccggcatgatgtatgccccgccccctcctcctccgcctcccatggacccttctaactttgtcaccatgatggg

SEQ ID NO: 185218 - DNA, 1455 bp, Homo Sapiens
ttggccctccaccgggctgtgaggttccaccatctggccttcttggggcactgttactaccactgttttcatagtggattcttctcctaatgatattaatcaaccatcattatctcctcactttaaaacaagatagaaaacggaactttcccttcctccctctctggctgtgcctcagagcgctgctaccctttagaacaaaactagacgggcttcccacaatcgtgtgtccaggctgcttctgactcctgtatttcttgtcgacaccaggactttggcatggcagaggaatttgcttccaaggctctcgaattgaagcccaagtcctatgaagccttttatgccagagcaagagcgaagagaaatagcaggcaattcgtggcagctctggctgacctgcaagaggctgtgaaactctgtcccaccaatcaggaagtcaagaggcttctggcccgcgtagaagaggagtgcaaacaactccagaggagtcaacagcaaaaacagcagggcccgctaccagctccactcaacgactccgagaacgaagaggacaccccaacccctggcttaagtgaccactttcactctgaggagactgaagaggaagaaacttctccccaggaagaatctgtttccccaactcccaggtcccagccatcctcatctgtcccttcctcatacatccgaaaccttcaagaagggttacagtccaaaggaaggccggtatcgccacagagcagggcaggaatcggcaagtccctgagagagcctgtggcccagccagggctgctcctgcagccctccaagcaggcccagatcgtgaaaaccagccagcacctgggctctggccagtcggcagtgagaaatggcagtatgaaagttcagatctcttctcagaaccctcctccaagtcccatgccagggagaatcgctgccactcctgctgggagcagaacccagcatttagagggaacaggtactttcactacaagagctggttgtggccactttggggatcggctgggccccagccagaatgtccgcctgcagtgtggtgagaatggccctgcacaccctttaccaagtaagacgaaaaccacagagaggcttctgtctcattcctccgtggctgtggacgcagcccctccaaaccaaggtgggctggcgacctgcagcgacgtgcgacacccagcttccctcaccagctcaggctcttctggttctccatccagcagcataaagatgtcaagttcaaccagtagtttgacttcgagcagcagtttttcagatggcttcaaggtccaaggaccagatactagaattaaagacaacgttgtaacccacgttcagagcggtacagctgagcacagaccccgcaacacgccgttcatgggcatcatggataagactgcgaggttccaacagcagagcaatcctccaagccgcagctggcac

SEQ ID NO: 185219 - DNA, 2072 bp, Homo Sapiens
  misc_feature (1732)..(1745): n is a, c, g, or t
ttggctctctccctgttacctcactcgtggcttgtagctccacagacccagctgccctctgtaaatcagaggtggggaaaacacccaccctagaagctctattgcccgaagattgtaaccctgaggagcctgaaaatgaagacttccacccttcctggtccccctcaagcctccccttccgcacggacaatgaagagggctgtgggatggtgaagacctcccagcagaatgaggatcggccccctgaagattcttccttagaactccctctggcagtgtgacaggcgctagaggtcctgcctcttacccattctctatttattcccttattttatctaacaccatttcaaaacaaaactgtagaagcagctgctgctcccatgttattttattggggtctttggggaatgggtgggaaaggattgtttgagtattttttaaaagggaaacagtaccaaggagaccagccctaccttgatctggggatagtcttggggcaaagaaagctgcgtagtgctgaacattaagctttctgggccactggaacaaagaactaggatctcacaggaaaagctgggtaactcaagcagctattctttctgtagggaccagaacacgagaatttgaagagcatggcaaagccctttctctcccaagccccaggcagagtacaagctcatttttctcggtggttattctgatatcccattttggtgtgtcataatacttcaaactggaaagtcacctggtcgagtctagggaggagggagtggaagggtctctgcttctgtacaaaatctccaggatttacaaaaatgtaacctgccttccttcaatcccatatttggtaaataagttaatatttgacatgtttggtgttctctgacctgttccccacactggggattcctggtctgtaacttgaattgtttcttccacatgttcttaagtactagagttaaacttgtctatgtgtcttttttctctccatcctttttccttcggagaaagagctggattggctggggatatggtataacgagcctgagccttctgtacgtgtctgacactagcactgtcaggcagctttcggctggggctcacccatcccataggaggcctatgtggagcattaactgtggccaaaggaggcagcgggaacaggctgcttgctatctggaaagatgacatatttgtgccatgcttgttttttcacccaggtttttccctctttgtgagatctgagctttagtggaatgtagaatgtggcaatcttaaggtcaccaatcagtttttgttcttttttcctggatctaccctcatggtcgttttcaacatagcgggttagagttcttatactgttccagttcaattccaagaattgcaaatgtttattggacccctccatcttgatgatatataaaaattggaagccaaaccagttcttaaatgctacatgcaactcccagattccaaaggattcaagttctaattataacctttgaagcgtatagaatggaactcattcagtttgattcagttcttacctctgtcaggaggaatacagttcctgttcatcctgtgttctaagatctccattgaacagcactgatttcctttcattagcaaagtgatctttgtctctgttctaaaatggaggcagtagggagcaaaactattcttctcaagcatcctttacaccatactttacttctggtatggtttattaacnnnnnnnnnnnnnnaaagtgaaaaactgtgttgggggggagacactactcctacttatcttgctcataaagccttttctggtgggatattaaggccctggtgtcttacagaaaccatcacgtatgtcgcagcagcatttcacccctgaagtctctaaactctgagcctgaaaagatttgtatttaatacacataacattttttagttcattctgcctttcctatttgttccagtttttgcttggttttagtttggaggggaacttaagtacacagatccttatctctctccatctcctagctctcacaaaacacagttgagagtcttttaagtacctgagc

SEQ ID NO: 185220 - DNA, 2058 bp, Homo Sapiens
  misc_feature (631)..(692): n is a, c, g, or t
  misc_feature (1187)..(1247): n is a, c, g, or t
ttggatgactttatgtgtaagaaggcggcctctaaatcaaaagagaatggaagatctacaaatagtcatcttggaacatcaaacatgaaaaagaatgaagaaaacactaagaccaagaataagcctttatcaccaataaaacttacacccacatcagtacttgattattttggaactggaagtgtccaaagatctaataagaagatggtggcaagcaaaagaaaagagctttcacaaaatacagatgagtctggattaaatgatgaagccatcgccaagcaattacagcttgatgaagatgcggagctggagaggcagttgcatgaagatgaagagtttgccagaacattagccatgttggatgaagaacccaagaccaaaaaggctcgaaaggacacagaagcgggagaaacgttttcatctgtccaagccaatttaagtaaagcagaaaaacataaatatcctcataaagtaaaaacagcacaagtttcagatgaaagaaagagctacagtcctaggaagcaaagtaaatatgaaagttcaaaagaatctcagcaacattccaagtcatcagctgacaaaataggagaagtctcttctcccaaggccagttctaagctggcaattatgnnnnnnnnnnnnnnnnnnnnnnnnnnnnnnnnnnnnnnnnnnnnnnnnnnnnnnnnnnnnnntgccattaaattgaaaggagagacaaaaactcctaagaaaaccaaaagttctccagctaaaaaagagtctgtaagtcctgaagattctgaaaagaaacgcactaattatcaagcttatcgaagctacttaaatcgagaaggtcccaaggctctgggctccaaagaaataccaaagggagctgaaaattgcttggaaggccttatatttgtaatcacaggcgtgctggagtctattgaacgagatgaggccaagtctctaattgaacgttatgggggaaaagtaacaggaaatgtcagcaagaaaacaaattatcttgtcatgggtcgtgatagtggacagtccaagagtgataaggccgcagccttggggacaaaaattattgatgaagatggcctgttgaatctgattcggactatgccaggcaagaaatccaagtatgaaatagcagttgaaactgagatgaagaaagagtccaaactggagagaacaccccnnnnnnnnnnnnnnnnnnnnnnnnnnnnnnnnnnnnnnnnnnnnnnnnnnnnnnnnnnnnngagcaggccgacttccaaaagggacagtttggcaaagacaataaaaaaggaaacagatgtgttttggaaaagcctggatttcaaggagcaggtggctgaggagacaagtggtgacagcaaggctaggaatttggctgatgacagcagtgaaaacaaagtggaaaatttgctctgggtggataaatataagccaacctcgctcaagaccataattggacagcaaggtgaccagagctgtgccaacaaactcctacgctggctccgaaactggcaaaagagttcttccgaagataaaaaacacgcgcaaagtttggtaaattttccggcaaagatgatggctctagttttaaagcaccgttgctgtcaggccctcctggtgttggcaaaaccaccacagcttccctggtgtgtcaggagttgggatacagctacgtggaactgaatgcaagtgacacccggagtaagagcagtttgaaggcgattgttgctgagtcactgaacaataccagcatcaaaggcttttattctaatggagcagcctcttcaataatcacgaaacatgctctcatcatggatgaagtagatggcatggcaggcaatgaggataggggaggaattcaggaattaattggcctgataaaacatactaaaattcccattattttgtatgtgcaatgataaaaatcatcccaagattcgctctccggttcattattgtttttgatcttcattttcaaagacccggggttgaaacaaattataggtgctagtgatgtctattgcatttaaagaaaggttaaaaaattccccc

SEQ ID NO: 185221 - DNA, 2424 bp, Homo Sapiens
  misc_feature (2118)..(2149): n is a, c, g, or t
tttgtacaaaaaagttgggccgtgttatccgatcaatgacaacagatcaacagaggaggatatttttgccaccaccacctggaattagaaaatgtgtcatatccaccaatatttctgcaacgtctttgacaatagatggaatcagatatgtggtagatggtggcttcgtgaagcagttaaatcacaaccccagattagggttggacatcctggaggtggttccaatttcaaagagcgaggcattacagcgaagtggccgagctggcaggacttcttcaggaaaatgctttcggatctatagtaaagatttttggaaccagtgtatgcctgaccatgtgatccctgaaattaagagaactagtttgacatctgtagttctgaccttaaagtgccttgccatacacgatgtcataaggtttccctatttggatccacctaatgagagacttattttagaagctcttaaacaactttaccagtgtgatgctattgacaggagtggccatgtcaccagattgggtttgtctatggtggagtttcctttgcctccacatctgacatgtgcagtaataaaagctgcttccctggattgtgaagatctactacttccaatagcagcaatgttgtctgtggaaaacgtcttcattagacctgttgatccagagtaccagaaggaagcagaacagagacatcgagaattggcagctaaagctggaggatttaatgactttgcaactttagctgtcatctttgaacaatgcaaatcaagtggagctccagcttcatggtgccaaaaacactggattcattggaggtgcttattttctgcatttcgtgtggaagctcaacttcgagaactaatcaggaagcttaaacagcaaagtgatttcccaaaagagacctttgaaggccctaaacatgaagtactacgaagatgtctttgtgcgggctatttcaaaaatgtagctcgaagatctgttgggagaacgttttgcacaatggatggtcgtggaagcccagttcacattcatccttcctcagcacttcatgaacaggaaaccaaacttgaatggatcatttttcatgaggtattggttaccaccaaagtctacgcaagaattgtatgcccaatccgttatgaatgggtaagagacttgttacccaagttgcatgaatttaatgcacatgatttgagcagtgtggcccgacgtgaagtgagagaagatgcaagaaggagatggacaaataaggaaaatgtaaagcagctaaaggatggaatatcgaaagacgtcttaaagaaaatgcaaagaagaaatgatgacaaatccatatctgatgcacgggctcgtttccttgagagaaagcagcagaggacccaggaccacagtgacacacgaaaggaaacaggctaaggtggtgaaccctccaattcaggaagtgggaaaaggagccaggaaatgtgcttctactttgccagttatttcagacagcactaccaagaggaggtggtcagcacttgttattggcctatgaactaaaagcaaatcaaagctcataaatcaaagctcatcagttcccataaatgcagttgtcaaagaaaagatttggttgccatagtcataagcaatgatacatgaaaccaatgaaagacagtacatgtaataatattttcctcagtacaattttgctggccttaactggtatcaaacgctgtcattgagatgttttcaaagaacattgagttgtatttaatcagcgtgtactccatttgcattgaagcattaaaaattatttttcttaaaatctctttaaggccttcttgttgctgttagaatagtgctatatatcaggtatgtgaccatttatttcagaaggctgaacataagaggtttctactcagcaatacttagatgtctaactgtttaattgctacagagctttatagatatttagagaaaagacttaatcaattagtaaataaaattgcctatggcaggattctttcttgaattaatattaatccttaaattgatttttctgggattatacaaattcctttttatataaaagtatattgtttaaaacagtagctatagccattaaccaaaggacagatgnnnnnnnnnnnnnnnnnnnnnnnnnnnnnnnnagttcttttttagctgtacctacgtacttatatcagcaccatgtatgtaggtgtgatagtactttcaaacagcgcctccacctggcctactctgttatttccacctgtttgggtagggccatttaacttccattatgccaaacttgggatgggattttcgaagcagacaacactatttcatcgtgtttcaaattggaaccttgaggctagttagtatcacactcaggccacactcagcacttgcccactcttgtttactgccttgtattctagtt

SEQ ID NO: 185222 - DNA, 1691 bp, Homo Sapiens
ttggggcctctctgccgcgcgcgcagagccaaggcactgatgtttgaactggaaacttcaaaacgtttaataagagtcttcaggatgggtttgaactagacaagctagaaatttctttagaacaccagctctagcatgcatctcccacttttggctttcctggagaggagcttgaagaggtggttctgcagacagccacagtgatactcaggaaaccagaggaatggatttgacttttctgctaggattctttgttatagtttctccctgagttgtaagaggcatggaaatatacatgaaactgaagaacctgcaaggaagggaagtggaactttccatgctgagtgaaaactaaccaagtggcagttgtgactgaaaacactgaaacctaccacgtccagattcactggattgggggatagaggaacggtcacagctagggagaaagaagtgataccggaaaagaaaacctaaatgaagagaatgaggatgactgcacagtagatggccacctctacctccacagaggcaaagtcagcctcgtggtggaattatttttttctttatgatggttccaaggtaaaggaagaaggcgatccaacaagagctggcatttgttacttttatccttcccagaccctgctagaccaacaggagttgctttgtggacagattgctggagttgtccgctgtgtttctgacatttctgactctcctcctactcttgttcgtctgagaaaactgaagtttgccataaaagttgatggagattacctttgggtgctgggctgtgctgtggagctccctgatgtcagctgcaagcggtttctggatcagctagttggattctttaatttttacaatggacctgtttccctagcttatgagaactgttctcaggaagaactgagcacggagtgggacaccttcatcgagcaaattctgaaaaacaccagtgatctgcataagattttcaattccctctggaacttggaccaaactaaagtggagcccctgttgttgctgaaggcagcccgcattctgcagacctgccagcgctcgcctcacattctcgctggctgcatcctctataaaggactgattgtcagcacccaactcccgccctccctcaccgccaaggtcctgcttcaccgaacagcacctcaggagcagagactccctacgggaggggatgccccgcaggaacatggaaaatggatgttatggagcttcaagaatcgagttacccaccagaaccctaatggagcggcattgcccccgaatgtccagattatccctgtttttgtgaccaaagaggaagccattagtctccacgagttcccggtggaacagatgacaaggtctctagcatctccagcaggactccaggatggttcagcccagcaccatccaaagggtgggagcacatctgccctgaaagaaaacgccactggccatgtggaatccatggcctggaccaccccagatcccacatcccctgacgaagcttgtccagatggcagaaggagaacggatgcttgtctggccatgatctggagagcatcagcccgcaggactgcacaactctgccaggggtgaggttcttggcctcagctcctccctggggaaggaactagtctttctccaagaagaactcgacttgtctgaaatccacattccagaggctcagg

SEQ ID NO: 185223 - DNA, 2045 bp, Homo Sapiens
  misc_feature (168)..(177): n is a, c, g, or t
  misc_feature (255)..(267): n is a, c, g, or t
  misc_feature (1920)..(1928): n is a, c, g, or t
ggaagctatttacatttcttgagagctatttacatttcttattggttatttacatttccatgcatggttttctggcttatgatgtgaaattttgtactttggatagttacaaaggatgcaataaaccaacaaccagtctctttagtttttcattatggaatacatacnnnnnnnnnnaaaggaaaagatatcacatgttatctgtaattgaaatcagatagatggctaccagacacagtaatatggagagtatannnnnnnnnnnnnggctaaaacaaacaaaaaacccaggtaattaagcttagaagtctagttttttattctgtatctatgacaagtggtactcagttatttgaactaaaggagataaaagcagagtaattacttaatgtttaatttaggaaacccagacaaggcttatgtaataataaactgaggatttttagcaccttcatttaggaagggataaaatcccttctctttttcacttatattcaaattgtgtttggtgttctatccggttctagtttcttcaggctaggccatttcttttctgtataatttagatggattggactgaattaaactaccacatgtcatttggtgtttctttactttttcttttctgagatcatctgtggctgatacatctctgaaaaatgaattattgaagtatggcggttaggcccagctggtgatggtgtatcaagaagtatatttgcaaatatttttttaaaatgggtatataatctgtctcagaatattcaagaagatgatcttcaacatttgcaattatttacagagtatggaagacttgcgatggaagaaatctaccagaaaccatttcagacattaatgtttttgattcgagattggagctatccttatgaacattcatatggtttggaaggtggaaagcaatttcttgaaaagagattacaggtaaaacaaaatcaacatgaagagcttcagaatgtaaggaagcacatacacaattgtttctcaaatcttggttgcttccttttgccacatcctggtcttaaagttgcaactaatcctagttttgatgggagattgaaagatattgatgaagactttaaacgagagcttcgaaatctggttccattgctgcttgcccctgaaaatttggtagaaaaagagataagtggatctaaagtcacttgtagagatcttgtagaatattttaaggcttacatcaaaatctatcaaggagaagaacttccacatccaaagtccatgcttcaggcaacagctgaagctaataatcttgctgcagtagcaggagcaagagatacctattgtaaaagtatggaacaggtatgtggaggggacaagccttacattgcaccttcagatctggagcgaaaacacttggatctcaaggaagtggcgataaaacaatttcgttcagtaaaaaagatgggtggagatgagttctgccgtcgttatcaggaccagcttgaagctgaaattgaagaaacctatgcaaattttataaagcacaatgatggcaaaaatatcttctatgctgctcgtaccccagccacactgtttgcggtcatgtttgctatgtatataatctcaggactgactggcttcattggcctaaactctatagctgtcttgtgtaaccttgtcatggggttagcactgatatttctttgtacttgggcatatgttaaatactctggggagttcagagaaattggaacagtgattgatcagattgctgaaacactatgggaacaggtattgaagcccctgggtgataatttgatggaggaaaacataaggcagtctgtaacaaactctatcaaagcaggcctgactgaccaggtgtctcatcatgccagattaaagacagactgacagttcatctcctcacggactccactctcnnnnnnnnncatgcttgctgtacaatgagaactcaaataaaaataaaccaaagtttacaatcaactgtagaagtagtttagtgtaactggcttcacagatggctgccacagagtgtgaagattgtt

SEQ ID NO: 185224 - DNA, 1342 bp, Homo Sapiens
  misc_feature (1175)..(1218): n is a, c, g, or t
ttgcaacaaattgatgagcaatgcttccttataaaatagccaactttgtacaaaaaagttgggggtgaatgaccctcaccgcatggacaggcgcttgctggccctcatttacctggctcatgcctcggacgtcctggagaatgcttttgctcctcttctggacgagcagtatgatttggctaccaagagagtgcggcagcttctcgacttagaccctgaagtggaatgtctgaaggccaacaccaatgaggttctgtgggcggtggtggcggcgttcaccaagtaactctgctcggggtgaaccattctcctttctctcaagtaaaccagtagtttttcttctgttgacttctggttttctgtaatttgtactttcccacactataattggcttctgttttacaaaatggtgggtggctttttcttttttgtacgtgtacaggattctgctggtacgagaggccttcctctttctgtttttaaaaaaagttttactgccatattggcattccattccctgttgccatcctcactgttacctgttttgggtttctggtctactttgactttcaaagtacctccagcctcctcatacgcacagcttttggatgacctcagcttgagtttctccatatgtgcatgtacatctagcattctgcctacagttcagacagaagtcacaaaaaggccttcaactcaccaaaggtaaatatctgtatctattaggacattttttacatagacttcagttgagatgtatacttagcaaaattatttttaaattgaaacagcacagtaaatacttaatataaaatgtcccttggattttgcttcccatgtaaatctattgtattattacacttgttataattttaactataaaggtccaattgtttcacagagccagtttgggatgggctgcattccatttatgctgtatatagtttgaattatatataaattaccccttcttctggccacccctgctcccatcttagtattttgcaagatctaatcagttgtacacctggtgcccctcgcttgcttcaatcatggttatttgatggcaaaatcgacctcttgtcgctgaaggagagagaaaagatgtgtgtctgattggtcctgggattttttgagctgtgccatttatggtactctttgcctatgcatccccnnnnnnnnnnnnnnnnnnnnnnnnnnnnnnnnnnnnnnnnnnnnctattgggaagaggcttgtgaccagtaccaatcttgagtttctttttctgtccacaagtaaattaatatctgctctgaaatgtcatttatctactcacacattcttggggaaaaaaatcaaatg

SEQ ID NO: 185225 - DNA, 1675 bp, Homo Sapiens
  misc_feature (1522)..(1565): n is a, c, g, or t
ttgggtggctgtatgttaattgaattagcattgagaggaaggttacaactagaggcttgtggaatgagacgtaaaagtctattaacaagaaaggtaatctgtaagtcagatgctccaacaggggatgttcttcttgatgaagctctgaagcatgttaaggaaactcagcctccagaaacggtccagaactggattgaattacttagtggtgagacatggaatccattaaaattgcattatcagttaagaaatgtacgggaacgattagctaaaaacctggtggaaaagggtgtattgacaacagagaaacagaacttcctactttttgacatgacaacacatcccctcaccaataacaacattaagcagcgcctcatcaagaaagtacaggaagccgttcttgacaaatgggtgaatgaccctcaccgcatggacaggcgcttgctggccctcatttacctggctcatgcctcggacgtcctggagaatgcttttgctcctcttctggacgagcagtatgatttggctaccaagagagtgcggcagcttctcgacttagaccctgaagtggaatgtctgaaggccaacaccaatgaggttctgtgggcggtggtggcggcgttcaccaagtaactctgctcggggtgaaccattctcctttctctcaagtaaaccagtagtttttcttctgttgacttctggttttctgtaatttgtactttcccacactataattggcttctgttttacaaaatggtgggtggctttttcttttttgtacgtgtacaggattctgctggtacgagaggccttcctctttctgtttttaaaaaaagttttactgccatattggcattccattccctgttgccatcctcactgttacctgttttgggtttctggtctactttgactttcaaagtacctccagcctcctcatacgcacagcttttggatgacctcagcttgagtttctccatatgtgcatgtacatctagcattctgcctacagttcagacagaagtcacaaaaaggccttcaactcaccaaaggtaaatatctgtatctattaggacattttttacatagacttcagttgagatgtatacttagcaaaattatttttaaattgaaacagcacagtaaatacttaatataaaatgtcccttggattttgcttcccatgtaaatctattgtattattacacttgttataattttaactataaaggtccaattgtttcacagagccagtttgggatgggctgcattccatttatgctgtatatagtttgaattatatataaattaccccttcttctggccacccctgctcccatcttagtattttgcaagatctaatcagttgtacacctggtgcccctcgcttgcttcaatcatggttatttgatggcaaaatcgacctcttgtcgctgaaggagagagaaaagatgtgtgtctgattggtcctgggattttttgagctgtgccatttatggtactctttgcctatgcatccccnnnnnnnnnnnnnnnnnnnnnnnnnnnnnnnnnnnnnnnnnnnnctattgggaagaggcttgtgaccagtaccaatcttgagtttctttttctgtccacaagtaaattaatatctgctctgaaatgtcatttatctactcacacattcttgggg

SEQ ID NO: 185226 - DNA, 768 bp, Homo Sapiens
  misc_feature (163)..(185): n is a, c, g, or t
ctttgtacaaaaaagttggtgcccctcgcctgcttcaatcatggttatttgatggcaaaatcgacctcttgtcgctgaaggagagagaaaagatgtgtgtctgattggtcctgggattttttgagctgtgccatttatggtactctttgcctatgcatccccnnnnnnnnnnnnnnnnnnnnnnnatcttactgtttttataatttctattgggaagaggcttgtgaccagtaccaatcttgagtttctttttctgtccacaagtaaattaatatctgctctgaaatgtcatttatctactcacacattcttggggaaaaaaatcaaatgtcagtcctagcagatgttgcatgtaaattggtagcaagtaatgattacaacccagaggattaagaattttgtaacagaaagctctatgttttaattttttatatacaattaggataattagcattgtcagactataaacctttgctttttaaagtttatttttactatttctttatcactttattgtatcatcaccattggtttcataatgtaaatactatatgttgaacaaattaaatgtcaaaattttttattaccatagtccatgttaatagtggggctttcaggtgtttagagattttttttgttgttgttaacattcattgcaaaagtactagatggtgtataactctagagttgaattttaagggattccctaatatgtatactatctttttatctgaagtaataaataaacaatgatcttgaaagtgcctg

SEQ ID NO: 185227 - DNA, 1588 bp, Homo Sapiens
  misc_feature (252)..(271): n is a, c, g, or t
gcccacatgataatatgcactagagatctaccaatctaagtttctgaggtcttctttttggataagttccagcactggaatattcagaatttcaaaggaaaattacatgttgactactgacattttagactgcatattcaaagttaaggagcaagattaagactagagtgccaaccaagatgctgttaaacatggcaaaaaggtgacagcacaaagggaccaaagaggctgattctttagaggccctttgcnnnnnnnnnnnnnnnnnnnngcaacaagtgtagaatttcccctgatcaaaatctgaatattggttaatgcatgttttctcattctccgtgtatgaacccactcctaacctctctcattgcctttttaagcttaagagagagaaataaaagaaaatggatatagaccatgtatttttatttatgaaaagagaggcatattctaatagtcataaggcaatgtgtttaagagctgcacctgaactggtattctcaaaactgaaaatagttatcaactctattcaacttgtaagatgtatctatgtgcttcccaagtcactggttgtcacccaaatggaccacggtgactccatcatgccttaaggaggcattatatactgtgtgtagtatgcacatgtatttttaaagaaatgacattaagagagaaaagaacagcctttcaaacatcagttcctcaaataaggggtgacagtgctatatggctcccttttaatctcctcacctactcagttatcaaatacctccaaaattagacaaataagggccagagacaaagctccatggtgaattgcatctttcagatgtgctttcaattcactggtttttaatttcccattcctgatttactgaggagtaaaggtgagaatcatccaactgatgacaaagtaaaacaggaaaacaggataaacagctagggctctgcggtttggaggctggctatcagcaaggaaagctgtggaggcaactatagaccaggcaaacatcacaatcaccacaaaaagccgaaccatgaagtttacaggtcctggatcagccaaaagtaccagccggcaaatcagcattgctactgtcaagggaagtatacagtaacccagcacacagaggctctgaaaaaaagatatgttccctccaagaagttttgagttgagggtgatggtaactgcaccaaaccagacaatgacaaacacctctgcaaattggggccctccatctttttcactatctgcagagtctctttgcagcattaatgcgagtgtcacacaaaggatcaaagggccccacaaatcccaatctctcaaaagagtattacttttccttgggtacaaaacatgcatgaattttttcccaacagcttttagatcacgcatgatggtattgcgaacagattcatttaatgtggagctgtcaaactcccggatgcgagatctcataggaatggtgatttctccttctacggggatgtcttgtgagatggatatatctgaaaggcctgcaaacaggggcctgggcgatgctgtccccgggtctcctggagactcctccgcttccgccatctccaa

SEQ ID NO: 185228 - DNA, 973 bp, Homo Sapiens
ttggaagagatttcatgtgcaatgtgaatataccagttgaagtacatttctcccgaagtccacagatcctggtccctacaaataagcctgctcatgtgagataagaaaggagttcctggaaccaggaattcattctcagtgtagaagacctagctgagacctcactccacagttttggggcagaagcagaagagacgcacagtagaaccgatctcagccttgctgatcatctcgtacagcagcagaaaatgaccatgttacaggagtcattctcatttgacgatttatctgtggacttcacccaaaaggagtggcagctactggatccctctcagaagaatttatacaaggatgtgatgttggagaactatagcagcctagtgtcactggggtatgaagttatgaaaccagatgtcatcttcaaattggagcaaggagaagagccgtgggtaggagatggagaaattccaagttcagattctccagaagtctggaaagtagatggtaacatgatgtggcaccaggataaccaagacaagcttaaaattataaaaagaggtcatgaatgtgatgcatttggaaaaaatttcaatctgaacatgaactttgttcctttaaggaaatcaaacagtgaaggtgacttagatggattgattttaaaacatcatttagatttgcttattccaaaaggagattatggaaaagcagaatcagatgactttaatgtgtttgataatttttttctccattccaagcctgaggatactgatacctggttaaaatactatgactgtgataaatataaagagagctataaaaagtcacagattatcatatatcatagaaatcgtttaggggagaaactctatgaatgcagtgaatgtaggaagcgcttcagtaagaaaccaagtctcattaacatcagagcagacatataagagacatagcctttggctgtggtaattgtggcaaa

SEQ ID NO: 185229 - DNA, 810 bp, Homo Sapiens
  misc_feature (336)..(361): n is a, c, g, or t
ctacaggaacttattttttctcttgtgtctctagtaccttacacactacctgggcatagtgtatactcagaaagtattgagtgaattaattactcaaaacattgggtcaaagcttcttctaaccttttttctttgcttttcatgtgtttttcatattccccatttaataaacatatttgtcaacaaccaaagatgacttaatctccagtcagtttcctgtttctgtttttagcatttccttgcaatacctagaagatagttattatacttgggacttatttcagactcggaaactaagccttaaaagcagccaacccctcagcatagcatttctannnnnnnnnnnnnnnnnnnnnnnnnnagaaagcacaaccaaacagattgtttttgtttcctttatagaagtctggaaagtagatggtaacatgatgtggcaccaggataaccaagacaagcttaaaattataaaaagaggtcatgaatgtgatgcatttggaaaaaatttcaatctgaacatgaactttgttcctttaaggaaatcaaacagtgaaggtgacttagatggattgattttaaaacatcatttagatttgcttattccaaaaggagattatggaaaagcagaatcagatgactttaatgtgtttgataatttttttctccattccaagcctgaggatactgatacctggttaaaatactatgactgtgataaatataaagagagctataaaaagtcacagattatcatatatcatagaaatcgtttagggagaaactctatgaatgcagtgaatgtagaagcgcttc

SEQ ID NO: 185230 - DNA, 1795 bp, Homo Sapiens
actttgtacaaaaaagttggtggggagagaaggaggaagtagggagcggggtggcaggggggggacccgccgcggctgctgccaccgccgccaccaccgcctctgctcgtggcgtgggaaaggaggtgtgagtcccgggcgcgagccggcggcggcgccgctgcgggagggtcggcggtgggaaggcgatggcggatttagataaactcaacatcgacagcattatccaacggctgctggaagtgagagggtccaagcctggtaagaatgtccagcttcaggagaatgaaatcagaggactgtgcttaaagtctcgtgaaatctttctcagtcagcctatcctactagaacttgaagcaccactcaaaatatgtggtgacatccatggacaatactatgatttgctgcgactttttgagtacggtggtttcccaccagaaagcaactacctgtttcttggggactatgtggacaggggaaagcagtcattggagacgatctgcctcttactggcctacaaaataaaatatcctgagaatttttttcttctcagagggaaccatgaatgtgccagcatcaacagaatttatggattttatgatgaatgtaaaagaagatacaacattaaactatggaaaactttcacagactgttttaactgtttaccgatagcagccatcgtggatgagaagatattctgctgtcatggaggtttatcaccagatcttcaatctatggagcagattcggcgaattatgcgaccaactgatgtaccagatcaaggtcttctttgtgatcttttgtggtctgaccccgataaagatgtcttaggctggggtgaaaatgacagaggagtgtccttcacatttggtgcagaagtggttgcaaaatttctccataagcatgatttggatcttatatgtagagcccatcaggtggttgaagatggatatgaattttttgcaaagaggcagttggtcactctgttttctgcgcccaattattgcggagagtttgacaatgcaggtgccatgatgagtgtggatgaaacactaatgtgttcttttcagattttaaagcctgcagagaaaaagaagccaaatgccacgagacctgtaacgcctccaaggggtatgatcacaaagcaagcaaagaaatagatgtcgttttgacactgcctagtcgggacttgtaacatagagtatataaccttcatttttaagactgtaatgtgtactggtcagcttgctcagatagatctgtgtttgtgggggcccttccttccatttttgatttagtgaatggcatttgctggttataacagcaaatgaaagactcttcactccaaaaagaaaagtgttttgttttttaattctctgttccttttgcaaacaattttaatgatggtgttaaagctgtacaccccaggacagtttatcctgtctgaggagtaagtgtacaattgatcttttttaattcagtacaacccataatcatgtaaatgctcattttctttaggacataaagagagccctagggtgctctgaatctgtacatgttcttgtcataaaatgcatactgttgatacaaaccactgtgaacattttttatttgagaattttgtttcaaagggattgctttttcctctcattgtcttgttatgtaccaactagtttttatagctatcaacattaggagtaactttcaacccttgccagcatcactggtatgatgtatatttaattaaagcacactttttcccgaccgtatacttaaaatgacaaagccattcttt

SEQ ID NO: 185231 - DNA, 2817 bp, Homo Sapiens
  misc_feature (122)..(214): n is a, c, g, or t
ttggctgtattcaagcctttgaatcatttgtaagaagatgtcctaaggaagtatatcctcatgtttctaccattataaatatttgtcttaaatatcttacctatgatccaaattataattannnnnnnnnnnnnnnnnnnnnnnnnnnnnnnnnnnnnnnnnnnnnnnnnnnnnnnnnnnnnnnnnnnnnnnnnnnnnnnnnnnnnnnnnnnnncatgagttggaaagtgagacgtgcagctgcgaagtgcttggatgctgtagttagcacaaggcatgaaatgcttccagaattctacaagaccgtctctcctgcactaatatccagatttaaagagcgtgaagagaatgtaaaggcagatgtttttcacgcatacctttctcttttgaagcaaactcgtcctgtacaaagttggctatgtgaccctgatgcaatggagcagggagaaacacctttaacaatgcttcagagtcaggttcccaacattgttaaagctcttcacaaacagatgaaagaaaaaagtgtgaagacccgacagtgttgttttaacatgttaactgagctggtaaatgtattacctggggccctaactcaacacattcctgtacttgtaccaggaatcattttctcactgaatgataaatcaagctcatcgaatttgaagatcgatgctttgtcatgtctatacgtaatcctctgtaaccattctcctcaagtcttccatcctcacgttcaggctttggttcctccagtggtggcttgtgttggagacccattttacaaaattacatctgaagcacttcttgttactcaacagcttgtcaaagtaattcgtcctttagatcagccttcctcgtttgatgcaactccttatatcaaagatctatttacctgtaccattaagagattaaaagcagctgacattgatcaggaagtcaaggaaagggctatttcctgtatgggacaaattatttgcaaccttggagacaatttgggttctgacttgcctaatacacttcagattttcttggagagactaaagaatgaaattaccaggttaactacagtaaaggcattgacactgattgctgggtcacctttgaagatagatttgaggcctgttctgggagaaggggttcctatccttgcttcatttcttagaaaaaaccagagagctttgaaactgggtactctttctgcccttgatattctaataaaaaactatagtgacagcttgacagctgccatgattgatgcagttctagatgagctcccacctcttatcagcgaaagtgatatgcatgtttcacaaatggccatcagttttcttaccactttggcaaaagtatatccctcctccctttcaaagataagtggatccattctcaatgaacttattggacttgtgagatcacccttattgcaggggggagctcttagtgccatgctagactttttccaagctctggttgtcactggaacaaataatttaggatacatggatttgttgcgcatgctgactggtccagtttactctcagagcacagctcttactcataagcagtcttattattccattgccaaatgtgtagctgcccttactcgagcatgccctaaagagggaccagctgtagtaggtcagtttattcaagatgtcaagaactcaaggtctacagattccattcgtctcttagctctactttctcttggagaagttgggcatcatattgacttaagtggacagttggaactaaaatctgtaatactagaagctttctcatctcctagtgaagaagtcaaatcagctgcatcctatgcattaggcagcattagtgtgggcaaccttcctgaatatctgccgtttgtcctgcaagaaataactagtcaacccaaaaggcagtatcttttacttcattccttgaaggaaattattagctctgcatcagtggtgggccttaaaccatatgttgaaaacatctgggccttattactaaagcactgtgagtgtgcagaggaaggaaccagaaatgttgttgctgaatgtctaggaaaactcactctaattgatccagaaactctccttccacggcttaaggggtacttgatatcaggctcatcatatgcccgaagctcagtggttacggctgtgaaatttacaatttctgaccatccacaacctattgatccactgttaaagaactgcataggtgatttcctaaaaactttggaagacccagatttgaatgtgagaagagtagccttggtcacatttaattcagcagcacataacaagccatcattaataagggatctattggatactgttcttccacatctttacaatgaaacaaaagttagaaaggagcttataagagaggtagaaatgggtccatttaaacatacggttgatgatggtctggatattagaaaggcagcatttgagtgtatgtacacacttctagacagttgtcttgatagacttgatatctttgaatttctaaatcatgttgaagatggtttgaaggaccattatgatattaagatgctgacatttttaatgttggtgagactgtctaccctttgtccaagtgcagtactgcagaggttggaccgacttgttgagccattacgtgcaacatgtacaactaaagtaaaggcaaactcagtaaagcagagtttgaaaaacaagatgaattaaagcgatctgccatgagagcagtagcagcactgctaaccattccagaagcagagaagagtccactgatgagtgaattccagtcacagatcagttctaacctgagctggcggctatcttt

SEQ ID NO: 185232 - DNA, 1324 bp, Homo Sapiens
  misc_feature (324)..(415): n is a, c, g, or t
gtcgggtcttcacacttttttctttcatctgtttgtgaagagctttaacaatgttgaggaactgactctgaagcattgttaaaggtgtttctccgtgctccattgcatcagagtcacatagccaactttgtacaggacgagtttgcttcaaaagagaaaggtatgcgtgaaaaacatctgcctttacattctcttcacgctctttaaatctggatattagtgcaggagagacggtcttgtagaattctggaagcatttcatgccttgtgctaactacagcatccaagcacttcgcagctgcacgtctcactttccaactcatgnnnnnnnnnnnnnnnnnnnnnnnnnnnnnnnnnnnnnnnnnnnnnnnnnnnnnnnnnnnnnnnnnnnnnnnnnnnnnnnnnnnnnnnnnnnngtaattataatttggatcataggtaagatatttaagacaaatatttataatggtagaaacatgaggatatacttccttaggacatcttcttacaaatgattcaaaggcttgaatacagtactctcttaattcatcatcatctacattgcaaaattttaccaccaaaggaattatcttctcaaggtattcacctattctatgaccagcttgcctactaatagcagcaatacattgtatgtaggttcttgttgttgacatagaatcatttttggacaactctgacaacagatgttcaataagatctacaaaaactatatttccacagctcataaccagatggccaagagcgataatggttcttttcctcactgcaagtctagggctggtcaactggggaagtagacaggtcagaattgaaggatggaaattaacaagaagtcctccttgcctgctcaacatatcagccataatatccaaggcttctagctgaacagagacatcttcctgttttgctattgcacttgtaagacgtccagtaatctttttacatacattagcagctaatgcagagccactggaagctggaggaagttctccaattactgttttaagaccaatacttgaaatgtctcgaagttgttctttatcagaaagcatgttagtgcagagggtatctacaattgtctctacttggtattctttcactttactcactaaaggaccaagacatttgacagctaaattctgtacctctccatttttatcttccaataacttcaaaatcattttcactactttcctttcactatcatcatccaacttgatggaatctttctgcagttccgtcatcaaatcatttgtagccataaacctaaagtccccaacttttttgtacaaagttgcccttta

SEQ ID NO: 185233 - DNA, 1247 bp, Homo Sapiens
ctttgtacaaaaaagttgggaaactctcctctccacggcttaaggggtacttgatatcaggctcatcatatgcccgaagctcagtggttacggctgtgaaatttacaatttctgaccatccacaacctattgatccactgttaaagaactgcataggtgatttcctaaaaactttggaagacccagatttgaatgtgagaagagtagccttggtcacatttaattcagcagcacataacaagccatcattaataagggatctattggatactgttcttccacatctttacaatgaaacaaaagttagaaaggagcttataagagaggtagaaatgggtccatttaaacatacggttgatgatggtctggatattagaaaggcagcatttgagtgtatgtacacacttctagacagttgtcttgatagacttgatatctttgaatttctaaatcatgttgaagatggtttgaaggaccattatgatattaagatgctgacatttttaatgttggtgagactgtctaccctttgtccaagtgcagtactgcagaggttggaccgacttgttgagccattacgtgcaacatgtacaactaaggtaaaggcaaactcagtaaagcaggagtttgaaaaacaagatgaattaaagcgatctgccatgagagcagtagcagcactactaaccattccagaagcagagaagagtccactgatgagtgaattccagtcacagatcagttctaaccctgagctggcggctatctttgaaagtatccagaaagattcatcatctactaacttggaatcaatggacactagttagatgtttgttcaccatggggaccattacatatgaccatacaatgcactgaattgacaggttaatcataagacatggaaagagaagtgtctaaaagcttcaaaatgttccacttttttttccttcatggagactgtttgtttggctttcttccattgttgtttttgtagcatttatttcagaaatgtgtatttccataatccagaggttgtaaaaccactagtgttttagtggttacagcaacatttgaaatggaaactaaaagttaggattttatggagtatggagatagggtccagtatctatttaccctgtaatgtttaggattaaaatgttaaaattttgtgaccatgaatttctttcttttataaattttctcatttaaaaatcaaaaatcttgccaaaccaaaaaccatggtttctttt

SEQ ID NO: 185234 - DNA, 1493 bp, Homo Sapiens
  misc_feature (337)..(357): n is a, c, g, or t
  misc_feature (412)..(476): n is a, c, g, or t
ttggcttttggccaagcaggacaaaagtggtaactcagcagtaattgagccatactacccgaactcctactcttaggtttccatgtgtggtagtgacctgagcctctcaaagttcaatgaagagggcctccccaccaagaagtaaaaggatgtgcttgtttaattctatgagtttatagtccaagagaaaaaggtttatgggttatcaggttttacatggattaatctgaataactggtcaactctgttatgatagtggaaacttattatgaaattgtgttccagttcagtaattttctagttctatgattctcaattctggtgcacatgagctttnnnnnnnnnnnnnnnnnnnnntaatgtgtgccatattctgacaggttcagtaaaactctctggggatggggcttgnnnnnnnnnnnnnnnnnnnnnnnnnnnnnnnnnnnnnnnnnnnnnnnnnnnnnnnnnnnnnnnnntttctagttcttatatctgtttgagacaaatctgtctgattctgattggcagattacattaaaaggaaggtttactttgcatgctagttattttcctttaaaggatttgtcagaatttagtattttgtttttagaaaatgatgtcaaatctaaattctgtcttttttattcctaatagatgctgacatttttaatgttggtgagactgtctaccctttgtccaagtgcagtactgcagaggttggaccgacttgttgagccattacgtgcaacatgtacaactaaggtaaaggcaaactcagtaaagcaggagtttgaaaaacaagatgaattaaagcgatctgccatgagagcagtagcagcactactaaccattccagaagcagagaagagtccactgatgagtgaattccagtcacagatcagttctaaccctgagctggcggctatctttgaaagtatccagaaagattcatcatctactaacttggaatcaatggacactagttagatgtttgttcaccatggggaccattacatatgaccatacaatgcactgaattgacaggttaatcataagacatggaaagagaagtgtctaaaagcttcaaaatgttccacttttttttccttcatggagactgtttgtttggctttcttccattgttgtttttgtagcatttatttcagaaatgtgtatttccataatccagaggttgtaaaaccactagtgttttagtggttacagcaacatttgaaatggaaactaaaagttaggattttatggagtatggagatagggtccagtatctatttaccctgtaatgtttaggattaaaatgttaaattttgtgaccatgaatttctttcttttataaattttctcatttaaaaatcaaaaatcttgcaaacaaaaaccatgtttctttttcttgtataactttttgttttcagcaacataaattgatttttagctggcaaaccaagaatatccatataagatttggtaaccatttc

SEQ ID NO: 185235 - DNA, 5698 bp, Homo Sapiens
  misc_feature (5540)..(5549): n is a, c, g, or t
ttggaaaagaaaggactttggcattatgttcctgcaccaccttgtatctattttcttgattaccttttcatatgtcaacaatatggcccgagtaggaacgctggtcctttgtcttcatgattcagctgatgctcttctggaggctgccaaaatggcaaattatgccaagtttcagaaaatgtgtgatctcctgtttgttatgtttgccgtggtttttatcaccacacgactgggtatatttcctctctgggtgttaaataccacattatttgaaagctgggagatcgttggaccttacccttcctggtgggtttttaacctactgctattgctagtacaagggttgaactgcttctggtcttacttgattgtgaaaatagcttgcaaagctgtttcaagaggcaaggtgtccaaggatgatcgaagtgatattgagtctagctcagatgaggaggactcagaacctccgggaaagaatccccacactgcgacaaccaccaatgggaccagtggtaccaacgggtatctcctgactggctcctgctccatggatgattaattactcaaaactacaagtcccaagcaaagtgaactatttgttcctggaagtatttaataagttgcaaatgcagttcctttcataatatctcagcaccagaaacaaaaattaagattatcaaagcattttgaatagtgcactgccatgtgtcctgtctgtgaatgaagaagaattaccattctctctttgtaggcatgctgtatgtaattgacacaagggaacagtatttgcatttgtactgtcttagaatattatttatttttttgtatttgtaaatctgtggacaaaagagggtttcctcactccttttactcactgggctcatgacagtgaaggagatgctccatctgcttctccccctttctcttgctgtagtccaatgtgctatgagcatcagcttactttgtcacttagagcaagcaaaacccagtgcaagagtctcgttcagctctaaataggtttgctttcttttagttacagtgcccattttgaaattgcctatacagtcttagtgaccatttaaaccggacgaactaggtgtttaattttcactcttcatgttcaattagcagttcaaattaaagaagatggttattggagaacttttttgaatggttttgtattaaattgctttgaaatagatttcatttcttgtgcacacagccaagatttcttcaatgggtgtgagctagttgagggttaaccttgtaggttgcagagtgtatttgtttgtttgtttgtttttctctgtgatgaggtcagtgctctgattttgaaggaggatattcactgaagctcatagttataaacaaggaaatcactgttaagaatgggaatttgtcctgtgttctgggaataacataaagagagcaactgatttcagccaggttttgccactaccctataattagtgcagtcttatgttataaaagaaagaagttaactatatttggggacaaaaaaatatttcaagagttgataaagattacctgtgcagtgcagagcactttaatgcaaccagctttcaagaaaaagccctatctagtacttgatgttgatgtttttattttgctgagcaaaataaagccaatgggagaaagactattttaccctttgcttttctccttaaacgtaatccagatgactttcctgttactaaacactgagcagcattacactacaatgcttctttggtttccaggaatttttttcaaatggggctgtttctggaaaaatgaaaaattctattggacaatggcaatatcaacaatgaggaaaattactgaagaataagtttccataagtctcctacatagcagtgttatttatgtacagataagaaaaccatatgtcagccaaagattttatctcttcttctaacttttagtaagaggaaaaagggattataaaacccttcataaatcaagaaggccatcacttagaacgaaccccaaacaaaaatgccataatataaatgtgtgaatcagggctgtgaagacaacagcagaaatgctaacaagcgtgcagaaacaccagagagtgcgtatcctgctcagaaccattcacatttaattcaattcttggaaaaaattaaagctttttgcccacaatttgcaatctgtgggttaatagttaaaagaatgttcccaaccaaaaaattcttaccgtaatattatatcttgccctacttatttacaaaataatatgtttctgttatggtccttagtaataattgaagaggcttagaaatacatctgcttgtttattgagaaaacgatgcaaataattctgcttttagagccttgttattttatttcacaaaacaggcatatgtctaggagtgtaatttgtggatggttgagtttgtaagaacaatcataaaaggacttgttagtctccagaacatctgctaaaatgcaagtatatgtataaggtaatagcatattacagctgaaaattttgagaaggtaaaagtttcttaattaaaatatgaacatatttagcttgctttagtgtctggggcaagtcctctcaatggctaaaattaactttagagatccatgtgttcaggtttagatcatatgacactcgagcacagaagaataatttcaaggaggtcatcttgtaaattaaaggtttagaagaattgcataaaacgtagtaaatggggtctgtcattagcaaaggcaaatctaagcaatcatttttccccccagaagttacttagaaggagaactgggaacacttggggtctctctaactgatggcattcacttcacacagtcgtctatgttatccagagatttttatttcattttacattttagggcacagttctttggggctaattaaaatggggtttgcaggctttttatggtgaagaataatatatctctgtctatagctttcccatggtagcctgataaggctgagagagaaaaatatgtgcagtatctcatcctccccctgtaccaggccatagctttgaagtgtattttgtaaattcaactataggttagtcagaatgctgtttttcgttaattaacttagcctgtgttgatatctcctccttcctggtcacattcaaaccttcccagagtacaaaggggtatgtagaaaggattccagaagaagtaatactttattctctaatgttaatagcttttctggatctcttagtagggggaaagtagaaaatcgagtagaatttggcctcaggtcaataaatgatataaaaacatgtgttctatttatgtatatatatgtatgtttctccaaaaagtgataaaaccaaaatatcactgactcatccctacccatattcttttcataaaacccactcaccaggtacaatagaaacttccctccttgtttgtcagcctcctgttcatgttccccacacacctgaaggtggtagaatcttttcagcctcttagccagtgagctaaatatggctaagcacaggtcataagagcacctaaggccagcatataagccaactacagttcacctttccaaatttggtcctatggatgttgagcatagggaagcaactctcagtattttggattattcaagtgtatgtggtaaaaatgcagatgattgctgctttaccccagggtttattagcatcctacttctgctgggctgcatcattatataatgccacaggcatctagtcaaggtaaagaagccagaaaggttaggcaagaagtgagataaaatcagatcacctttgatcaaaatggttggtgaacctccacatgtccagttctgttgccaaactttccattcagagtatttggtggagtttgaatttgagcaaactaaatgccttcatcttaggtagaaagggcctgaatcttccattttatattcaaacctcattgttatttggcctaagtaaaaagtcagatttcatttccatttacctgagttcgctttaaagagcttttcaaagagagctttatagacacccacaattgtccccaatctcttcatgatgttgcattaatagttgtttttgtccctttcttggaaatgttaatgccaaagttgcctgaacattgggcggttttcttaatttgaagtataaaaattataaagagtaattccaaaggtattaaaagattgtttaacagtatgtgtggtgatgtcattatctccagagaggcttcaagaaatcctttggaaataaaaagttaaatgtttacatttcatgtggtatttcaggtcttcaggttctgattagcttacttttttcctttgtctttggctgatttctgctttgtagataaataataatagccctgagatgtttctaacatttaaataagaaaaaaatcaaatcgaagtcagcctgctggaaaagtgatcacatggcagttgcagtaacttgtatggaaagagaaaatgcaatgagcccagttactgcacttgccactaccatgctgtccatggaaggaataatcagcagttcagttgtcacaagccgcccttgaagaaaacgcagcaaaatattttaaaatgaagatattgcagtccccagagccagtgaaggtttcttttggtaaaatgaaattgtgccattgtcaaagtaccccgtagtgatgagcactgactggttcactggccacattttagttcttcataataataggccacaaaagggctctgtggtttgcctccatgtgcactggcccctccccacccctagggggcactcagtagctgctgagaaggcctgtccacgaggctgttggaacccctccaataaatacttagaggtagtgtatctgatgcttgttttcatggagaaaattgtattggagaacttaaaacatcacgaatatttttaataggatccgcagacacccaaaggagaagcttggtcttttccaggtatttccaacttgagttcaacccaaagcctttgaaaggaatgcattaccacatgaccacatgctgagaccccatggggtctaacacgggacctaagaaagtctctgcagccagatagtacatggtgtctccacaaaactaggcattctggagattgcccagaaagggatgtgaggggaccgttaagatctgtcttgcttatctcatgcactcacattccttcagcctcctggagttcctgataaaaggaagccagggtgttgacattttttagctattgatttcccaatagcttgtggatcagttgtacacccacacttccttctctgcctaattccgtttttctggaaaaagtagtatgcccatgtatgtgtgtttttcttaacacaggtccatgaaagtttggcttcctggtttgatgtctgttgcgtggcctggaaaccagggagcagcaactattgagatggtttctgtgttcagtgaaaaattctatttcattgagacaattttttctttatccacagtaattttttgacactgtcatcatgaaactacccttaggaaaataagattacctgcnnnnnnnnnngaaatgagttatggaataggaacagttatgtgatgattctgaaactttaacttagagcttcattactttaagaaaggaaaaacactctctgagtttgattttccaaagtttcataaagcccctaagctcatgattttcatcaactcttt

SEQ ID NO: 185236 - DNA, 1675 bp, Homo Sapiens
  misc_feature (61)..(79): n is a, c, g, or t
  misc_feature (1251)..(1279): n is a, c, g, or t
ttggctctttttaaaatagacatttgtggggctcacacaatatatgaaatagtaccctctnnnnnnnnnnnnnnnnnnntcaggcggtcaaacttagagcaacattgtcttattaaagcatagtttatttcactagaaaaaatttaatatcaaggactattacatacttcattactaggaagttctttttaaaatgacacttaaaacaatcactgaaaacttgatccacatcacaccctgtttattttccttaaacatcttggaagcctaagcttctgagaatcatgtggcaagtgtgatgggcagtaaaataccagagaagatgtttagtagcaattaaaggctgtttgcacctttaaggaccagctgggctgtagtgattcctggggccagagtggcattatgtttttacaaaataatgacatatgtcacatgtttgcatgtttgtttgcttgttgaatttttgaacagccagttgaccaatcatagaaagtattactttctttcatatggtttttggttcactggcttaagaggtttctcagaatatctatggccacagcagcataccagtttccatcctaataggaatgaaattaattttgtatctactgataacagaatctgggtcacatgaaaaaaaatcattttatccgtcttttaagtatatgtttaaaataataatttatgtgtctgcatattgcagaacagctctgagagcaacagtttcccattaactctttctgaccaatagtgctggcaccgttgcttcctctttgggaagaggaaagggtgtgtgaacatggctaacaatcttcaaatacccaaattgtgatagcataaataaagtatttattttatgcctcagtatattattatttaattttttaggtaatgcctatctcttggtctattaaggaaagaagcaatcagtagagaattcaggatagttttgtttaaattcttgcagattacatgtttttacagtggcctgctattgaggaaaggtattcttccatacaacttgttttaacctttgagaacattgacagaaattatgcaatggtttgttgagatacggacttgatggtgctgtttaatcagtttgcttccaaagtggcctactcaagaggccctaagactggtagaaattaaaaggatttcaaaaactttctattcctttcttaaacctaccagcaaactaggattgtgatagcaatgaatggtatgatgaagaaagtttgaccaaannnnnnnnnnnnnnnnnnnnnnnnnnnnnaatttgaaatcattcttattccctttaagaatgtttatgtatgagtgtgaagatgctagcgaacctatgctcagatattcatcgtaagtctcccttcacctgttacagagtttcagatcggtcactgatagtatgtatttctttagtaagaatgtgttaaaattacaatgatcttttaaaaagatgatgcagttctgtatttattgtgctgtgtctggtcctaagtggagccaattaaacaagtttcatatgtatttttccagtgttgaatctcacacactgtactttgaaaatttccttccatcctgaataacgaatagaagaggccatatatattgcctccttatccttgagatttcactacctttatgtgaaagtgtgtatattgttaaaatc

SEQ ID NO: 185237 - DNA, 730 bp, Homo Sapiens
  misc_feature (359)..(387): n is a, c, g, or t
gtacaaatctcttggtctattaaggaccattaagcaatcagtagagaattcaggatagttttgtttaaattcttgcagattacatgtttttacagtggcctgctattgaggaaaggtattcttctatacaacttgttttaacctttgagaacattgacagaaattatgcaatggtttgttgagatacggacttgatggtgctgtttaatcagtttgcttccaaagtggcctactcaagaggccctaagactggtagaaattaaaaggatttcaaaaactttctattcctttcttaaacctaccagcaaactaggattgtgatagcattgaatggtatgatgaagaaagtttgaccaaannnnnnnnnnnnnnnnnnnnnnnnnnnnnaatttgaaatcattcttattccctttaagaatgtttatgtatgagtgtgaagatgctagcgaacctatgctcagatattcatcgtaagtctcccttcacctgttacagagtttcagatcggtcactgatagtatgtatttctttagtaagaatgtgttaaaattacaatgatcttttaaaaagatgatgcagttctgtatttattgtgctgtgtctggtcctaagtggagccaattaaacaagtttcatatgtatttttccagtgttgaatctcacacactgtactttgaaaatttccttccttcctgaataacgactataagaggccatatatattgcctcc

SEQ ID NO: 185238 - DNA, 1569 bp, Homo Sapiens
ttggcgagctttgttttttcggttgggcatgctgcttaccgcaggatgatggaagcgacggcccgtacaaagacagaagcgttggtttcactgagtcagtgctgattctctcaaatagagcttgaaggataaatcttcatttttgtttcaacaaaacttcgaaacaaaatggaagaaaataatctacagtgcagtagtgtggttgacggtaattttgaagaagttcccagggagacggcaattcagtttaaacctccactatacagacagcggtaccagttcgttaaaaatttagtggatcaacatgagcctaagaaggttgcagacctgggatgtggtgatacttcactcttaaggctgctaaaagtcaatccatgcattgaattgcttgttggagtagatattaatgaggataaattacgatggagaggggattcgttagctcctttcctgggggattttctgaaacctcgggatctgaatttgaccatcacattgtatcatggctccgttgtggagagagactctcgtttgcttggatttgacttgataacgtgtattgaattaatagaacatttggattcaggtgatctggccagatttcctgaagtggtatttgggtacctgtctccatccatgattgtcatcagcacaccaaactctgaattcaatcccctgtttccatcagtgaccttaagagattcagatcataaatttgagtggaccagaatggagtttcagacctgggctttatatgtggcaaatcgctatgattactctgtggagtttactggtgtcggggaaccaccagctggagctgagaatgttggatactgtacccagataggaatcttccggaaaaatggaggaaaggcaacagaatcatgtctttcagagcagcatgatcagcatgtttataaagctgtttttaccacctcatacccaagcttacagcaggaaaggttctttaaacttgtgttggttaatgaggtgtcccaacaagtggaaagcttaagagtgagccacctgccaaggcggaaagaacaggctggggaacggggtgataagcccaaagacattggtggctcaaaggcccctgtcccatgctttggaccagtcttcacagaggttgagaaggccaagatagagaactctcccacacccttctgtgttggagataaatttttcgtacctctgcagagactccttgcgtatcccaagttgaaccgcttatgtgctaatgaagagatgatgagatcagtcattgctgactcaattcctctgagcagtgatggttctgcagtggtggctgacctgcgtaattattttgatgaacagtttgagttttgaaccatgtttatttcctgaaatttcacgggtctcagcgatagttgtgctcacttagaatttagttttttttgtgtaatcctaattcaagtaatgtttttaaagtttcactgcaaaagtctatgttccaagccattggacagacctgcttgagatatggccagactgcagtgagccctgaaaaagatatgagggtttaaaacgggtgctttcctttgattt

SEQ ID NO: 185239 - DNA, 2243 bp, Homo Sapiens
  misc_feature (1741)..(1797): n is a, c, g, or t
  misc_feature (1959)..(2017): n is a, c, g, or t
ttggcagctgtcttttctttctttctaaacccttttaagaatagatttaatatttttctgagttttcattaaagagttatttatgttacggtttgtttttataaaagtagcatcgcaaaataaaaaagtctgcatccttgcaagttattcactgctcatgtgcttgctcttctctggtaaattaaaaaaataaagatcaagaagagtctgggaggaggaacagatgagtcagatgggttgaatcctgtgagtaagtgaaagagtaataggaaaaaaaacactatggtcatgaaagaactgcatcctgaaagttgtacgtagacagccacttggatggtactcattcatttactttttaataagttaagttttttttaggttcggcagaagccctcaaacactgaagattttattgaggatattgtaaagctcattaatgggagatacaaagggcaatcaggaatcatatattgtttttctcagaaagactctgaacaagttacggttagtttgcagaatctgggaattcatgcaggtgcttaccatgccaatttggagccagaagataagaccacagttcatagaaaatggtcagccaatgaaattcaggtagtagtggcaactgttgcatttggtatgggaattgataagccagatgtgaggtttgttatccatcattcaatgagtaaatccatggaaaattattaccaagagagtggacgtgcaggtcgagatgacatgaaagcagactgtattttgtactacggctttggagatatattcagaataagttcaatggtggtgatggaaaatgtgggacagcagaagctttatgagatggtatcatactgtcaaaacataagcaaatgtcgtcgtgtgttgatggctcaacattttgatgaagtatggaactcagaagcatgtaacaaaatgtgcgataactgctgtaaagacagtgcatttgaaagaaagaacataacagagtactgcagagatctaatcaagatcctgaagcaggcagaggaactgaatgaaaaactcactccattgaaactgattgattcttggatgggaaagggtgcagcaaaactgagagtagcaggtgttgtggctcccacacttcctcgtgaagatctggagaagattattgcacactttctaatacagcagtatcttaaagaagactacagttttacagcttatgctaccatttcgtatttgaaaataggacctaaagctaatcttctgaacaatgaggcacatgctattactatgcaagtgacaaagtccacgcagaactctttcagggctgaatcgtctcaaacttgtcattctgaacaaggtgataaaaagatggaggaaaaaaattcaggcaacttccagaagaaggctgcaaacatgcttcagcaatctggttctaagaatacaggagctaagaaaagaaaaatcgatgatgcctgatatgactgttactaaattttctaattaaagatggtttatgcatgtatatgccattatttttgtagttagacaatagtttttaaaagaatttcatagatattttatatgtatggatctatattttcagagcttatctctgaagatctaaacttttgagaatgtttgaaaattagagatcatgaattatataattttccagtataaaacaagggaaaaatttttatgtaaaaccctttaaatgtaaaatatttgagaataagttcatacaatcgtcttaagnnnnnnnnnnnnnnnnnnnnnnnnnnnnnnnnnnnnnnnnnnnnnnnnnnnnnnnnngaaagcaatattatactgacagaggctcactgagtgatactttaagttaaatatgtagatcaaggatgtccaatcttttggcttccctgagccacattggaagaagaattgtcttgggccgcacataaaatatgctaacactgatgatagctgatgagcttnnnnnnnnnnnnnnnnnnnnnnnnnnnnnnnnnnnnnnnnnnnnnnnnnnnnnnnnnnnatttgagaataagttcatgtaattgtcttaagttttttatgcctttatatacttagctatattttttcttttgacataaccatctttttgaaagcaatattatactgacagaggttcactgagtgatactttaagttaaatatgtagatcagggatgtccaatcttttggcttccctgagccacattggaagaagaattgtcttgggccgcacataaaatatccaa

SEQ ID NO: 185240 - DNA, 4775 bp, Homo Sapiens
atgagcaatgctttcttaaaaaagccaactttgtacaaaaaagttggggaagttccccgtcagtcagtctgacggtcagtggatcggtgggtttatctcaaggcctgagtagccggtaacaaacgagggttcccgggattggaccgacgcagccatgcctctgcgacttgatatcaaaagaaagctaactgctagatctgatcgagttaagagtgtggatctgcatcctacagagccatggatgttggcaagtctttacaatggcagtgtgtgtgtttggaatcatgaaacacagacactggtgaagacatttgaagtatgtgatcttcctgttcgagctgcaaagtttgttgcaaggaagaattgggttgtgacaggagcggatgacatgcagattagagtgttcaattacaatactctggagagagttcatatgtttgaagcacactcagactacattcgctgtattgctgttcatccaacccagcctttcattctaactagcagtgatgacatgcttattaagctctgggactgggataaaaaatggtcttgctcacaagtgtttgaaggacacacccattatgttatgcagattgtgatcaaccccaaagataacaatcagtttgccagtgcctctttggacaggactatcaaggtgtggcagttgggctcttcgtcaccaaacttcactttggaaggacatgagaaaggcgtgaattgcattgattactacagtggtggggacaagccatacctcatttcaggtgcagatgaccgtcttgttaaaatatgggattatcagaataaaacatgtgtgcagacactggaaggacatgcccaaaatgtgtcttgtgccagctttcatcctgagttgccaatcattatcacaggttcagaagatggaacagtacgtatttggcattcaagcacctaccggcttgagagcacactgaattatggaatggagagggtatggtgcgtggccagtctaagagggtcaaacaatgtcgctttgggctatgatgaagggagcatcattgttaagcttggtcgggaggaacctgccatgtccatggatgccaatggaaagataatttgggccaagcattcagaagtccagcaggccaacctaaaagcaatgggagatgctgaaattaaagatggtgaaagattgccactggcagtaaaggatatgggcagttgtgaaatataccctcagactattcagcacaatcctaatgggcggtttgtggtggtgtgtggtgatggggagtatatcatctacacagcaatggcattgagaaacaagagctttggatctgctcaggagtttgcatgggcccacgattcttcagagtatgcaataagagagagcaacagcattgtaaagatatttaagaactttaaggaaaaaaaatcatttaaaccagattttggagcagaaagtatctacggcggcttcttattgggagtcagatctgtaaatggcttagccttctatgactgggacaatacagaactcatacgaagaattgaaattcagcccaaacatattttctggtctgactctggagagctagtctgtattgctactgaggaatcattttttatccttaagtatctgtcagaaaaagtcttggctgcacaggaaacacatgagggagttactgaagatggcattgaagatgcctttgaggttcttggtgagattcaggaaattgtgaaaacagggctttgggtaggcgattgcttcatttacacaagttctgtgaacagattaaattattatgttggaggagaaatagtcaccattgcccacttggacaggacgatgtatctcctaggctacattcctaaagacaacaggctttatctgggggataaagaattgaacatcattagctattccctgctggtttcagtcctggaataccagacagctgtcatgcggagggactttagcatggctgataaggtccttcctaccattccaaaagaacagaggaccagagttgcacactttttggaaaagcagggcttcaagcagcaagctcttacagtatccacagatcctgagcatcgttttgagcttgctcttcagcttggagagttaaaaattgcataccagttagcagtggaagcagagtcagaacagaagtggaaacaacttgctgaacttgccattagtaaatgtcagtttggcctagcccaggagtgcctgcatcatgcacaggattatgggggcctgctgcttttggccactgcctctggaaatgctaatatggtgaacaagctagcagagggtgcggagagagatggcaaaaataatgtggcattcatgagctactttttacagggcaaggttgatgcctgcctagagctcttaattagaactggacggctgccagaagctgccttcttggcccgaacttacttacccagtcaggtttcaagggtagtgaaactctggagagagaatctctcaaaagtcaatcagaaagcagcagaatcccttgctgacccaacagagtatgaaaacctgttccctggattaaaagaagcctttgttgttgaagaatgggtgaaggaaacacatgctgatctgtggccagccaaacaatacccacttgtcacgccaaatgaagagagaaatgtcatggaagagggaaaagactttcagccctcaagatctacagctcaacaggaacttgatgggaaacctgcttctcctactccggttattgtggcctcccacacagccaacaaagaagaaaagagtttactcgaactagaagtagatttggataatttggaattagaagatattgacacaacagatatcaatctggatgaagatattttggatgattgactgtaatgctttccatttacctgactaaacagatcattattatatataggtattgattgctaccctgaccacagtgctttggactatgagaaacttcttagatttttatatgtaaatgctgtggaccactgggagcacaatgcccacatcatcttaagaagagtttatgtgcagcatttaaatcactgtgttttccttgttaactaaaacagacatgggctttgatttttttcatactattagaccatatctcataaaaccttttgaattaatgaaggtacttgtttcctttctcaataatgaaaataggcttctagttttagaaggctgagccgaaactacaccttgcctagggatcagccccactgtcttttctttgtataactaaatctgcattttcaaatgttgtcaatcacatttttcttagagctgaatatccaggctgtaattctctaaaccctttttcttgacctcattgcatcattccacaggtcttgccccgattttgtctagcagctacccatttctggagtcaggatgtgaaacctctgttcctctgacctcattaagctgggggtctgtctaagttaacgtttgccctatttggtaacacaaaaacacaccagactttttaaccgtacgctcatctaacatgatttgagaaattcataaccaggcactcaaatatccttgtagcctacgaaaagtgagtagggtaataatttttgctttgtagggagaactacaaattgatatcttttaatctagccattttttaacatttagctcaatattaacagagaaatgtagtcagtatttagtaaaataaatgtatttttaaaatatttttaggaagctgcagaatggcgactgagtgcttcttgataagtctgcagtgttagttctatataggctcccttctgtgcttctgtttttgcaaagacctgtttaaattaaaaagaaaattttaaaacaataggacatatgctatttataaagtttttcagttttaagacatcattagcatttctgtagtagcaaagagtcctacttaaaaaggtctttcagatttcacaatttttcccccgattatacaataattaataaacacacatggacagaaaaacaatacccaacacatttcaagcaatactaattctaaacaccagaagtatccaattaagaccctgacattgtattaatattaatacttccttcgagatcaaaacaaaaaccattaggttagagagaaatctggaggctaagagttaccaaactaacttttgactttaaagaatattttctccaaaaacattgcgctttatcaggttcataaagaaaatcagtactgtagtttctctctactcttcctaggatgtcatcacaggtcattgtttccttagctttgcagcatgcaaacagtattactaggatagaagccagttccacaaaaccatgtatattctgagcattagaagagatgaaattaattatacaatctcctccccttcccttcctgaaaatatcatctcaactctcagcacttacagataaatgtacataagcccatggttttgagaggtatgcagctccaaaatgacaatacagctaaggcttgatgatatacaagcatcacactctccacttcttgacacatgcccatttcccccgatgtgatgtgaccacacaaagacaggaagctgctctgggggacatgtgctacttagtcctctaccctgtcctgttggtggcttgaacacctcagatgcagctcagcccttccagtgctccaaagaacaaaggggctgctccctgcactgtcagaacttctctggactccagctgctagcacacatcactcaacctactttactgcactttaccccctcccctgtctgtt

SEQ ID NO: 185241 - DNA, 835 bp, Homo Sapiens
caataaaaactttgtacaaaaaagttggcagagaagctgcccttggctgctcgtagcgccgggccttctctcctcgtcatcatccagagcagccagtgtccgggaggcagaagatgccccactccagcctgcatccatccatcccgtgtcccaggggtcacggggcccagaaggcagccttggttctgctgagtgcctgcctggtgaccctttgggggctaggagagccaccagagcacactctccggtacctggtcctccacctagcctccctgcagctgggactgctgttaaacggggtctgcagcctggctgaggagctgcgccacatccactccaggtaccggggcagctactggaggactgtgcgggcctgcctgggctgccccctccgccgtggggccctgttgctgctgtccatctatttctactactccctcccaaatgcggtcggcccgcccttcacttggatgcttgccctcctgggcctctcgcaggcactgaacatcctcctgggcctcaagggcctggccccagctgagatctctgcagtgtgtgaaaaagggaatttcaacgtggcccatgggctggcatggtcatattacatcggatatctgcggctgatcctgccagagctccaggcccggattcgaacttacaatcaacattacaacaacctgctacggggtgcagtgagccagcggctgtatattctcctcccattggactgtggggtgcctgataacctgagtatggctgaccccaacattcgcttcttggataaactgccccagcagaccggtgaccgtgctggcatcaaggatcgggttacagc

SEQ ID NO: 185242 - DNA, 1142 bp, Homo Sapiens
ttgggtgaataggctgagaacttcattattctcctccattctgaggcaggaggttgctttctttgacaagactcgcacaggagaattgattaaccgcctctcatcagacactgcactcctggggcgctcagtgactgaaaacctctcagatgggctcagggccggggcccaggcttccgtaggcatcagtatgatgttttttgtctcacctaatctggccacctttgttttgagcgtggtgcctccagtgtcaatcattgctgtaatttatgggcgatatctacggaaactgaccaaagtcactcaggattccctggcacaagccactcagctagctgaggaacgtattggaaatgtaagaactgttcgagcttttgggaaagaaatgactgaaatcgagaaatatgccagcaaagtggaccatgtaatgcagttagcaaggaaagaggcattcgcccgggctggtttctttggagcaactgggctctccggaaacctgatcgtgctttctgtcctgtacaaaggagggctgctgatgggcagtgcccacatgaccgtgggtgaactctcttccttcctaatgtatgctttctgggttggaataagcattggaggtctgagctctttctactcggagctgatgaaaggactgggtgcaggggggcgcctctgggagctcctggagagagagcccaagctgccttttaacgagggggtcatcttaaatgagaaaagcttccagggtgctttggagtttaagaacgtgcattttgcctatccagctcgcccagaggtgcccatatttcaggatttcagcctttccattccgtcaggatctgtcacggcactggttggcccaagtggttctggcaaatcaacagtgctttcactcctgctgaggttgtacgaccctgcttctggaactattagtcttgatggccatgacatccgtcagctaaacccagtgtggctgagatccaaaattgggacagtgagtcaggaacccattttgttttcttgctctattgctgagaacattgcttatggtgctgatgaccctttcctctgtgaccgctgaggaaatccagagagtggctgaagtggccaatgcagtggccttcatcccggaatttcccccaagg

SEQ ID NO: 185243 - DNA, 1439 bp, Homo Sapiens
attaaacatatgactgtatttattttgtacaaaatgcagtaacacttcttcttttcctctgcccctggaggcactaccgcagaacttcatgttcacagaaacacacgtcatggcaagtgtgtcaaaaagtcatgacaagcaggaaagtgcaattctgaaagtaatgccacacaaccaaagtgggaaatgaaaacaggcagaggccagcaggtttctcggctagggctctgcctataacgccctggtcctgctcatctttcagcagtaaacattttaagaagagaaactcctgagcactatgtaagtactctcctggtagcatccttccaattccatctatcttgatgttgtaacaagcttatttgtaacttcctcaagaaatcccaccctggattgcatccctgtcaattgcccatctccctctgagcttcaaacaaaacaaaataaaacagaagagcagtaagtttcaaaaggaagtcagaggagacatttgatagatgaaacctacttcctagaagccccctggccagacatatgcagagctggagacaacagattgtgaaactaggtccagctgtaaaatatctcaggtacccagttagatccagttattctgcatctgtggatttaaaattgtcatcatccacagtagaatagatgtgcccctcattgctcagaaaatccacagcttgcttgattgaggatacagacatgtgtttcagctggttcttgagatcctgaaagttcaacccttcaggtcttggacaagccttaatcaaattcaacacctggttttgggccacagtgaggccatttgctggcatgaagctattcccaccaaagttccctgcttcactcattcctggattgctgataggtgctctccctgctgagggctggctgttggctttgcttagtaccatgtgtgcattgatcacttccagaatatgtgtggtgaactcattcatatcctccaggggcatgatcttaaaggctaccaggctctttttgttctgaaaagatctcaggtggcctgccactttcacatatgtttctggaggaaccacagtgttttcactgctggtgtcatctgtgtcaacccactggcgaacgtccatgggtgcagctgtcatgtcatctattttgtaaacaatgttggttggagccttctctgcatgtctgatgatccccacaatagtgacctgtgaaatctcaacattcccaattctgaacacttcatcaaccaaagtggcagaaagcagctgagatatagtacagggcacaatgtgctgggctcgggctcttgttccacatcttggtcacgattctccgcaaagaggccgagaaggtgcgggtctgggggaatagcggaaaaccacagaacgcggccgccactgcgccgctctggctacttttctctggcaccacaaacgccccaa

SEQ ID NO: 185244 - DNA, 876 bp, Homo Sapiens
gggggcagggcgggggcggtggcgggcaacactcagctctggggctcctggggagcctcgcccccctcttccccggcgttgtcggccgtcccacagtgtcaggttgtctcgcagcagctgcatgatgagggtgctgtctttgtaggagtcctcgctgagggtgtgcagatcagccatggcctcgtcgaaagtggtcttggccagagagatggcctcctcggggctgttggcgatctcgtagtggaagacggaaaagttcagggccaggcccaggcggatggggttggtgggcggcatctccttcttgctgatgtccatggcctcctggtaggctgaccgggctgagtcaatgatgcgcttcttgtcgtcaccggtggccacctcggccaggtagcggtagtagtcacccttcatcttcaggtagaagacccggctctcggcgtccccggcctccttgatgaggtggctgtccagcaggcccagcacggtgtcgcacacgccctggagctcagtctccaccttctcccggtactcacgcacctcgggccccttctcctccgagccctcctcgttgcttttctgctcaatactggacagcaccctccaggcagccctctggccgcccaccacgttcttataggctactgagagcaggtttcgctcttcgcaggagagctcctcgcccttctccacggcgcctttcatgaaggctgccatgtcctcatagcgttcggcctgctctgccagcttggccttctggatcagactggctctctccatggctctggggacacacaggcgggcggcgggctaactgctgcctgggaccaatgccggactctgtgtctctcttgttcagggcctgccttttgccaa

SEQ ID NO: 185245 - DNA, 811 bp, Homo Sapiens
ttggcccctgtgttctatgtccccagaacatgctgtttgagagcatccaggagggcaagtacgagttccccgacaaggactgggcccacatctcctgcgctgccaaagacctcatctccaagctgctggtccgtgacgccaagcagaggctgagtgccgcccaagtcctgcagcacccctgggttcaggggtgcgccccggagaacaccttgcccactcccatggtcctgcagaggtaaggcccgcaggggtgctcgggacccctgagtccagggggcggggtttccaggttaagacatttgtgaaagacccggagaactgctttggggtcggggaggcaggcaagcctggtgactcagtgaagctcccggtggggccctggtgctcagaggagccccagggtgggggctgggaggggggcatgaagccccttcccccagggccttcacagaccccaggggtcccctgaggggtgcctcttggtgaccacctacccccaccccgtttcccaggaacagctgtgccaaagacctcacgtccttcgcggctgaggccattgccatgaaccggcagctggcccagcacgacgaggacctggctgaggaggaggccgcggggcagggccagcccgtcctggtccgagctacctcacgctgcctgcagctgtctccaccctcccagtccaagctggcgcagcggcggcaaagggccagtctgtcctcggccccagtggtcctggtgggagaccacgcctgaccctcccatctcccctctgtacataggtcacccgtcccccaatccaatctaaagg

SEQ ID NO: 185246 - DNA, 527 bp, Homo Sapiens
gatgagcaatgctttttctcctaatagccaactttgtacaaaaaagttggcttggggcacccgagtgccccttctcagggctcagtctgaccgtagccacgtcctgcctcgcgccgcccctcgggcctgacctggaagctccgtcagctccgtccttgtccttagagctgagcccagaccccggggtctggccgaatcctcacccccagggcagtgtttttggtctgccaccttcaggaaaacggctgcggcctcggcctcccttcgggcacccaggaatgcgggggtctgctcagtccccccaccctccatgctccaacccccgggggctgcggagcctgctgccccctccccgcgggtggggacgttctatgcaatacagggttccactttagaagtgcgcgcggctagggtcaccgcccgcccttcccggcgcagcccccgagctccacagctggggcagcccctctggcttctaaatccgcggtcgggattcttcctcctgtttagttttttagtttttcctt

SEQ ID NO: 185247 - DNA, 2501 bp, Homo Sapiens
  misc_feature (1299)..(1322): n is a, c, g, or t
ttggggaagatgtgctgggggagggcgctcatgcccgagtgcagacctgcatcaacctgatcaccagccaggagtacgccgtcaagatcattgagaagcagccaggccacattcggagcagggttttcagggaggtggagatgctgtaccagtgccagggacacaggaacgtcctagagctgattgagttcttcgaggaggaggaccgcttctacctggtgtttgagaagatgcggggaggctccatcctgagccacatccacaagcgccggcacttcaacgagctggaggccagcgtggtggtgcaggacgtggccagcgccttggactttctgcataacaaaggcatcgcccacagggacctaaagccggaaaacatcctctgtgagcaccccaaccaggtctcccccgtgaagatctgtgacttcgacctgggcagcggcatcaaactcaacggggactgctcccctatctccaccccggagctgctcactccgtgcggctcggcggagtacatggccccggaggtagtggaggccttcagcgaggaggctagcatctacgacaagcgctgcgacctgtggagcctgggcgtcatcttgtatatcctactcagcggctacccgcccttcgtgggccgctgtggcagcgactgcggctgggaccgcggcgaggcctgccctgcctgccagaacatgctgtttgagagcatccaggagggcaagtacgagttccccgacaaggactgggcccacatctcctgcgctgccaaagacctcatctccaagctgctggtccgtgacgccaagcagaggctgagtgccgcccaagtcctgcagcacccctgggttcaggggtgcgccccggagaacaccttgcccactcccatggtcctgcagaggaacagctgtgccaaagacctcacgtccttcgcggctgaggccattgccatgaaccggcagctggcccagcacgacgaggacctggctgaggaggaggccgcggggcagggccagcccgtcctggtccgagctacctcacgctgcctgcagctgtctccaccctcccagtccaagctggcgcagcggcggcaaagggccagtctgtcctcggccccagtggtcctggtgggagaccacgcctgaccctcccatctcccctctgtacataggtcacccgtcccccaatcaaatctaaaggttttttaagctatcgccagccggtgtccagcgggctgcccctcctctgcctggattcccaggcactaagctcagctgaggggggtgttttatagaaggnnnnnnnnnnnnnnnnnnnnnnnncctgtttccacccctccccgttattttttcctttggatggttaaaagcattgcaggcacccgggaaggtgagcagagggtaggtgggtgggcttgtcccctccccggtcccccgccctgctcacctctactatgaaggtgcccccaggtcacctgtgctgcccgccatctgcccacgtggcttgcagtgactcaggagagcaggcccacagcgtttgccatcttgcagagctggggaggggcacaggaccctgccctcgtgttccctcccagcccgcagtatttcagggacaggctcttcccctctatccctcaccctgagagcacccctggtggcttggttggggaagggaggggctgcctgtctctggaggtgtcaggcaggcaggtggcaggcagctcacccacccaccccatgggatcccccagcccttcacccgcgcctgccttgtccccatgatagttgacaatcggggcttcctgcaaggcccgtctgtctgtccaggactcctggtggccagattcggcctccgaccttgaccttaaactgcagctgaccccaggggctcgccgctgcccctcccctccacaccaaggcctgagacagcaggagccccgcctggcccgaagccgtttccaccgcagcaggcagaggggctggacaggcactgtcagccaatgtggggggtcctgaagacacccccttggggcacccgagtgccccttctcagggctcagtctgaccgtagccacgtcctgcctcgcgccgcccctcgggcctgacctggaagctccgtcagctccgtccttgtccttagagctgagcccagaccccggggtctggccgaatcctcacccccagggcagtgtttttggtctgccaccttcaggaaaacggctgcggcctcggcctcccttcgggcacccaggaatgcgggggtctgctcagtccccccaccctccatgctccaacccccgggggctgcggagcctgctgccccctccccgcgggtggggacgttctatgcaatacagggttccactttagaagtgcgcgcggctagggtcaccgcccgcccttcccggcgcagcccccgagctccacagctggggcagcccctctggcttctaaatccgcggtcgggattcttcctcctgtttagttttttagtttttcctt

SEQ ID NO: 185248 - DNA, 1437 bp, Homo Sapiens
tcatagtcactcatcatgacctcggactccacttcgcagcaggctgacacgtcagagcaggaggcggtggaggcgtacacagacatgggcatgctctcgacagcgggcgcctcgaagtgtctttgataccctggcgggtaaggggcatggggttctctacaagtactattctcaccagtgccttttgtttgaggttcagacatatcgaggggataaaaattgggcaaatactgattcaagttgaacctctgccggtttcttgatgaagaacccaagctacccgcggcaggcatgtctctaggagggtggatggattcaaactgattgctgaattcgggcggtaacggtggtagctcatcagctgcggggaagtcttctgggggtggaggaaaatcactttcgatgtcgtagcctccagggtaatagtccgtatcgatggcgtttggatctgctgagtacaggggtgtctgctcatcaatcacctcatagttggggaactcttgtatgtccggcagaggaacgcttggcatccaatctgatgtatcccagtgatacccattgtcatcgcacgattcggactggaaggagctcagagactgcacttcagacaggctttcccgggcactgtatggctgggaaggcttttcctctagaggcttcttggaaagacagggatcaagatccaccacttttgtgtcatagtcaaagtcccagctaggcttctggatggagtcgctgtcagaaggggagtttgaagggggtgggggaggcaggtttggcgccacgctgcagaccgccactgcttttcggtgcccgtgcacagactcggggttaaaagtgctgaattcgggatgctctgggatagcagatccttcgaaggaatttcgccagattgtttcttgagtcacttggaatactcggggtgtaggaaataggccggacaggcacctggggtggtatgtctgagtaaatgttcttatttagcttggaatcaaaatacggtctttgcaagaaagccgtagcgggtcccaggtgcttgtctttaggttcagcctgatgcttctttttccgactaatcatcttacggcagagaacaaacaccaccaccagtaaaaatatccctgcaacaaacacaacgattccaattccttccgccaacccaatgttccacggcgtggacacatactggttgggcgcagcatcctcgcagtgacgtcccctgtactcgtggctgcagttgcagtgataggagccgtgcgtgttctcacagagggccccgtgcaggcaagggtttccagagcactcgtcgatatcactctgacacctttctcccctaaaacccgaatcacactgacaaacggcgccatccaaactgtcaaagcatgttccgccattcttacagggttcatctttgcagtatggactaagctgacccaa

SEQ ID NO: 185249 - DNA, 1337 bp, Homo Sapiens
taaatcccaaaacgacgttgggaaatgggcacagccgatgaaaacctcacgatgacagtagttgggacactggaaatggctagcacgtccagaggcgcaggatccagcgcagccatgcccattcggctcaccaaaaaaagcttggaagcactgctgcaaagaacagcgcggattactcacatcacctctaggttcactaaagtcaggcactttggggggagttgagagtcagacttccgtgtgctgctgggaatccaggggcgggatcgtcacctcttcgaagtggccgtcgtccccgctctcatagtcactcatcatgacctcggactccacttcgcagcaggctgacacgtcagagcaggaggcggtggaggcgtacacagacatgggcatgctctcgacagcgggcgcctcgaagtgtctttgataccctggcgggtaaggggcatggggttctctacaagtactattctcaccagtgccttttgtttgaggttcagacatatcgaggggataaaaattgggcaaatactgattcaagttgaacctctgccggtttcttgatgaagaacccaagctacccgcggcaggcatgtctctaggagggtggatggattcaaactgattgctgaattcgggcggtaacggtggtagctcatcagctgcggggaagtcttctgggggtggaggaaaatcactttcgatgtcgtagcctccagggtaatagtccgtatcgatggcgtttggatctgctgagtacaggggtgtctgctcatcaatcacctcatagttggggaactcttgtatgtccggcagaggaacgcttggcatccaatctgatgtatcccagtgatacccttggtggaaaagaaaacagatgtcagtgtgttttctcctaagcttttgtgccatggaaagagagctcagtgtatcaaagacacaaagatgcaaccgcatttatgccttcattcaaagttcaccactggaaattcctcgtctttgctttgaagacatcccccaacccactccagtttaaagacccctatgaactaggctctagttctaaaatgtggacttacagttttatgtacgcaactaacattcaaggaaacaaaaggagtcctaagagaaatgggatgctagcatctaaattatatacatttttctacaaatgattctaaccatccttctggcttttcttctgtagaacccactgctctgtaggaagaagagtactgatccagtctcaggacattagtgaaatatccagtgtcacttgatctgcactacttctcattaaaaaaatactgattaatgcaacttaaaaaaattttgca

SEQ ID NO: 185250 - DNA, 1049 bp, Homo Sapiens
  misc_feature (702)..(761): n is a, c, g, or t
  misc_feature (840)..(852): n is a, c, g, or t
tttgtacaaaaaagttgggagacatgccccgccgcgggtagcttgggttcttcatcaagaaaccggcagaggttcaacttgaatcagtatttgcccaatttttatcccctcgatatgtctgaacctcaaacaaaaggcactggtgagaatagtacttgtagagaaccccatgccccttacccgccagggtatcaaagacacttcgaggcgcccgctgtcgagagcatgcccatgtctgtgtacgcctccaccgcctcctgctctgacgtgtcagcctgctgcgaagtggagtccgaggtcatgatgagtgactatgagagcggggacgacggccacttcgaagaggtgacgatcccgcccctggattcccagcagcacacggaagtctgactctcaactccccccaaagtgcctgactttagtgaacctagaggtgatgtgagtaatccgcgctgttctttgcagcagtgcttccaagctttttttggtgagccgaatgggcatggctgcgctggatcctgcgcctctggacgtgctagccatttccagtgtcccaactactgtcatcgtgaggttttcatcggctgtgccatttcccaacgtcttttgggatttacatctgtctgtgttaaaataatcaaacgaaaaatcagtcctgtgttgtcagcatgattcatgtatttatatagatttgattatttnnnnnnnnnnnnnnnnnnnnnnnnnnnnnnnnnnnnnnnnnnnnnnnnnnnnnnnnnnnnaactagatttccaagatattttgtgcatttgtttcaactgaattttggtggtgtcagtgccattatctagcaccctgannnnnnnnnnnnnactataaccagggtttcattctgtctttttccactgaagtgtgacattttgtttagtacatttcagtgtagtcattcattttctagctgtacatagagatgaaaagagagatcagatacatgaacatgtcttacatgggttgctggtatttaagattataaacatttttcattattggaaagtgtaacgggaccttc

SEQ ID NO: 185251 - DNA, 1882 bp, Homo Sapiens
  misc_feature (1465)..(1511): n is a, c, g, or t
caactttgtacaaaaaagttgggtgggaattgacaaagacaagcccaaggaggcggtcaccgtggccgtgaagatgttgaaagatgatgccacagagaaagacctttctgatctggtgtcagagatggagatgatgaagatgattgggaaacacaagaatatcataaatcttcttggagcctgcacacaggatgggcctctctatgtcatagttgagtatgcctctaaaggcaacctccgagaatacctccgagcccggaggccacccgggatggagtactcctatgacattaaccgtgttcctgaggagcagatgaccttcaaggacttggtgtcatgcacctaccagctggccagaggcatggagtacttggcttcccaaaaatgtattcatcgagatttagcagccagaaatgttttggtaacagaaaacaatgtgatgaaaatagcagactttggactcgccagagatatcaacaatatagactattacaaaaagaccaccaatgggcggcttccagtcaagtggatggctccagaagccctgtttgatagagtatacactcatcagagtgatgtctggtccttcggggtgttaatgtgggagatcttcactttagggggctcgccctacccagggattcccgtggaggaactttttaagctgctgaaggaaggacacagaatggataagccagccaactgcaccaacgaactgtacatgatgatgagggactgttggcatgcagtgccctcccagagaccaacgttcaagcagttggtagaagacttggatcgaattctcactctcacaaccaatgaggaatacttggacctcagtcagcctctcgaaccgtattcaccttgttatcctgacccaagatgaaataaaacgtctctcttcccttctttcaggaatacttggacctcagcccacctctcgaacagtattcacctagttaccctgacacaagaagttcttgttcttcaggagatgattctgttttttctccagaccccatgccttacgaaccatgccttcctcagtatccacacataaacggcagtgttaaaacatgaatgactgtgtctgcctgtccccaaacaggacagcactgggaacctagctacactgagcagggagaccatgcctcccagagcttgttgtctccacttgtatatatggatcagaggagtaaataattggaaaagtaatcagcatatgtgtaaagatttatacagttgaaaacttgtaatcttccccaggaggagaagaaggtttctggagcagtggactgccacaagccaccatgtaacccctctcacctgccgtgcgtactggctgtggaccagtaggactcaaggtggacgtgcgttctgccttccttgttaattttgtaataattggagaagatttatgtcagcacacacttacagagcacaaatgcagtatataggtgctggnnnnnnnnnnnnnnnnnnnnnnnnnnnnnnnnnnnnnnnnnnnnnnntacaaggagttattttttgtattgattttaaatggatgtcccaatgcacctagaaaattggtctctctttttttaatagctatttgctaaatgctgttcttacacataatttcttaattttcaccgagcagaggtggaaaaatacttttgctttcagggaaaatggtataacgttaatttattaataaattggtaatatacaaaacaattaatcatttatagttttttttgtaatttaagtggcatttctatgcaacagcacagcagactagttaatctattgcttggacttaactagttatcagatcctttgaaaagagaatatttacaatatatgactaatttggggaaaatgaagttttgatttattt

SEQ ID NO: 185252 - DNA, 1611 bp, Homo Sapiens
  misc_feature (1324)..(1343): n is a, c, g, or t
ttgggtcacaaaactgtgatccgagcctgcagaggacgtaatgacttgaaacgaccaatgcaagcaccaccaggccatgatcaagattccctaaagaaaagccaaggtgttggtccaattagaaaagttctcctccttaaggaagatcatgaaggccttggcatttcaattacaggtgggaaagaacatggtgttccaatcctcatctctgagatccatccggggcaacctgctgatagatgcggagggctgcacgttggggatgctattttggcagtcaacggagttaacctaagggacacaaagcataaagaagctgtaactattctttctcagcagagaggagagattgaatttgaagtagtttatgtggctcctgaagtggattctgatgatgaaaacgtagagtatgaagatgagagtggacatcgttaccgtttgtaccttgatgagttagaaggaggtggtaaccctggtgctagttgcaaagacacaagtggggaaatcaaagtattacaaggatttaataagaaggcagtaactgacacacatgaaaatggagacctgggcactgcaagtgaaactccgctagatgacggtgcttcaaaattagatgatctgcacactctgtatcataaaaaatcttattaaattgaccatatctccagacaagattgttaatcagactattctgaatttggggcactggggaagatggtgacaaagactacaaaatcaggggaggctgtttgttgcctaaatgaaaggcgggtacctcagggcttcatgtgaacaattctcaatgcataaaacaccctgttttctgtggtagaccataattagctattgcatgtaaagcaattttgattttcttgaacttgtaagcaccaaagcatgtgtttcccaaaggggtattactgggctcttaagtaccaaatgaaaccctactgttttacttggttccttttccctttagtaggaggacagtgctaactggaattttataaggagtaccctttaaaatacagagagtaagtgaattcatattttatattctagaatgttaactgtggtatttcagaagacagagcttgactcaatgaattgtagaaatataggcttgacttaatttttgtaactgaaaggctttagacttaaaaaaatttattgtgcatcctaaaatctaaaccaattattaatgatcatttattgtaatgagtttgcatttcagctttattcaatgcagtacaaaatagttttctttaagcagtcttttatcaatcaatgctgcactagaaatagattctcaaaagttactaaacannnnnnnnnnnnnnnnnnnnaaaagaaatgcagatgagtgtaaaacatctgttctcaattatgttgatctgtgtgcgcagtactggagcatttacccattcatgttgagcctcaaatgcttgttttctggggtccacaaaagacagttttatacattttgagttgttcataaagtttgtcttgtgatagtcctggcacttaaagacaaatttttctggtagtaaaagttcagatttattactatgtcatgaaacacagtacattcaaatcaaacggcagttttctttc

SEQ ID NO: 185253 - DNA, 558 bp, Homo Sapiens
gtatgagccactgcacctgaccaaaaccaactttttaaaccaaaaagtgtctgcttttttttctcctttctttcaggatttaataaaaaggcagtaactgacacacatgaaaatggagacctgggcactgcaagtgaaactccgctagatgacggtgcttcaaaattaaatgatctgcacactctgtatcataaaaaatcttattaaattgaccatatctccaaacaaaattgttaatcaaactattctgaatttggggcactggggaagatggtgacaaagactacaaaatcaggggaggctgtttgttgcctaaatgaaaggcgggtacctcagggcttcatgtgaacaattctcaatgcataaaacaccctgttttctgtggtagaccataattagctattgcatgtaaagcaattttgattttcttgaacttgtaagcaccaaagcatgtgtttcccaaaggggtattactgggctcttaagtaccaaatgaaaccctactgttttacttggttccttttccctttagtaggaggacagtgctaactggaattt

SEQ ID NO: 185254 - DNA, 1693 bp, Homo Sapiens
  misc_feature (365)..(384): n is a, c, g, or t
  misc_feature (1348)..(1360): n is a, c, g, or t
ttggcttttccctttagtaggaggacagtgctaactggaattttataaggagtaccctttaaaatacagagagtaagtgaattcatattttatattctagaatgttaactgtggtatttcagaagacagagcttgactcaatgaattgtagaaatataggcttgacttaatttttgtaactgaaaggctttagacttaaaaaaatttattgtgcatcctaaaatctaaaccaattattaatgatcatttattgtaatgagtttgcatttcagctttattcaatgcagtacaaaatagttttctttaagcagtcttttatcaatcaatgctgcactagaaatagattctcaaaagttactaaacannnnnnnnnnnnnnnnnnnnaaaagaaatgcagatgagtgtaaaacatctgttctcaattatgttgatctgtgtgcgcagtactggagcatttacccattcatgttgagcctcaaatgcttgttttctggggtccacaaaagacagttttatacattttgagttgttcataaagtttgtcttgtgatagtcctggcacttaaagacaaatttttctggtagtaaaagttcagatttattactatgtcatgaaacacagtacattcaaatcaaacggcagttttctttctaagtaaatgatttccagtcatctaaaaggtgggcaagatgagataaagacattttgatacagtaattgttttggttgggttttcatgtcagtttatgtttgactaaagctctcttcatatgcaggtttataaatttgttaggtctgttgtcccatgattaaacatggagtgcctcctctctgatttaatattctgcaggtcattgtaacctgctaggcaaagtcacaacattgcattaaagaggtgatagctttgctaatatcactgttttaaaggacgtacagttaaaggaatattaagtgggagaaagcctacaaggcttttagaatattatcagtatcttcatttctggtattcagatgttatgtgataaaacacattttttttggctttcccagatacactatatatttgttcaagggtaaatctataaaatgtatatactttattttgtggttttgctatttataaatttaatgttttaactgttgctcatttatggtttgttttgggtggtggtgttcatctgtatatcaccatgttaatttgtaatggaagtgcacttcgtagtgtatattgttactgacattaaaatactttatagcattgtctctgagcaaaagctagtatttaattgtacaaatgaataagcaagttacatgttattgtttgctcttgacagggtaggcctcttnnnnnnnnnnnnncaacttgttttttctttatgaatcccctatgccaaacacataccttccatgcatgacatgagatctgcaaactggattttagccaccgtatttatttagtcaaaaaaattgtccattgtagcagacccgaaaacctttttgctgtgacatgaaaccatgttattcttatcttcttaaaacacagcctgggatggaatggccatggcatttttttcagagaacatcctttatctgctatgactgaatcctttaggaatgtaagctataaccctttggattttcaagaactacccgaataagtgtatgaagaggtggtttttaaacttcaagttg

SEQ ID NO: 185255 - DNA, 1283 bp, Homo Sapiens
  misc_feature (147)..(166): n is a, c, g, or t
  misc_feature (1130)..(1142): n is a, c, g, or t
ttggatctaaaccaattattaatgatcatttattgtaatgagtttgcatttcagctttattcaatgcagtacaaaatagttttctttaagcagtcttttatcaatcaatgctgcactagaaatagattctcaaaagttactaaacannnnnnnnnnnnnnnnnnnnaaaagaaatgcagatgagtgtaaaacatctgttctcaattatgttgatctgtgtgcgcagtactggagcatttacccattcatgttgagcctcaaatgcttgttttctggggtccacaaaagacagttttatacattttgagttgttcataaagtttgtcttgtgatagtcctggcacttaaagacaaatttttctggtagtaaaagttcagatttattactatgtcatgaaacacagtacattcaaatcaaacggcagttttctttctaagtaaatgatttccagtcatctaaaaggtgggcaagatgagataaagacattttgatacagtaattgttttggttgggttttcatgtcagtttatgtttgactaaagctctcttcatatgcaggtttataaatttgttaggtctgttgtcccatgattaaacatggagtgcctcctctctgatttaatattctgcaggtcattgtaacctgctaggcaaagtcacaacattgcattaaagaggtgatagctttgctaatatcactgttttaaaggacgtacagttaaaggaatattaagtgggagaaagcctacaaggcttttagaatattatcagtatcttcatttctggtattcagatgttatgtgataaaacacattttttttggctttcccagatacactatatatttgttcaagggtaaatctataaaatgtatatactttattttgtggttttgctatttataaatttaatgttttaactgttgctcatttatggtttgttttgggtggtggtgttcatctgtatatcaccatgttaatttgtaatggaagtgcacttcgtagtgtatattgttactgacattaaaatactttatagcattgtctctgagcaaaagctagtatttaattgtacaaatgaataagcaagttacatgttattgtttgctcttgacagggtaagcctcttnnnnnnnnnnnnncaacttgttttttctttatgaatcccctatgccaaacacataccttccatgcatgacatgagatctgcagactggattttagccaccgtatttatttagtcaaaaattgtccattgtagcagacccgaaacctttttgctg

SEQ ID NO: 185256 - DNA, 2026 bp, Homo Sapiens
tacaaaaaagttggcttcttccgctctgaggcgctactgaggccgcggagccggactgcggttggggcgggaagagccggggccgtggctgacatggagcagccctgctgctgaggccgcgccctccccgccctgaggtgggggcccaccaggatgagcaagctgcccagggagctgacccgagacttggagcgcagcctgcctgccgtggcctccctgggctcctcactgtcccacagccagagcctctcctcgcacctccttccgccgcctgagaagcgaagggccatctctgatgtccgccgcaccttctgtctcttcgtcaccttcgacctgctcttcatctccctgctctggatcatcgaactgaataccaacacaggcatccgtaagaacttggagcaggagatcatccagtacaactttaaaacttccttcttcgacatctttgtcctggccttcttccgcttctctggactgctcctaggctatgccgtgctgcggctccggcactggtgggtgattgcggtcacgacgctggtgtccagtgcattcctcattgtcaaggtcatcctctctgagctgctcagcaaaggggcatttggctacctgctccccatcgtctcttttgtcctcgcctggttggagacctggttccttgacttcaaagtcctaccccaggaagctgaagaggagcgatggtatcttgccgcccaggttgctgttgcccgtggacccctgctgttctccggtgctctgtccgagggacagttctattcacccccagaatcctttgcagggtctgacaatgaatcagatgaagaagttgctgggaagaaaagtttctctgctcaggagcgggagtacatccgccaggggaaggaggccacggcagtggtggaccagatcttggcccaggaagagaactggaagtttgagaagaataatgaatatggggacaccgtgtacaccattgaagttccctttcacggcaagacgtttatcctgaagaccttcctgccctgtcctgcggagctcgtgtaccaggaggtgatcctgcagcccgagaggatggtgctgtggaacaagacagtgactgcctgccagatcctgcagcgagtggaagacaacaccctcatctcctatgacgtgtctgcaggggctgcgggcggcgtggtctccccaagggacttcgtgaatgtccggcgcattgagcggcgcagggaccgatacttgtcatcagggatcgccacctcacacagtgccaagcccccgacgcacaaatatgtccggggagagaatggccctgggggcttcatcgtgctcaagtcggccagtaacccccgtgtttgcacctttgtctggattcttaatacagatctcaagggccgcctgccccggtacctcatccaccagagcctcgcggccaccatgtttgaatttgcctttcacctgcgacagcgcatcagcgagctgggggcccgggcgtgactgtgccccctcccaccctgcgggccagggtcctgtcgccaccacttccagagccagaaagggtgccagttgggctcgcactgcccacatgggacctggccccaggctgtcaccctccaccgagccacgcagtgcctggagttgactgactgagcaggctgtggggtggagcactggactccggggccccactggctggaggaagtggggtctggcctgttgatgtttacatggcgccctgcctcctggaggaccagattgctctgccccaccttgccagggcagggtctgggctgagcacctgacttggctggggaggaccagggccctgggcaggtcagggcagcctgtcacccgtgtgaagatgaagggctcttcatctgcctgcgctctcgtccggttttttaggattattgaaagagtctgggacccttgttggggagtgggtggcaaggtggggggtgggctgctggccatgaatctctgcctctcccaagctgtccccctcctcccagggcctcctggggggaccttt

SEQ ID NO: 185257 - DNA, 859 bp, Homo Sapiens
ttggcacccgcttccctgacttagccccttgcagctctaggaatcagaaggttctttctccagcctaaccccagtttatcctgctgcagacttgagagggttcccaagcagctgctaccaggaatggggtgtatgccagtttggctggctagagttggtagccacagaagggggctctgggtttggggtgacccctgccatggagctcagccccctcccttcacagctgctcagcaaaggggcatttggctacctgctccccatcgtctcttttgtcctcgcctggttggagacctggttccttgacttcaaagtcctaccccaggaagctgaagaggagcgatgtgagtgcttgcgggtaggggggtgcagcgagggttacccacagccccaagagaggggagttgcgggcatgagagtcagtctgaagcatctcgccacctctgagcagcctccagtagcctgagggggagcttgggtgggggtaccccaggctgctagggtgtaactgtcctcggtccgggaccgagtctgctcctccagggtatcttgccgcccaggttgctgttgcccgtggacccctgctgttctccggtgctctgtccgagggacagttctattcacccccagaatcctttgcagggtctgacaatgaatcagatgaagaagttgctgggaagaaaagtttctctgctcatgagcgggagtacatccgccaggggaaggaggccacggcagtggtggaccagatcttggcccaggaagagaactggaagtttgagaagaataatgaatatggggacaccgtgtacaccattgaagttccctttcacggcaagacgtttatcctgaagacctt

SEQ ID NO: 185258 - DNA, 1008 bp, Homo Sapiens
ttaggaatttcttgggaaggtgcttctggtaacagtagtctgaaaaatgtatgatgctcaacacatactttccataaacgcttggcagctcgatggtttggcagcttaaacccaatggtgctttcaaattgttcaaactctcccggccggatcttaatgtaaaagttgttccgtttgtatgaaatctttagaactttgggccaggcaaatctgtttattcgcagccggtcgcgatatatcaacagaccacttgcacaaactcctaacataatttctaccccttctgagtccttagcatgatgtaaatctaccccatacattgataattttttggcattttccaagaaatgcatctctgcttctgctggcgtcattcctctgtggctcttgtgcagctcgatcactttgtcttccagttctttagtgtggtttggtgcaaagcggaactcactaatgtaatcgctcccacattcatctgggtcatagtctccgagctctgactggacagtgtaggagcccagcaaggccagggtaacaaaggagcagggcagccttccggacacgatgtcatctcgcaactgcaagcagaggtagtacctggtgatatcttcagatagttgggcagggtctggtggataaaatttcacattaaatgaaaagtgccaagcaccacttcgaacctgtttttttatttccttagcagggtccaaccaattcttctggttttcagcatctcgatacgtaagcccaaagtagtctttctctagcaagttcaagtgttcacacactttatcaaacagcacttgtcctctggagcgtttctctacatcacaggtatattctgatccatcgagaagtatcactttgcactgcatgcttttaggctttttgacaatctttaatggagaccgagagagtttactgctagatgatttctgagaaagtttatcgtcttctaattgctgatattcgagctgttttgcagccctggcagcaaactcctgccaa

SEQ ID NO: 185259 - DNA, 969 bp, Homo Sapiens
aactttgtacaaaaaagttggcacaggacaccagcttcccaggaggcgtctgacacagtatgatgatgaagatcccatggggcagcatcccagtactgatgttgctcctgctcctgggcctaatcgatatctcccaggcccagctcagctgcaccgggcccccagccatccctggcatcccgggtatccctgggacacctggccccgatggccaacctgggaccccagggataaaaggagagaaagggcttccagggctggctggagaccatggtgagttcggagagaagggagacccagggattcctgggaatccaggaaaagtcggccccaagggccccatgggccctaaaggtggcccaggggcccctggagccccaggccccaaaggtgaatcgggagactacaaggccacccagaaaatcgccttctctgccacaagaaccatcaacgtccccctgcgccgggaccagaccatccgcttcgaccacgtgatcaccaacatgaacaacaattatgagccccgcagtggcaagttcacctgcaaggtgcccggtctctactacttcacctaccacgccagctctcgagggaacctgtgcgtgaacctcatgcgtggccgggagcgtgcacagaaggtggtcaccttctgtgactatgcctacaacaccttccaggtcaccaccggtggcatggtcctcaagctggagcagggggagaacgtcttcctgcaggccaccgacaagaactcactactgggcatggagggtgccaacagcatcttttccgggttcctgctctttccagatatggaggcctgacctgtgggctgcttcacatccaccccggctccccctgccagcaacgctcactctacccccaacaccaccccttgcccagccaatgcacacagtagggcttggtgaatgctgctgagtgaatgagtaaataaactcttcaaggccaaga

SEQ ID NO: 185260 - DNA, 1159 bp, Homo Sapiens
caactttgtacaaaaaagttggcacatggattcctaaagcaaagttatggtcgatttctattcttgaaagaatcaactacagtgaatcctttgcatttgaagccttaacatgcattgctttaattttgcccagggacaaattttaataatcagcaagactggtttgtgcaaagcgttgagtcatcaggtatttagagcctagccagctacccagtatccatgctgccatatcccttcattgtaaaaagtacctaaacattcgtgaaatgattttttttagctgaaaaatgctggcaagaagaattttaaagcttaaaataggtggtaaatttgaagtatgagtgtgttcacgagaaacataggcttttcaaaaaaatttttattcaaggcaaagcaaggaacatcttgagatatgtctcaagaatataaagatgtattattttaagccaaggagctgaaatatatctcagtttataaattcaggtatattctttttgtctccatggcaaccataacttttgaaccaaaaaaaattgtttttacatctttatgctgaaaatgtgtttagattaggaatatggtcgggctgaatttgctgttgctccctaaccaaatccacctcttgttttccttgtgagtccatggctaaatcaaagctgcccctgagaagagacttaatccaagcctgattgtactagtggcatcacttagaagtaggctttccctcttcctagtagatctcaatgttttataattccttaaaacagctgaaaattgggacaacatactttacgcaatgaacagtagttaaataggaaataaactagttccatataagtatacacctagagttttaattacctttataatgtttcttaaaagtgaaacttagatacaattgtgattggatacttagatactaagtgaaacttagtgtaacaattttgatctgttaaattggattttacatgtacatttgaatgccagaatttctaaataaatcccctggttaggaaattttaaaagtcaaagcttgttttcttcaaccactaccttctacattggttgacttagaccgtaagctttttaagtttctcattgtaatttaccttctcatgcagattgctgatgttttattaaaccttatttttacaaaatg

SEQ ID NO: 185261 - DNA, 1497 bp, Homo Sapiens
  misc_feature (203)..(231): n is a, c, g, or t
ttggcttcttcgtgccggcgtcgcagtggccgggcctcttgcgtctggtaacgccgctgtctctaacgccagcccttggcgcccgcgccccgccaccgcagcgcccggcagtccgcggcccaaccgccgcccgcgcccccgctctccgcaccgtacccggccgcctcgcgccatggcggcccccggcagcgcccggcgacccnnnnnnnnnnnnnnnnnnnnnnnnnnnnncggcctcatgcattgtgcgtcagcagcaatgtttatggtgaaaaatggcaacgggaccgcgtgcataatggccaacttctctgctgccttctcagtgaactacgacaccaagagtggccctaagaacatgacctttgacctgccatcagatgccacagtggtgctcaaccgcagctcctgtggaaaagagaacacttctgaccccagtctcgtgattgcttttggaagaggacatacactcactctcaatttcacgagaaatgcaacacgttacagcgtccagctcatgagttttgtttataacttgtcagacacacaccttttccccaatgcgagctccaaagaaatcaagactgtggaatctataactgacatcagggcagatatagataaaaaatacagatgtgttagtggcacccaggtccacatgaacaacgtgaccgtaacgctccatgatgccaccatccaggcgtacctttccaacagcagcttcagcaggggagagacacgctgtgaacaagacaggccttccccaaccacagcgccccctgcgccacccagcccctcgccctcacccgtgcccaagagcccctctgtggacaagtacaacgtgagcggcaccaacgggacctgcctgctggccagcatggggctgcagctgaacctcacctatgagaggaaggacaacacgacggtgacaaggcttctcaacatcaaccccaacaagacctcggccagcgggagctgcggcgcccacctggtgactctggagctgcacagcgagggcaccaccgtcctgctcttccagttcgggatgaatgcaagttctagccggtttttcctacaaggaatccagttgaatacaattcttcctgacgccagagaccctgcctttaaagctgccaacggctccctgcgagcgctgcaggccacagtcggcaattcctacaagtgcaacgcggaggagcacgtccgtgtcacgaaggcgttttcagtcaatatattcaaagtgtgggtccaggctttcaaggtggaaggtggccagtttggctctgtggaggagtgtctgctggacgagaacagcatgctgatccccatcgctgtgggtggtgccctggcggggctggtcctcatcgtcctcatcgtctacctcgtctggcaggaagaggagtcacgcagctaccagactatctagcctggtgcacgcaggcacagcagctgcagggcctctgttcctttctctgggcttaaggtcctgtcgaaggg

SEQ ID NO: 185262 - DNA, 2088 bp, Homo Sapiens
ttggcgcaagtagtggccatccccaacaatgctaatattcacagcatcatcacagcactgactgccaagggaaaagagagtggcagtagtgggcccaacaaattcatcctcatcagctgtgggggagccccaactcagcctccaggactccggcctcaaacccaaaccagctatgatgccaaaaggacagaagtgaccctggagaccttgggaccaaaacctgcagctagggatgtgaatcttcctagaccacctggagccctttgcgagcagaaacgggagacctgtgcagatggtgaggcagcaggctgcactatcaacaatagcctatccaacatccagtggcttcgaaagatgagttctgatggactgggctcccgcagcatcaagcaagagatggaggaaaaggagaattgtcacctggagcagcgacaggttaaggttgaggagccttcgagaccatcagcgtcctggcagaactctgtgtctgagcggccaccctactcttacatggccatgatacaattcgccatcaacagcactgagaggaagcgcatgactttgaaagacatctatacgtggattgaggaccactttccctactttaagcacattgccaagccaggctggaagaactccatccgccacaacctttccctgcacgacatgtttgtccgggagacgtctgccaatggcaaggtctccttctggaccattcaccccagtgccaaccgctacttgacattggaccaggtgtttaagccactggacccagggtctccacaattgcccgagcacttggaatcacagcagaaacgaccgaatccagagctccgccggaacatgaccatcaaaaccgaactccccctgggcgcacggcggaagatgaagccactgctaccacgggtcagctcatacctggtacctatccagttcccggtgaaccagtcactggtgttgcagccctcggtgaaggtgccattgcccctggcggcttccctcatgagctcagagcttgcccgccatagcaagcgagtccgcattgcccccaaggtgctgctagctgaggaggggatagctcctctttcttctgcaggaccagggaaagaggagaaactcctgtttggagaagggttttctcctttgcttccagttcagactatcaaggaggaagaaatccagcctggggaggaaatgccacacttagcgagacccatcaaagtggagagccctcccttggaagagtggccctccccggccccatctttcaaagaggaatcatctcactcctgggaggattcgtcccaatctcccaccccaagacccaagaagtcctacagtgggcttaggtccccaacccggtgtgtctcggaaatgcttgtgattcaacacagggagaggagggagaggagccggtctcggaggaaacagcatctactgcctccctgtgtggatgagccggagctgctcttctcagaggggcccagtacttcccgctgggccgcagagctcccgttcccagcagactcctctgaccctgcctcccagctcagctactcccaggaagtgggaggaccttttaagacacccattaaggaaacgctgcccatctcctccaccccgagcaaatctgtcctccccagaacccctgaatcctggaggctcacgcccccagccaaagtagggggactggatttcagcccagtacaaacctcccagggtgcctctgaccccttgcctgaccccctggggctgatggatctcagcaccactcccttgcaaagtgctcccccccttgaatcaccgcaaaggctcctcagttcagaacccttagacctcatctccgtcccctttggcaactcttctccctcagatatagacgtccccaagccaggctccccggagccacaggtttctggcccttgcagccaatcgttctctgacagaagcctgggtcctggacacaatgaatgacagcctcagcaagatcctgctggacatcagctttcctggcctggacgaggacccactgggccctgacacatcaactggtcccagtttattcctgagctacagtagagccctgcc

SEQ ID NO: 185263 - DNA, 1757 bp, Homo Sapiens
  misc_feature (983)..(1007): n is a, c, g, or t
aaaactttgtacaaaaaagttggcccgctcctcccccgaccgcgcgctcgccccgccgctcctgctgcagccccagggcccctcgccgccgccaccatggacgccatcaagaagaagatgcagatgctgaagctcgacaaggagaacgccttggatcgagctgagcaggcggaggccgacaagaaggcggcggaagacaggagcaagcagctggaagatgagctggtgtcactgcaaaagaaactcaagggcaccgaagatgaactggacaaatactctgaggctctcaaagatgcccaggagaagctggagctggcagagaaaaaggccaccgatgctgaagccgacgtagcttctctgaacagacgcatccagctggttgaggaagagttggatcgtgcccaggagcgtctggcaacagctttgcagaagctggaggaagctgagaaggcagcagatgagagtgagagaggcatgaaagtcattgagagtcgagcccaaaaagatgaagaaaaaatggaaattcaggagatccaactgaaagaggcaaagcacattgctgaagatgccgaccgcaaatatgaagaggtggcccgtaagctggtcatcattgagagcgacctggaacgtgcagaggagcgggctgagctctcagaaggccaagtccgacagctggaagaacaattaagaataatggatcagaccttgaaagcattaatggctgcagaggataagtactcgcagaaggaagacagatatgaggaagagatcaaggtcctttccgacaagctgaaggaggctgagactcgggctgagtttgcggagaggtcagtaactaaattggagaaaagcattgatgacttagaagagaaagtggctcatgccaaagaagaaaaccttagtatgcatcagatgctggatcagactttactggagttaaacaacatgtgaaaacctccttagctgcgaccacattctttcannnnnnnnnnnnnnnnnnnnnnnnnaaacacctgcttaccccttaaatgcaatttatttacttttaccactgtcacagaaacatccacaagataccagctaggtcagggggtggggaaaacacatacaaaaaggcaagcccatgtcagggcgatcctggttcaaatgtgccatttcccgggttgatgctgccacactttgtagagagtttagcaacacagtgtgcttagtcagcgtaggaatcctcactaaagcagaagaagttccattcaaagtgccaatgatagagtcaacaggaaggttaatgttggaaacacaatcaggtgtggattggtgctactttgaacaaaaggtccccctgtggtcttttgttcaacattgtacaatgtagaactctgtccaacactaatttattttgtcttgagttttactacaagatgagactatggatcccgcatgcctgaattcactaaagccaagggtctgtaagccacgctgctcttccgagacttccattcctttctgattggcacacgtgcagctcatgacaatctgtaggataacaatcagtgtggatttccactcttttcagtccttcatgttaaagatttagacaccacatacaactggtaaaggacgttttcttgagagttttaactatatgtaaacattgtataatgatatggaataaaatgcacattgtaggaccaataaaaactataaagaaatgttactcattacaatcccttcctttcttgtacaaagtggggataaaa

SEQ ID NO: 185264 - DNA, 1351 bp, Homo Sapiens
  misc_feature (773)..(847): n is a, c, g, or t
ttggcacccctcgtagtgaagaaaccctgcccaaggccacccccgactccctggagcctgctggcccctcatctccagcctctgtcactgtcactgttggtgatgagggggctgacacccctgtaggggctacaccactcattggggatgaatctgagaatcttgagggagatggggacctccgtgggggccggatcctgctgggccatgccacaaagtcattcccctcttcccccagcaaggggggttcctgtcctagccgggccaagatgtcaatgacaggggcgggaaaatcacctccatctgtccagagtttggctatgaggctactgagtatgccaggagcccagggagctgcagcagcagggtctgaaccccctccagccaccacgagcccagagggacagcccaaggtccaccgagcccgcaaaaccatgtccaaaccaggaaatggacagcccccggtccctgagaagcggccccctgaaatacagcatttccgcatgagtgatgatgtccactcactgggaaaggtgacctcagatctggccaaaaggaggaagctgaactcaggaggtggcctgtcggaggagttaggttctgcccggcgttcaggagaagtgaccctgacgaaaggggaccccgggtccctggaggagtgggagacggtggtgggtgatgacttcagtctctactatgattcctactctgtggatgagcgcgtggactccgacagcaagtctgaagttgaagctctaactgaacaactaagnnnnnnnnnnnnnnnnnnnnnnnnnnnnnnnnnnnnnnnnnnnnnnnnnnnnnnnnnnnnnnnnnnnnnnnnnnntgaggagtcagggaatcagtcagataggagtggttccagtggccggcgcaaggccaagaagaaatggcgaaaagacagcccatgggtgaagccgtctcggaaacggcgcaagcgggagcctccgcgggccaaggagccacgaggagtgaatggtgtgggctcctcaggccccagtgagtacatggaggtccctctggggtccctggagctgcccagcgaggggaccctctcccccaaccacgctggggtgtccaatgacacatcttcgctggagacagagcgagggtttgaggagttgcccctgtgcagctgccgcatggaggcacccaagattgaccgcatcagcgagagggcggggcacaagtgcatggccactgagagtgtggacggagagctgtcaggctgcaatgccgccatcctcaagcgggagaccatgaggccatccagccgtgtggccctgatggtgctctgtgagacccaccgcgcccgcatggtcaaacacca

SEQ ID NO: 185265 - DNA, 1088 bp, Homo Sapiens
  misc_feature (726)..(799): n is a, c, g, or t
gggggtgcaggagctgcagtgccggccggtggggtcaccccgtcaccccgggggatggtcactcttgagcttcagaagcatcctccccacagtggggacagaagaccatcccattcagctgagacacacaggccttgtggaagcggtgggccacacggaagtcagggtggcactccaggaaggtgcccgccgtgcagaagtagccgcagcccgggcagcagtggtgtttgaccatgcgggcgcggtgggtctcacagagcaccatcagggccacacggctggatggcctcatggtctcccgcttgaggatggcggcattgcagcctgacagctctccgtccacactctcagtggccatgcacttgtgccccgccctctcgctgatgcggtcaatcttgggtgcctccatgcggcagctgcacaggggcaactcctcaaaccctcgctctgtctccagcgaagatgtgtcattggacaccccagcgtggttgggggagagggtcccctcgctgggcagctccagggaccccagagggacctccatgtactcactggggcctgaggagcccacaccattcactcctcgtggctccttggcccgcggaggctcccgcttgcgccgtttccgagacggcttcacccatgggctgtcttttcgccatttcttcttggccttgcgccggccactggaaccactcctatctgactgattccctgactcctcannnnnnnnnnnnnnnnnnnnnnnnnnnnnnnnnnnnnnnnnnnnnnnnnnnnnnnnnnnnnnnnnnnnnnnnnnacttagttgttcagttagagcttcaacttcagacttgctgtcggagtccacgcgctcatccacagagtaggaatcatagtagagactgaagtcatcacccaccaccgtctcccactcctccagggacccggggtcccctttcgtcagggtcacttctcctgaacgccgggcagaacctaactcctccgacaggccacctcctgagttcagcttcctccttttggccagatctgaggtcacctttcccagtgagtggacatcatcactcatgcggaaatgctgtatccaa

SEQ ID NO: 185266 - DNA, 877 bp, Homo Sapiens
tttgtacaaaaaagttggcgctcaggcccggatcctggcggcctgggcggccgcaccatggactcgggaaccgaggagtacgagctcaacggcggcctgcctccgggcacacccggctccccggacgcctcgccggcccgctggggctggaggcacgggcccatcaacgtgaaccattacgccagcaagaagagcgcagccgagagcatgctggacatcgcgctgctgatggccaacgcgtcccagctgaaggccgtcgtggaacagggccccagcttcgccttctatgtgcccctggtggtcctcatctccatctcccttgtgctgcagatcggcgtgggggtgctgctcatcttccttgtcaagtacgaccttaacaacccggacaagcacgccaagctggacttcctcaacaacctggccacgggcctggtgttcatcatcgtggtagtcaacatcttcatcacggccttcggggtccagaagcccttgatggacatggcaccccagcagtaggacacccaggaccctggatgctgcctgccctgcaactcagctgcccgaccccaggagtcgccatacctgtgaggtgtccacctccctgcacatggcactacccagactgccagagcccaggctggcctcatctgcaccatgtccccggaccagcccttgctctgactgcggccaagcaccacgcaagaggccactcttgtctctcagcagctgttcccaggaggcagctctcctcctggcacatgggggctggccacaatagcccagagggtcagaactggacagctgcagagacctgtgctcagagaaagggtctcgacccactcaaggacacacagcaatccgtggatgggctggatga

SEQ ID NO: 185267 - DNA, 1690 bp, Homo Sapiens
tgtacaaagaagaaggcctaaaagatgaggagaaacgactccggagatcagcacatgctcggaaggaaacagagtttcttcgtttgaagagaacaagacttggattggaagattttgagtccttaaaagtaataggcagaggagcatttggtgaggtacggcttgttcagaagaaagatacgggacatgtgtatgcaatgaaaatactccgtaaagcagatatgcttgaaaaagagcaggttggccacattcgtgcggagcgtgacattctagtggaggcggacagtttgtgggttgtgaaaatgttctatagttttcaggataagctaaacctctacctaatcatggagttcctgcctggaggggacatgatgaccttgttgatgaaaaaagacactctgacagaagaggagactcagttttatatagcagaaacagtattagccatagactctattcaccaacttggattcatccacagagacatcaaaccagacaaccttcttttggacagcaagggccatgtgaaactttctgactttggtctttgcacaggactgaaaaaagcacataggacagaattttataggaatctgaaccacagcctccccagtgatttcactttccagaacatgaattccaaaaggaaagcagaaacctggaaaagaaatagacgtcagctagccttctccacagtaggcactcctgactacattgctcctgaggtgttcatgcagaccgggtacaacaagctctgtgattggtggtcgcttggggtgatcatgtatgagatgctcatcggctacccacctttctgttctgagacccctcaagagacatataagaaggtgatgaactggaaagaaactttgacttttcctccagaagttcccatctctgagaaagccaaggatctaattttgaggttctgctgtgaatgggaacatagaattggagctcctggagttgaggaaataaaaagtaactctttttttgaaggcgttgactgggaacatatcagagagagacctgctgcaatatctattgaaatcaaaagcattgatgatacctcaaacttcgatgagtttccagaatctgatattcttaagccaacagtggccacaagtaatcatcctgagactgactacaagaacaaagactgggtcttcatcaattacacgtacaagcgctttgagggcctgactgcaaggggggcaataccttcctacatgaaagcagcaaaatagtactcttgccacggaatcctatgtggagcagagttctttgtataacatcatgcttttcctctcacactcttgaagagcttccaagaagttgatggaacccaccaatatgtcatagtaaagtctcctgaaatgtggtagtaagaggattttcttccataatgcatctgaaaaactgtaaacaaagacaaccatttctactacgtcggccataaacagctatcctgctttggaagagaagcatcatgagccaatttgataggtgttttaaaaataacttgagttttcctaagttcatcagaatgaaggggaaaaacagccatcatccaacattattgagattgtcgtgtatagtcatcgaatatcagccagttcctgtaattttgtgacacgctctctgccaagcccaccaagtatttcctttatagctaaaagttccatagtac

SEQ ID NO: 185268 - DNA, 2124 bp, Homo Sapiens
actttgtacaaaaaagttggcttcatagtcccgtcttcagcaccgtgagcagtccattggaggcaaggcagtgaatcaactctcacatctatttctttcccagtggccacaagtaatcatcctgagactgactacaagaacaaagactgggtcttcatcaattacacgtacaagcgctttgagggcctgactgcaaggggggcaataccttcctacatgaaagcagcaaaatagtactcttgccacggaatcctatgtggagcagagttctttgtataacatcatgcttttcctctcacactcttgaagagcttccaagaagttgatggaacccaccaatatgtcatagtaaagtctcctgaaatgtggtagtaagaggattttcttccataatgcatctgaaaaactgtaaacaaagacaaccatttctactacgtcggccataaacagctatcctgctttggaagagaagcatcatgagccaatttgataggtgttttaaaaataacttgagttttcctaagttcatcagaatgaaggggaaaaacagccatcatccaacattattgagattgtcgtgtatagtcatcgaatatcagccagttcctgtaattttgtgacacgctctctgccaagcccaccaagtatttcctttatagctaaaagttccatagtactaaggaaataaagcaataaagacagtctcagcagccaggattctggctgaaggaaatgatccgccaccctgagggtggtgatggtagtttctacccatacctcagcctcaggcgagtggcttatagcctccattcatggtgcactttatttatggtactaagataaagactgtcaatccattgatttatctcctcctgtcccccatctaaaatacccatgctgcttttctgagtgttgatgggggttaccagcttgatccactgttgctcttagaaggcccagaaagtctttgggcattgccaagaaatcccggattatgtggaaaaccctcactttctcttcacggctgtaccagaaaatccctaagacagatcttgccgtggactagcaatacctgcaagtgctgccaatgggaactcaatttattcctgggaacctaacgaggagagcccaggcctaggcaggaggcctggaaccctcttggctaaggtgctgttcctgttcctgcaaggtctccagaacccctttggaaatggtgaaggaaccagcccaatagaagtacagagccagctgacaagtccttgtaaagctcactcctcagtccttggcacagccatgttttgtcttctctcttggtatttcttctctcccaactttagccattttgccttggaatcatgattacaattttttcctttgcagatgccttcctgggggatactcctccccaccctaaagggtcgcctgcaacttaggcggattgggtctctctgctgtggcgttctctcttgagagaccctctgaattttagcacaaagtgccttctgtttcacagctgccaccacctttagaggaatttcgtcagaaaaatgtggaggctccatattaatgcattattttttaaaaagttttgataactcttaaagcatcatttgcacctatgtgggaactttgcctgttgcaaagtattgtggccgagctgcagctgggagcctgctttctgccagtcttgaggttctgaagatcagctttgaaaggaaagtatgtcctagcttagccattcagaagagaaaaatggaatatcagagttacagttgtcagtgaaactactttggattttaacctcttagaggaagaaaaaaggttagggaagtgtcaactctggatgaaggtgatgtgtttgcctctcagtctttcattcatagcctgctagtgaaaaggaagtaaatgagattcttttgtgtgactttgtagtctctttgtattaccaaatagttggggtgttgactcctgtgtgttttgcaagaatgtgtggtaagcctgggtaaagagaaggaactgcggtgttgggagagtctttgtgttggggagtggcaggggatgatttgtttcaggggaaaatgcccacattttaacttttaaacttctgaataaactgtgtaaaaa

SEQ ID NO: 185269 - DNA, 1595 bp, Homo Sapiens
  misc_feature (915)..(926): n is a, c, g, or t
ttggatatttgatgccatctgcctggagtcatctagcatggtccttcatccggcagctgggtttgaagagggaaggaaaactctggttgcctgagcctgtgatgactgaaaatctaggctgtttttgagtgaccttgttccttattaaggaaattgcttaacttctcccatcatagtgttttgaaaatggatacattgctggctggctgatttagtatgcatgcatttattctaggaaggtcctctgagcaccaactctatgccaagagtatggtgctaggcctgcacaaaacgggggactttcatttgtgagcaatttgtaagcaagtgttctgaattaagggctctgaatttaggtccttggggaccttactgatgggactgagggatggcgagggcagaaagagtgggacctggctggttgaggctgtcaacatcctggaggcacttctgacttgctgtcttttcactccggtacccccaggatctttggctttcctgtgcactacacagacgtgtccaacatgggccgtggtgcccgccagaagctgctgggaaggtcctggagcgtgcctgtcatccgacacctcttcgcccctctgaaggactactttgcatgtgaatagttccagccaggccccaagcccactggggtgtgtggcagagccaggacccaggaggtgtgattcctgaaggcatccccaggccctgctcttcctcagctgtgtgggtcataccgtgtacctcagttccctcttgctcagtgggggcagagccacctgactcttgcaggggtagcctgaggtgccgcctccttgtgcacaaatcagacctggctgcttggagcagcctaacacggtgctcattttttcttctcctaaaactttaaaacttgaagtaggtagcaacgtggcnnnnnnnnnnnncccttcctgggtctaccactcagagaaacaatggctaagataccaaaaccacagtgccgacagctctccaatactcaggttaatgctgaaaaatcatccaagacagttattgcaagagtttaatttttgaaaactggctactgttctgtgtttacagacgtgtgcagttgtaggcatgtagctacaggacatttttaagggcccaggatcgttttttcccagggcaagcagaagagaaaatgttgtatatgtcttttacccggcacattccccttgcctaaatacaagggctggagtctgcacgggacctattagagtattttccacaatgatgatgatttcagcagggatgacgtcatcatcacattcagggctattttttcccccacaaacccaagggcaggggccactcttagctaaatccctccccgtgactgcaatagaaccctctggggagctcacgaaaggggtgtgctgagttctataatataagctgccatatattttgtagacaagtatggctcctccatatctccctcttccctaggagaggagtgtgaagcaaaggagcttagataagacaccccctcaaacccattccctctccaggagacctaccctccacaaggcacaggtccccagatgagagtctgctaccctcatttctca

SEQ ID NO: 185270 - DNA, 1357 bp, Homo Sapiens
ttgggcttgtcattctctgtaagtccctcttctctctttgcacacatcgtgtttttgaaaatcatgtttcttctacacaaagggagaagttcacctttattgagaagtgtaacaaccctcgttctgtcacattattgatcaaaggaccaaataagcccacacttagatcaaagatgcagtaagggatggcttgagggctgtcaaaaatgctattgatgatggctgtgtggttccggtgctggtgccgtggaagtggcaatggcagaagccctgaataaatataagctcagtgtaaagggcaaggcacagcttggagtccaagcatttgctgatgtgttgctcgttattcccaaggtgagcccgtggtagcagcagaagcaggcattatgggataacgattgtgtaaagaaacagcttcttcattcctgcactggttgccaccaacattctcttggttgatgagatcatgcgagctggaatcttctctgaaaggttgaattgaagcttcctctgtatctgagtcttgaagactctgcaaagtgatcctgaagaatacagctgtggaatttttgtccaagcttcaaatgagtttcaagggaattttcccatgtgaaaaaaggagagaacactggcatctgttgaaattcggaagttctgaaattataattacagtattttttaaaaattgcactgaagtgtacacagataaagcaggtctttcacccagtgaacaggatgttttgctttagcagcagtgacataaaattccatgttagataagcatatgttacttaccttgttattaaatatttcttgaaaagcaaattttaatggtttaattttatgtggacgtatgttaaattatccaactaccctattgttaagcatttggttttaaaatttttatgctaatataaatgctcaagtaatttaaaatattgaaagcatccctgttggtataaatttctgagtaaatgcattggatcagttggactttgaacgcctttgaaatggctttgctaatttgctcccgccacaaagttgtaggaaatgggaagaggagtcaactagaggcaagggagttgagagagctgcaactgcaaagggcaagaacaggcagaggtaaaaagatgatggaaggtgtggtgactaagggccacggttattgggtgaaatttgagattgtaggccaactgtattttcaagcttctgaacttaggcaaaatattcatcgcaaagtctctagcgtcatatttttctcacccaaattacgtttccacgagattatttatatatagttggtctatctctgcagtccttgaaggtgaagttgtgtgttactagctgtgttttggga

SEQ ID NO: 185271 - DNA, 2081 bp, Homo Sapiens
actttgtacaaaaaagttgggttaatactagcggaggccatacagtaggattagggggcttaaatctgggtctttgtcttggtctaaaacaaatttgttgtgagcttggacaggttatggaaccttttttggcctgaaaataattttgtaatcaagttgaattgcctatgtgatttgtatctgtctttagattaataattgagattttaaaatgggatgtttaggactaggcatatttatttgttaggaaagagacaaccaaaagcttacatttagataaattccacttttttagccctgactagttccaaggtttaaaacaaacctcagtgactacgaatctattgtcagaattttcgggtaaaagagagcagatagtctttatttatttttattagtaaatgatggaattagtttgagattacctatagaaaagatagaataatgctaccacctgtgagttgttgggacacagtgtcggttttgacatgattcggagtggtttgcacagtgaacacccaagtgtgctttatagttcccttggctttgaccctgtgctagagcattgcctgctcttctcctctgcattaaaaggaatatttatccttttaaatgtattcagaaagccagcacattatattacctcgtgttcaaagataggatgatcagagtatccctccaagaattatctgaactttatcatgaactatagttgcacctaattgaagatgcaagtgttattgtgtgtttattgtagggccttcatcccagaataatcactgaaggatttgaagctgtgaaggaaaagcccttcattttttggaagaagtcaaagtaagcagagagatggacaaggaaacacttaaagatgtggccagggcatctctttgtactaaagttcatgctgaacttgcagatgtcttaacagaggctgtagtgggctccattttggccattaaaagaaaagatgaacctattgatctcttcatgattttgtgatcattgacaagaaacataaatctgaaactgatacaagagaagtgaattctggcgttttttacaagagtgcagaaagagaaaaactcataaaagctgaaagaaaattcattgaagatagagttaaaacaaataatagaactgaaaaggaaagtctgtagtaattcagataaaggatttgttattaatcaaaagggaattgaccccttttccttagatgctctttcaaagaaggcatagtcgctcttcacagagctaaaaggaggaatatggagaggctgactcttgcttgtggtggggtggccctgaattcttttgaggacctaagtcctgactgcttgagacatgcaggacttgtatatgagtatacattgggagaagttcacctttattgagaagtgtaacaaccctcgttctgtcacattattgatcaaaggaccaaataagcccacacttagatcaaagatgcagtaagggatggcttgagggctgtcaaaaatgctattgatgatggctgtgtggttccggtgctggtgccgtggaagtggcaatggcagaagccctgaataaatataagctcagtgtaaagggcaaggcacagcttggagtccaagcatttgctgatgtgttgctcgttattcccaaggtgagcccgtggtagcagcagaagcaggcattatgggataacgattgtgtaaagaaacagcttcttcattcctgcactggttgccaccaacattctcttggttgatgagatcatgcgagctggaatcttctctgaaaggttgaattgaagcttcctctgtatctgagtcttgaagactctgcaaagtgatcctgaagaatacagctgtggaatttttgtccaagcttcaaatgagtttcaagggaattttcccatgtgaaaaaaggagagaacactgggcatctgttgaaattcggaagttctgaaattataattacagtattttttaaaaattgcactgaagtgtacacagataaagcggtctttcacccagtgaacagatgttttgctttagcagcagtgacataaaattccatgttaaataagcatatattaccta

SEQ ID NO: 185272 - DNA, 1372 bp, Homo Sapiens
  misc_feature (408)..(416): n is a, c, g, or t
ttggaccatatcttccactcttggcatttccatttgtaaaattattccagaacaaccaactcatctgttttgaagttattgctactctcataatcaattggtgtcaacactggtttgaatattttcctaatcctcctatcaatattcttagcatgatagaaaatgttttggcatttcatgacaaggaactgctgcaacacttcatagatcatgatataacctcccagctatatgcatggcctcttcttgaaactgtgttctcagaagtgctgacaagagaggagtggctgaaattgttcgataatatcttttccaaccatccttccttccttctgatgactgttgtagcctacaacatatgttctagaacgcctctgctcagctgtaatcttaaagatgactttgagnnnnnnnnncaccatcggaataacctggatataaatgttgtgattagacaagtttatcatctcatggagaccacgcctactgacattcatccagacagcatgcttaatgtttttgttgcactgacaaaagggcagtatccagtatttaatcaatatccaaagtttattgtggactatcaaacacaggaacgagaaagaataaggaatgatgaattggattacttaagagagagacagttgaagatatgcaagctaaagtcgaccagcaaagagttgaagatgaagcttggtaccagaaacaggagctgcttcgtaaagctgaagaaacaagaagagaaatgctcttacaagaggaggagaaaatgatacaacaaagacagaggctagctgctgtgaaaagagagctgaaagtaaaggaaatgcacttacaagatgctgcaagaaggcgttttctgaagcttcagcaagatcaacaggaaatggaactaagaagactggatgatgaaattgggagaaaggtatatatgagagatcgagaaattgctgccacagccagagacctagaaatgagacagctggaactcgaatcacaaaagagactttatgagaagaatcttactgaaaatcaagaagctcttgcaaaagaaatgcgagcagatgcagatgcctatagacgaaaagtggatcttgaagaacacatgtttcataagctgatagaagcaggtgaaacccagagccagaaaactcagaagtgattaaagaaaatttggcaagggctgaccaagcatgcctaaataccgactggcagattcagtctttacataaacaaaatgtgatgatctacaacgaaaccaatgttacaaggaagtagcccaactccttagggaaaacagaaggaaagaaatagagattataattgcattggtggaagtgagaagccagaagtggaaagaagctgaaggaaa

SEQ ID NO: 185273 - DNA, 1869 bp, Homo Sapiens
ctttgtacaaaaaagttggtgttgaaggaaactcagtaaaagacagtgctcggattccaccagatggaagtatgggtagtattacctgcatcgcttggaaaggtgatacattagtgcttggagatatggatggaaatttaaatttctgggacttgaaaggcagagtatccagaggaatacccacacaccgaagttgggtgaggaagattcgttttgctcctggtaaaggaaatcaaaaattaatagcgatgtacaatgatggagctgaagtgtgggatactaaagaggttcagatggtgagcagtttaagaagtggcagaaatgtgacctttcgtatattggatgtggactggtgtacgtcagataaagtgatcttggcctcagatgatgggtgcatcagagtcctagagatgtctatgaagtctgcgtgctttagaatggatgaacaagagttaaccgagcctgtgtggtgcccctatctccttgttccaagggcctctcttgccttgaaagccttcttattacaccagccttggaatggacagtattctttggacatttctcatgttgactatccagaaaatgaagaaataaagaatctcctccaagaacagttgaattcattgtctaatgacataaagaaactgttgcttgatccagaattcactctcttgcagaggtgcctgcttgtttcaaggctctatggtgatgaatcggagctgcacttctggactgtcgctgcccactacctgcacagcttatcccaggaaaagtcagccagcacaacagctcctaaagaagctgctcctcgagacaaactgagcaacccactggatatatgctatgacgtgctctgtgaaaatgcctactttcagaaatttcagctagaaagggttaatctgcaggaagtgaaacggtcaacttatgatcatacaaggaaatgtacagaccagctactgctcttgggtcaaacagacagagctgtgcagttgctgttggaaacaagtgcagataaccagcattattactgtgattcactgaaagcctgtttagtcactactgtcacctcgtcaggcccctctcagagcaccattaagttggtggcaacgaatatgattgccaatggcaaattggcagagggcgttcagttgctctgcctgatagataaggctgcagacgcctgccgctacctgcagacatacggcgagtggaatcgggctgcatggctggcaaaagtccgtttgaatcctgaggagtgtgccgatgttttaaggcggtgggttgaccacctttgttctccacaagtcaatcagaaatcaaaggctctcctggttctcctctctctgggctgcttttttagcgtggcagagacgcttcacaggtaaaccgagagttcacatgggctgctcaggcctgcccgtgagcagtcacttcatgttctctcgcggttctagcaggtcatggtactcgatgtgtaaagtgaaaggagaagtatacatttcaggtttgtcaaaaaacccaaaggagaatggaactgtccgtattcattacatcttcattcggtctaggagctatgctagtttcctactaatatgctgatcagacctaacaggcacctagtaaaagggaatttaaaagtcttcagagaattggggtccattcagctttgactagagcaactgagaggaggcccagagagcacggggagaggcgacagaaacatggtgaggtggagacatcccgtctgaaaatctggaagaggacaaccatcactaattgtggagcatttcatttattcaaactaagggaggtagattacgggaatatgacaaagattacttgtcaactctggacaggggtacatgggca

SEQ ID NO: 185274 - DNA, 2173 bp, Homo Sapiens
ttggcggctgtggggcagagaagcgtgaaggcctggctgccgggcaggtgaactctccacggggtctagggcccgcgaaagggttcggaaccgagtcagcgcgccttgcgggcaggattcacgccgctgtgacccggaggtcctcagggggcgaagccccggcctaggcctcgcggagatgcccagctgcggtgcttgtacttgcggcgcggcggccgtccggctcatcacctcctcactcgcctccgcgcagagaggtatttctggtggtcgcattcatatgtcagttttaggaaggcttgggacatttgaaactcagattctgcaaagagctcctcttagatcctttacagaaacaccagcatactttgcctcaaaagatgggataagtaaagatggttctggagatggaaataagaaatcagcaagtgagggaagtagtaagaaatcaggctctgggaattctgggaaaggtggaaaccagctgcgctgtcctaaatgtggcgacttgtgcacacatgtagagacctttgtatcatccacccgttttgtcaagtgtgaaaagtgtcatcatttttttgttgtgctatctgaagcagactcaaagaaaagcataattaaagaacctgaatcagcagcagaagctgtaaaattggcattccaacagaaaccaccacctccccctaagaagatttataactacctcgacaagtatgttgttggccagtcatttgctaagaaggtgctttcagttgctgtgtacaatcattataagagaatatataataatatcccagctaatctgagacagcaagcagaggttgagaagcagacatcattaacaccaagagagttagaaataagaagacgggaggatgagtacagatttacaaaattgcttcagattgctggaattagcccacatggtaatgctttaggagcatcaatgcagcaacaggtaaatcaacaaatacctcaggaaaaacgaggaggtgaagtattggattcttctcatgatgacataaaacttgaaaaaagtaatattttgctgcttggaccaactgggtcaggtaaaactctgctggcacaaaccctagctaaatgccttgatgtcccttttgctatctgtgactgtacaactttgactcaggctggatatgtaggcgaagatattgaatctgtgattgcaaaactactccaagatgccaattataatgtggaaaaagcacaacaaggaattgtctttctggatgaagtagataagattggcagtgtgccaggcattcatcaattacgggatgtaggtggagaaggcgttcagcaaggcttattaaaactactagaaggcacaatagtcaatgttccagaaaagaattcccgaaagctccgtggagaaacagttcaagttgatacaacaaacatcctgtttgtggcatctggtgctttcaatggtttagacagaatcatcagcaggaggaaaaatgaaaagtatcttggatttggaacaccatctaatctgggaaaaggcagaagggctgcagctgctgcagaccttgctaatcgaagtggggaatcgaatactcaccaagacattgaagaaaaagatcggttattgcgtcatgtggaagccagagatctgattgagtttggcatgattcctgagtttgtgggacggttgcctgtggtggttccattgcatagcctagatgagaaaacacttgtacaaatattaactgagccacgaaatgctgttattcctcagtaccaggccttattcagcatggataagtgtgaactgaatgttactgaggatgctttgaaagctatagccagattggcactagaacgaaaaacaggtgcacgaggccttcggtccataatggaaaagctgttactagaaccaatgtttgaagtccctaattctgatatcgtatgtgtggaggttgacaaagaagtagtagaaggaaaaaaggaaccaggatacatccgggctccaacaaaagaatcctctgaagaggagtatgactctggagttgaagaagaaggatggccccgccaagcagatgctgcaaacagctaaactgtcatattgctgtcttgtatatacagcttttccttcttttgtttagatcataattgtctctacagtctgatattaaaggcattggatcta

SEQ ID NO: 185275 - DNA, 2626 bp, Homo Sapiens
  misc_feature (222)..(329): n is a, c, g, or t
  misc_feature (1449)..(1768): n is a, c, g, or t
  misc_feature (2472)..(2525): n is a, c, g, or t
ttggctctgatgttatcgtaagtgatctttgacttacggttttaaaacacatttcttcatttgatgttttgtgcttgactagagtttatatagtgaaattcagaaaccactaatcaaagcagagtaggaggtggtcatgcaaaatggttaagtaaaataacacatcaggtggacttgggttatcagagttcttccttctagctctgttccttaggcaactgnnnnnnnnnnnnnnnnnnnnnnnnnnnnnnnnnnnnnnnnnnnnnnnnnnnnnnnnnnnnnnnnnnnnnnnnnnnnnnnnnnnnnnnnnnnnnnnnnnnnnnnnnnnntttgttccagagtaaaaactcattaaatggtatcattatagaaaacctcccattgagaagtaatactggttttgctctatttttaggagtatatgcaggaaaaatccaaagaaagcggccaaatgttgcgacaatttaagaagacaacattcattaggataaaatggggggaaggattattattcatgttattttccctgcccaagactttatttaaccctggactccgtttacacagacaaagtgacatcagaaggctgagcacttatctggatcatttggtcagtttggtaattcctgctccacacccctattttcctcttaataatacgtttgggtgaagacaaattagtgtttagtaattgcatcatctctgtgcttacctatacaaacataagtttattttatatgcccagatgtctacagagaccctttttgtaaatgtcaaggacatttggatttacttttacagaatattgaaaagataagacaaattataaataagttctaaaacataaatttaattcatctctgcatagtgatttttgaatttgattcaaagggaaattattgcagaagaatgcctttccctcattttataactttaaaaacttggattaaccactcaatgtccactttctttgacttacagtataaccatgtagccaattgtggcccactaaaatctacagaagttaatgtgggtcaccattttggtcagaagcatacattcctgtcagacaactagttgtctgacagaaatgttaggcttcatgtatgttaccccagtactgttagaaacatttgtactaggttataagatctttctgtgacaggtaacaaatttggggaagacagcacaatcttcttgaatgtagctcttgggaatgcattattacatccatttctgtaacataataatatgttgcatgcagttatattttctatttagtctgtatattttgttcttcatagtctgttttttctagcatgcttgatttaggagagaataaagggctatataataataaatccagatttccggataagaatattgcctggttaaaattctgcattgcttaaagacacccatgtttaagatttttcatcactaacatannnnnnnnnnnnnnnnnnnnnnnnnnnnnnnnnnnnnnnnnnnnnnnnnnnnnnnnnnnnnnnnnnnnnnnnnnnnnnnnnnnnnnnnnnnnnnnnnnnnnnnnnnnnnnnnnnnnnnnnnnnnnnnnnnnnnnnnnnnnnnnnnnnnnnnnnnnnnnnnnnnnnnnnnnnnnnnnnnnnnnnnnnnnnnnnnnnnnnnnnnnnnnnnnnnnnnnnnnnnnnnnnnnnnnnnnnnnnnnnnnnnnnnnnnnnnnnnnnnnnnnnnnnnnnnnnnnnnnnnnnnnnnnnnnnnnnnnnnnnnnnnnnnnnnnnnnnnnnnngtatcaaccaacaaatgttaccaagataacgtgacttcatgagggagaatgtcactattaatttatcataccatttccaaaaagggctttgggcttttcacataaaattgagacagtgtatatttaatctaatttaaattttaaagagatactggtattttgaaaatgcaacctatatatattcttaatatccttttaagaatatggagatgaagattgttttctccaattttctgtgccattttaaatttaactttgacatccagctatagacagaaataataagccaccctgggtgtaaacttgattttctttattgagatgtatcatgtattgaatgagtgaaccagaaaattagaagatggtcaaaaaaagtccaagttaccaattttttaaaatttataggcaaagtatcaaattgtcttcttaatatgataaactgtgctttatcattctgaaaactcaggatacagcttattcatagcattgtgggtctctccagtaagaaagatgctaaaagttttgtgcactttttgtgtgtgtaatgcaaattagttaaaacaaatagttttggagaaagttaaaactagctttagagtaaggatgagaaacttgagtgtttttaatttaaagataaaagcctgtgttttacacattcttttttggtgttcatagcttcttctcatacaggtgccagacactgnnnnnnnnnnnnnnnnnnnnnnnnnnnnnnnnnnnnnnnnnnnnnnnnnnnnnngagtggaatgttcattaatgtaaattgtatttatttttatacttttattttcactagttttgcttctaggcaaaaagcaaaataaacttttcatcttatag

SEQ ID NO: 185276 - DNA, 1313 bp, Homo Sapiens
  misc_feature (231)..(242): n is a, c, g, or t
  misc_feature (773)..(833): n is a, c, g, or t
ttgggtttcaatatattcagtatactttgtccttaatgctgcttctgttaacagtgatctctttctttttttcattcttatatcttcattagttcatcataaatctgtccagttgaggcctcaggaccacggcatgatttcatgactccgaagtattttacagaaacattttttaaataagggaaatattttatataccagatggttcacaagtgatggctcatagctagnnnnnnnnnnnncttctaaaaaatgtcaggtttttaaaatcatttaccttattaaaatgaaaagtgccatacttaacttttaaaggaaagacctgacttgctttttctctatttagactgtttttgtaccttactaatctttaaactatcaggaaaaaaaccaaaactttataccaatgatttagtaattttgaggcatagggtagcttacgtagtggaggatgtgccaaatattctcttcaaatgccaccttctcaatttataactaaaatagtgttatctgactaattcctctgaattttgatgtaagatctatataggcccccaaaatgatcgtagtacatgccagtcatttctcagtgaaataaatacaataccagagtacattatgggttttattgctttcttttatggtagacctgttaatggggaaaaaatacatcaaatcaaatagaatcttatatctgtatgttaaaatagagcacttacctgaagtcagtggcctggatcatagccctggatcatttcccagtctgtcctgtnnnnnnnnnnnnnnnnnnnnnnnnnnnnnnnnnnnnnnnnnnnnnnnnnnnnnnnnnnnnncaagtggctgcagtagatgatggctgagagcccttcctgttcccagatgccttggtccaaagaccccacccctctgctggtcctgccaacgtgttggtgctataagctgcttcagatataaaattggtttatctataatgtttgttcatttaatagcttctaaaaggcctttttgttatacagtgctttttttctagttttatggacttgattactgtaataatgtcttgtttttagccatgtaactacaaacagatattctcttgatgtcttagtaaatttgcatttgatatatcattgatgagattttgttgttatgtaatattctttggctacgcatctgtccagcatcttattaaccataatactgtgatcattatttggaaatatgtcctatggaaagaataaaagcatgtacttcacagctagcatgttcacagatttgaaaaaagtttcattaaaagcactattgctttctgt

SEQ ID NO: 185277 - DNA, 1193 bp, Homo Sapiens
  misc_feature (332)..(392): n is a, c, g, or t
  misc_feature (923)..(933): n is a, c, g, or t
caaagaatattactaacaacaaaatctcatcaatgatatatcaaatgcaaatttactaagacatcaagagaatatctggtttgtagttacatggctaaaaacaagacattattacagtaatcaagtccataaaactagaaaaaaagcactgtataacaaaaaggccttttagaagctattaaatgaacaaacattatagataaaccaattttatatctgaagcagcttatagcaccaacacgttggcaggaccagcagaggggtggggtctttggaccaaggcatctgggaacaggaagggctctcagccatcatctactgcagccacttgnnnnnnnnnnnnnnnnnnnnnnnnnnnnnnnnnnnnnnnnnnnnnnnnnnnnnnnnnnnnnacaggacagactgggaaatgatccagggctatgatccaggccactgacttcaggtaagtgctctattttaacatacagatataagattctatttgatttgatgtattttttccccattaacaggtctaccataaaagaaagcaataaaacccataatgtactctggtattgtatttatttcactgagaaatgactggcatgtactacgatcattttgggggcctatatagatcttacatcaaaattcagaggaattagtcagataacactattttagttataaattgagaaggtggcatttgaagagaatatttggcacatcctccactacgtaagctaccctatgcctcaaaattactaaatcattggtataaagttttggtttttttcctgatagtttaaagattagtaaagtacaaaaacagtctaaatagagaaaaagcaagtcaggtctttcctttaaaagttaagtatggcacttttcattttaataaggtaaatgattttaaaaacctgacattttttagaagnnnnnnnnnnnctagctatgagccatcacttgtgaaccatctggtatataaaatatttcccttatttaaaaaatgtttctgtaaaatacttcggagtcatgaaatcatgccgtggtcctgaggcctcaactggacagatttatgatgaactaatgaagatataagaatgaaaaaaagaaagagatcactgttaacagaagcagcattaaggacaaagtatactgaatatattgaaacagcttcatggaaatgaagccaagaagtttgtaca

SEQ ID NO: 185278 - DNA, 930 bp, Homo Sapiens
ttggcggcgttggcgcgtgtgccgccgctttcctcctccatctcttttcctccgcctccgccggcgcgatggcgaagccgctgacggacagcgagaagcggaagcagatcagcgtgcgcggcctggcggggctaggcgacgtggccgaggtgcggaagagcttcaaccggcacttgcacttcacgctggtcaaggaccgcaatgtggccacgccccgcgactacttcttcgcgctggcgcacacggtgcgcgaccacctcgtgggccgctggatccgcacgcagcagcactactacgagcgcgaccccaagcgcatttattatctttccctggaattctacatgggtcgcacgctgcagaacacgatggtgaacctgggccttcagaatgcctgcgatgaagccatctatcagttggggttagacttggaggaactcgaggagatagaagaagatgctggccttgggaatggaggcctggggaggctggcagcgtgtttccttgactcaatggctaccttgggcctggcagcatacggctatggaatccgctatgaatttgggatttttaaccagaagattgtcaatggctggcaggtagaggaggccgatgactggctgcgctacggcaacccctgggagaaagcgcggcctgagtatatgcttcccgtgcacttctacggacgcgtggagcacacccccgacggcgtgaagtggctggacacacaggtggtgctggccatgccctacgacaccccagtgcccggctacaagaacaacaccgtcaacaccatgcggctgtggtccgccaaggctcccaacgacttcaagctgcaggacttcaacgtgggagactacatcgaggcggtcctggaccggaacttggctgagaacatctccagggtcctgtatccaaatgataacttctttg

SEQ ID NO: 185279 - DNA, 1763 bp, Homo Sapiens
gccaactttgtacaaaaaagttggcaaagcctccaagtttggctccacccgtggtgcaggaactgtgtttgatgccttcccggatcaggtggccatccagctgaatgatactcaccctgcactcgcgatccctgagctgatgaggatttttgtggatattgaaaaactgccctggtccaaggcatgggagctcacccagaagaccttcgcctacaccaaccacacagtgctcccggaagccctggagcgctggcccgtggacctggtggagaagctgctccctcgacatttggaaatcatttatgagataaatcagaagcatttagatagaattgtggccttgtttcctaaagatgtggaccgtctgagaaggatgtctctgatagaagaggaaggaagcaaaaggatcaacatggcccatctctgcattgtcggttcccatgctgtgaatggcgtggctaaaatccactcagacatcgtgaagactaaagtattcaaggacttcagtgagctagaacctgacaagtttcagaataaaaccaatgggatcactccaaggcgctggctcctactctgcaacccaggacttgcagagctcatagcagagaaaattggagaagactatgtgaaagacctgagccagctgacgaagctccacagcttcctgggtgatgatgtcttcctccgggaactcgccaaggtgaagcaggagaataagctgaagttttctcagttcctggagacggagtacaaagtgaagatcaacccatcctccatgtttgatgtccaggtgaagaggatacatgagtacaagcgacagctcttgaactgtctgcatgtgatcacgatgtacaaccgcattaagaaagaccctaagaagttattcgtgccaaggacagttatcattggtggtaaagctgccccaggatatcacatggccaaaatgatcataaagctgatcacttcagtggcagatgtggtgaacaatgaccctatggttggaagcaagttgaaagtcatcttcttggagaactacagagtatctcttgctgaaaaagtcattccagccacagatctgtcagagcagatttccactgcaggcaccgaagcctcggggacaggcaatatgaagttcatgctaaatggggccctaactatcgggaccatggatggggccaatgtggaaatggcagaagaagctggggaagagaacctgttcatctttggcatgaggatagatgatgtggctgctttggacaagaaagggtacgaggcaaaagaatactatgaggcacttccagagctgaagctggtcattgatcaaattgacaatggctttttttctcccaagcagcctgacctcttcaaagatatcatcaacatgctattttatcatgacaggtttaaagtctttgcagactacgaagcctatgtcaagtgtcaagataaagtgagtcagctgtacatgaatccaaaggcctggaacacaatggtactcaaaaacatagctgcctcggggaaatctccagtgaccgaacaattaaagaatatgcccaaaacatctggaaacgtggaaccttcagatctaaagatttctctatcccatgaatctaacaaagtcaatgggaaattgaactctagatttgtctctagaaaacatagccttcttactggaactgaaccatttttacaacattcactggattttgttttgttagctataatctataaaagttgagtactcctgggaatgggggagggaa

SEQ ID NO: 185280 - DNA, 1705 bp, Homo Sapiens
ttggcagcccagcgcctccggccgcacttccagctctctgcgcagcccgccgcgcagcccgccgccccagccatggcgaagcccctgacggaccaggagaagcggcggcagatcagcatccgcggcatcgtgggcgtggagaacgtggcagagctgaagaagagtttcaaccggcacctgcacttcacgctggtcaaggaccgcaacgtggccaccacccgcgactactacttcgcgctggcgcacacggtgcgcgaccacctggtggggcgctggatccgcacgcagcagcactactacgacaagtgccccaagagggtatattacctctctctggaattttacatgggccgaacattacagaacaccatgatcaacctcggtctgcaaaatgcctgtgatgaggccatttaccagcttggattggatatagaagagttagaagaaattgaagaagatgctggacttggcaatggtggtcttgggagacttgctgcctgcttcttggattccatggcaaccctgggacttgcagcctatggatacggcattcggtatgaatatgggattttcaatcagaagatccgagatggatggcaggtagaagaagcagatgattggctcagatatggaaacccttgggagaagtcccgcccagaattcatgctgcctgtgcacttctatggaaaagtagaacacaccaacaccgggaccaagtggattgacactcaagtggtcctggctctgccatatgacacccccgtgcccggctacatgaataacactgtcaacaccatgcgcctctggtctgctcgggcaccaaatgactttaacctcagagactttaatgttggagactacattcaggctgtgctggaccgaaacctggccgagaacatctcccgggtcctctatcccaatgacaatttttttgaagggaaggagctaagattgaagcaggaatactttgtggtggctgcaaccttgcaagatatcatccgccgtttcaaagcctccaagtttggctccacccgtggtgcaggaactgtgtttgatgccttcccggatcaggtggccatccagctgaatgacactcaccctgcactcgcgatccctgagctgatgaggatttttgtggatattgaaaaactgccctggtccaaggcatgggagctcacccagaagaccttcgcctacaccaaccacacagtgctcccggaagccctggagcgctggcccgtggacctggtggagaagctgctccctcgacatttggaaatcatttatgagataaatcagaagcatttagatagaattgtggccttgtttcctaaagatgtggaccgtctgagaaggatgtctctgatagaagaggaaggaagcaaaaggatcaacatggcccatctctgcattgtcggttcccatgctgtgaatggcgtggctaaaatccactcagacatcgtgaagactaaagtattcaaggacttcagtgagctagaacctgacaagtttcagaataaaaccaatgggatcactccaaggcgctggctcctactctgcaacccaggacttgcagagctcatagcagagaaaattgggagaagactatgtgaaagacctgagccagctgacgaaactcccagcttcctgggtagatgatgtcttcctccgggaactcgccaggtgaagcaggagataagctgaa

SEQ ID NO: 185281 - DNA, 1714 bp, Homo Sapiens
ttggcgctctctgtgttccaatcgcccggtgcggtggtgcagggtctcgggctagtcatggcgtccccgtctcggagactgcagactaaaccagtcattacttgtttcaagagcgttctgctaatctacacttttattttctggatcactggcgttatccttcttgcagttggcatttggggcaaggtgagcctggagaattacttttctcttttaaatgagaaggccaccaatgtccccttcgtgctcattgctactggtaccgtcattattcttttgggcacctttggttgttttgctacctgccgagcttctgcatggatgctaaaactgtatgcaatgtttctgactctcgtttttttggtcgaactggtcgctgccatcgtaggatttgttttcagacatgagattaagaacagctttaagaataattatgagaaggctttgaagcagtataactctacaggagattatagaagccatgcagtagacaagatccaaaatacgttgcattgttgtggtgtcaccgattatagagattggacagatactaattattactcagaaaaaggatttcctaagagttgctgtaaacttgaagattgtactccacagagagatgcagacaaagtaaacaatgaaggttgttttataaaggtgatgaccattatagagtcagaaatgggagtcgttgcaggaatttcctttggagttgcttgcttccaactgattggaatctttctcgcctactgcctctctcgtgccataacaaataaccagtatgagatagtgtaacccaatgtatctgtgggcctattcctctctacctttaaggacatttagggtcccccctgtgaattagaaagttgcttggctggagaactgacaacactacttactgatagaccaaaaaactacaccagtaggttgattcaatcaagatgtatgtagacctaaaactacaccaataggctgattcaatcaagatccgtgctcgcagtgggctgattcaatcaagatgtatgtttgctatgttctaagtccaccttctatcccattcatgttagatcgttgaaaccctgtatccctctgaaacactggaagagctagtaaattgtaaatgaagtaatactgtgttcctcttgactgttatttttcttagtagggggcctttggaaggcactgtgaatttgctattttgatgtagtgttacaagatggaaaattgattcctctgactttgctattgatgtagtgtgatagaaaattcacccctctgaactggctccttcccagtcaaggttatctggtttgattgtataatttgcaccaagaagttaaaatgttttatgactctctgttctgctgacaggcagagagtcacattgtgtaatttaatttcagtcagtcaatagatggcatccctcatcagggttgccagatggtgataacagtgtaaggccttgggtctaaggcatccacgactggaagggactactgatgttctgtgatacatcaggtttcagcacacaacttacatttctttgcctccaaattgaggcatttattatgatgttcatactttccctcttgtttgaaagtttctaattattaaatggtgtcggaattgttgtattttccttagaattcagtggaacttatcttcattaaatttagctggtaccaggttgatatgacttgtcatattatggtca

SEQ ID NO: 185282 - DNA, 1753 bp, Homo Sapiens
  misc_feature (320)..(334): n is a, c, g, or t
gaaaaccagaaatcaacacacttacaacaaatagaaagatcaaagaaataaatgatatatgtgtagaatacatattccagtattagtctttgatatttttaagataaaccacaacttaacacactgatgttttgaggagtatctgcaaactaattttttaaaaattgtgaaatgattcaacacatcatctattacataagaaattttaaaaacaagttcatgttggaaacagtctcaaaggaagaaatctgaaaataaagctatgggctggccctgggcaggggaattacaaaggaggaaaccactctatcaacaaaagnnnnnnnnnnnnnnnggccagttactttgtatcacacaaacctcagatttctcacacataccacataggcataaaaccatcaaacttttgaatatatctggacaaagatcttttacatgcaaaaataaataaaagtgtatcagaaatgtaaatcaaattctaccaactgcttacagggatcataggacacactaaatgttaccccaatcccccctttccacctaggtaatgagaagtaatttcttagcctcataaatcatattttgttagattagtttctataatgctcataatgccaaatagctcaatgtatataattaaaatagattctccctaggaaaacacacttttatttattttgtcagaaccatacgtttctatactggaaaaacccaaacaacttactctactccaaatccttgttgattccatggttgcccgtatactccataaggcggtacttgccacccatttgccatatactgtccatactgttgtgggtttccatacacttggctccattggccccattgactatagtcaacctaggaaaaagcaaagtattgttttagggaacacataagaaacaccgtatatgaagaaagagtgggagacaaggaagagaaaaactaagtaagcacccttatgtgaataggactctgttatttatcattgtctaagtttattggggtggtgacacctgtgaaaagaaagtattaagattcagttaataccgcaaataatcaattttgaaatacaatcaactgaaagtagctatatgctttattttattgttcattttacagagtttccaaagcttttatgtgacatgtaagatggaaaccttaaagaatgctatgaaaaatcgaattacctgttggaagtttttagtcatatcaggagattctttaccccaatagcatttaaccacatgtccttcaatcgtagtaccgttcaccgaaacaatggcatgggctgcactttcatgggttgaaaatctgacaaatgaatagcccttttctgggaaaactcttatttccataatttgtccaaatggtgagaatgtctgtctcataagctgatctgttaacccagacgcaattcctccacagtacacagtacaattttttggacttgactggtttactacatcttcaaatctcaactgcttagtgttgttttcttgtgtacttttaggtgcaggtggtttacgagtggcccaattggttcggatttgacgaccacccaaccactgaccgcccatatgcacaatcgcattttctgcatccagtttgttataaaaagatacaaaaccatagcctttggattttccagttgccatgtctttaactacccgggcatccgatattttaccaaagggggcaaatgctgatttgatatcttctgttgtaatttctggactcaaatccccaa

SEQ ID NO: 185283 - DNA, 1592 bp, Homo Sapiens
tgagcaatgctttctttaaaaaagccaactttgtacaaaaaagttggcctcatcactgttcctgtgctcacagtcatcaattatagaccccacaacatgcgccctgaagacagaatgttccatatcagagctgtgatcttgagagccctctccttggctttcctgctgagtctccgaggagctggggccatcaaggcggaccatgtgtcaacttatgccgcgtttgtacagacgcatagaccaacaggggagtttatgtttgaatttgatgaagatgagatgttctatgtggatctggacaagaaggagaccgtctggcatctggaggagtttggccaagccttttcctttgaggctcagggcgggctggctaacattgctatattgaacaacaacttgaataccttgatccagcgttccaaccacactcaggccaccaacgatccccctgaggtgaccgtgtttcccaaggagcctgtggagctgggccagcccaacaccctcatctgccacattgacaagttcttcccaccagtgctcaacgtcacgtggctgtgcaacggggagctggtcactgagggtgtcgctgagagcctcttcctgcccagaacagattacagcttccacaagttccattacctgacctttgtgccctcagcagaggacttctatgactgcagggtggagcactggggcttggaccagccgctcctcaagcactgggaggcccaagagccaatccagatgcctgagacaacggagactgtgctctgtgccctgggcctggtgctgggcctagtcggcatcatcgtgggcaccgtcctcatcataaagtctctgcgttctggccatgacccccgggcccaggggaccctgtgaaatactgtaaaggtgggaatgtaaagaggaggccctaggatttgtagaatgtaaggaagggaggaaaaattcaatctgataagtgttcattgatcttctaatgggttaaaagcattcagccacataacaacaacaacaccgataactaactgagtagttaatatggtcaggcgctattctgaggatttacatttattaactcactttattctcacacatagtctttgaggtaggtactattattttcactatttcacatgagagatacttacatctttttacatacacagagactttaagcactttgatcaagttcccacagctatgaagtagtagggctagcttccaatccagaaagtctggatccaagactgtttatccactgtcctattcaccctattttgtgaaggaaaagaccaagttcaaattctccagagtccattgccaaataatggagtcagatctatatttctatacataattacaacacagtgtggtgggtgcctgtaactacttactgtctctacttggactcattccatggcaatgttcacacaaaaaatgcccctccagagatcttacaggtttctatttatcataacactcaccatgctttatatttttatatgttttgggaattctcttagcattagacagtgaacttccatgcagatgaccacatctaattcattattattattgttattcatgct

SEQ ID NO: 185284 - DNA, 1384 bp, Homo Sapiens
actttgtacaaaaaagttggcggcctgggagaagcagcagagaaagacattcacggcatggtgtaactcccacctccggaaggcggggacacagatcgagaacatcgaagaggacttccgggatggcctgaagctcatgctgctgctggaggtcatctcaggtgaacgcttggccaagccagagcgaggcaagatgagagtgcacaagatctccaacgtcaacaaggccctggatttcatagccagcaaaggcgtcaaactggtgtccatcggagccgaagaaatcgtggatgggaatgtgaagatgaccctgggcatgatctggaccatcatcctgcgctttgccatccaggacatctccgtggaagagacttcagccaaggaagggctgctcctgtggtgtcagagaaagacagccccttacaaaaatgtcaacatccagaacttccacataagctggaaggatggcctcggcttctgtgctttgatccaccgacaccggcccgagctgattgactacgggaagctgcggaaggatgatccactcacaaatctgaatacggcttttgacgtggcagagaagtacctggacatccccaagatgctggatgccgaagacatcgttggaactgcccgaccggatgagaaagccatcatgacttacgtgtctagcttctaccacgccttctctggagcccagaaggcggagacagcagccaatcgcatctgcaaggtgttggccgtcaaccaggagaacgagcagcttatggaagactacgagaagctggccagtgatctgttggagtggatccgccgcacaatcccgtggctggagaaccgggtgcccgagaacaccatgcatgccatgcaacagaagctggaggacttccgggactaccggcgcctgcacaagccgcccaaggtgcaggagaagtgccagctggagatcaacttcaacacgctgcagaccaagctgcggctcagcaaccggcctgccttcatgccctctgagggcaggatggtctcggacatcaacaatgcctggggctgcctggagcaggtggagaagggctatgaggagtggttgctgaatgagatccggaggctggagcgactggaccacctggcagagaagttccggcagaaggcctccatccacgaggcctggactgacggcaaagaggccatgctgcgacagaaggactatgagaccgccactctctcggagatcaaggctctgctcaagaagcatgaggccttcgagagtgacctgggctgcccaccaggaccgtgtggagcagattgccgccatcgcacaggagctcaatgagctgggactattatgactcacccagtgtcaacgcccgttgccaaagatctgtga

SEQ ID NO: 185285 - DNA, 2480 bp, Homo Sapiens
  misc_feature (2302)..(2337): n is a, c, g, or t
actttgtacaaaaaagttggctacgggaagctgcggaaggatgatccactcacaaatctgaatacggcttttgacgtggcagagaagtacctggacatccccaagatgctggatgccgaagacatcgttggaactgcccgaccggatgagaaagccatcatgacttacgtgtctagcttctaccacgccttctctggagcccagaaggcggagacagcagccaatcgcatctgcaaggtgttggccgtcaaccaggagaacgagcagcttatggaagactacgagaagctggccagtgatctgttggagtggatccgccgcacaatcccgtggctggagaaccgggtgcccgagaacaccatgcatgccatgcaacagaagctggaggacttccgggactaccggcgcctgcacaagccgcccaaggtgcaggagaagtgccagctggagatcaacttcaacacgctgcagaccaagctgcggctcagcaaccggcctgccttcatgccctctgagggcaggatggtctcggacatcaacaatgcctggggctgcctggagcaggtggagaagggctatgaggagtggttgctgaatgagatccggaggctggagcgactggaccacctggcagagaagttccggcagaaggcctccatccacgaggcctggactgacggcaaagaggccatgctgcgacagaaggactatgagaccgccaccctctcggagatcaaggccctgctcaagaagcatgaggccttcgagagtgacctggctgcccaccaggaccgtgtggagcagattgccgccatcgcacaggagctcaatgagctggactattatgactcacccagtgtcaacgcccgttgccaaaagatctgtgaccagtgggacaatctgggggccctaactcagaagcgaagggaagctctggagcggaccgagaaactgctggagaccattgaccagctgtacttggagtatgccaagcgggctgcacccttcaacaactggatggagggggccatggaggacctgcaggacaccttcattgtgcacaccattgaggagatccagggactgaccacagcccatgagcagttcaaggccaccctccctgatgccgacaaggagcgcctggccatcctgggcatccacaatgaggtgtccaagattgtccagacctaccacgtcaatatggcgggcaccaacccctacacaaccatcacgcctcaggagatcaatggcaaatgggaccacgtgcggcagctggtgcctcggagggaccaagctctgacggaggagcatgcccgacagcagcacaatgagaggctacgcaagcagtttggagcccaggccaatgtcatcgggccctggatccagaccaagatggaggagatcgggaggatctccattgagatgcatgggaccctggaggaccagctcagccacctgcggcagtatgagaagagcatcgtcaactacaagccaaagattgatcagctggagggcgaccaccagctcatccaggaggcgctcatcttcgacaacaagcacaccaactacaccatggagcacatccgtgtgggctgggagcagctgctcaccaccatcgccaggaccatcaatgaggtagagaaccagatcctgacccgggatgccaagggcatcagccaggagcagatgaatgagttccgggcctccttcaaccactttgaccgggatcactccggcacactgggtcccgaggagttcaaagcctgcctcatcagcttgggttatgatattggcaacgacccccagggagaagcagaatttgcccgcatcatgagcattgtggaccccaaccgcctgggggtagtgacattccaggccttcattgacttcatgtcccgcgagacagccgacacagatacagcagaccaagtcatggcttccttcaagatcctggctggggacaagaactacattaccatggacgagctgcgccgcgagctgccacccgaccaggctgagtactgcatcgcgcggatggccccctacaccggccccgactccgtgccaggtgctctggactacatgtccttctccacggcgctgtacggcgagagtgacctctaatccaccccgcccggccgccctcgtcttgtgcgccgtgccctgccttgcacctccgccgtcgcccatctcctgcctgggttcggtttcagctcccagcctccacccgggtgagctggggcccacgtggcatcgatcctccctgcccgcgaagtgacagtttacaaaattattttctgcnnnnnnnnnnnnnnnnnnnnnnnnnnnnnnnnnnnnctacatattttattatagaaaaagtattttttctccaccagacaaatggaaaaaaagaggaaagattaactatttgcaccgaaatgtcttgttttgttgcgacataggaaaataccaagcacaaagtatattccatccgtttt

SEQ ID NO: 185286 - DNA, 2791 bp, Homo Sapiens
ttggcgagaacattgaggacgactgggaccgggacctgctgctggacccggcctgggagaagcagcagcgcaagaccttcacggcatggtgcaactcccacctgcggaaggcaggcacacagatcgagaacattgatgaggacttccgagacgggctcaagctcatgctgctcctggaggtcatatcaggggagcggttacctaagccggagcgggggaagatgagagtgcacaaaatcaacaatgtgaacaaagcgctggctttattgccagcaaaggtgtcaagctggtctccatcggggcagaagagattgtggacggcaacgcaaagatgaccctgggaatgatctggaccatcatccttaggttcgccatccaggacatctccgtggaagagacctcggccaaggaagggctccttctctggtgccagagaaagacagccccgtataagaacgtcaatgtgcagaacttccacatcagctggaaggatggtcttgccttcaatgccctgatccaccggcacagaccagagctgattgagtatgacaagctgaggaaggacgaccctgtcaccaacctgaacaatgccttcgaagtggctgagaaatacctcgacatccccaagatgctggatgcagaggacatcgtgaacacggcccggcccgacgagaaggccataatgacctatgtgtccagcttctaccatgccttttcaggagcgcagaaggctgaaactgccgccaaccggatctgtaaggtgctggctgtcaaccaagagaacgagcacctgatggaggactacgagaagctggccagcgacctcctggagtggatccggcgcaccatcccctggctggaggaccgtgtgccccaaaagactatccaggagatgcagcagaagctggaggacttccgcgactaccggcgtgtgcacaagccgcccaaggtgcaggagaagtgccagctggagatcaacttcaacacgctgcagaccaagctgcgcctcagcaaccggcccgccttcatgccctccgagggcaagatggtctcggacatcaacaatggctggcagcacttggagcaggctgagaagggctacgaggagtggctgctgaatgagatccgcaggctggagcggctcgaccacctggcagagaagttccggcagaaggcctccatccacgaggcctggactgacgggaaggaagccatgctgaagcaccgggactacgagacggccacactatcggacatcaaagccctcattcgcaagcacgaggccttcgagagcgacctggctgcgcaccaggaccgcgtggagcagatcgccgccattgcccaggagctcaacgagctggattactacgactcccacaatgtcaacacccggtgccagaagatctgtgaccagtgggacgccctcggctctctgacacatagtcgcagggaagccctggagaaaacagagaagcagctggaggccatcgaccagctgcacctggaatacgccaagcgcgcggcccccttcaacaactggatggagagcgccatggaggacctccaggacatgttcatcgtccataccatcgaggagattgagggcctgatctcagcccatgaccagttcaagtccaccctgccggacgccgatagggagcgcgaggccatcctggccatccacaaggaggcccagaggatcgctgagagcaaccacatcaagctgtcgggcagcaacccctacaccaccgtcaccccgcaaatcatcaactccaagtgggagaaggtgcagcagctggtgccaaaacgggaccatgccctcctggaggagcagagcaagcagcagtccaacgagcacctgcgccgccagttcgccagccaggccaatgttgtggggccctggatccagaccaagatggaggagatcgggcgcatctccattgagatgaacgggaccctggaggaccagctgagccacctgaagcagtatgaacgcagcatcgtggactacaagcccaacctggacctgctggagcagcagcaccagctcatccaggaggccctcatcttcgacaacaagcacaccaactataccatggagcacatccgcgtgggctgggagcagctgctcaccaccattgcccgcaccatcaacgaggtggagaaccagatcctcacccgcgacgccaagggcatcagccaggagcagatgcaggagttccgggcgtccttcaaccacttcgacaaggatcatggcggggcgctggggcccgaggagttcaaggcctgcctcatcagcctgggctacgacgtggagaacgaccggcagggtgaggccgagttcaaccgcatcatgagcctggtcgaccccaaccatagcggccttgtgaccttccaagccttcatcgacttcatgtcgcgggagaccaccgacacggacacggctgaccaggtcatcgcttccttcaaggtcttagcaggggacaagaacttcatcacagctgaggagctgcggagagagctgccccccgaccaggccgagtactgcatcgcccgcatggcgccataccagggccctgacgccgtgcccggtgccctcgactacaagtccttctccacggccttgtatggcgagagcgacctgtgaggccccagagacctgacccaacacccccgacggcctccaggaggggcctgggcagccccacagtcccattcctccactctgtatctatgcaaagcactctctgcagtcctccggggtgggtgggtgggcagggaggggctgggg

SEQ ID NO: 185287 - DNA, 1212 bp, Homo Sapiens
  misc_feature (804)..(839): n is a, c, g, or t
  misc_feature (990)..(998): n is a, c, g, or t
ttaatacttgatatgctacataggtgtcagccattgttaatcattgttgtcattatagttattatcaacatgattatttgctctaagaggaactcaggcatctgcagggtgtggggaaccctgagctgggtctcccctgttgggtgttgtgtccccatcatacccttaggacaacccaggttaggtcagggggatgtgcccttctcttccagccataggctgctctgagcccccagggtcttcagtccatatgagatattcccagcaggccatgggctgacaggcctgggtttggctgttccctccagggagaagcagaatttgcccgcatcatgagcattgtggaccccaaccgcctgggggtagtgacattccaggccttcattgacttcatgtcccgcgagacagccgacacagatacagcagaccaagtcatggcttccttcaagatcctggctggggacaagaactacattaccatggacgagctgcgccgcgagctgccacccgaccaggctgagtactgcatcgcgcggatggccccctacaccggccccgactccgtgccaggtgctctggactacatgtccttctccacggcgctgtacggcgagagtgacctctaatccaccccgcccggccgccctcgtcttgtgcgccgtgccctgccttgcacctccgccgtcgcccatctcctgcctgggttcggtttcagctcccagcctccacccgggtgagctggggcccacgtggcatcgatcctccctgcccgcgaagtgacagtttacaaaattattttctgcnnnnnnnnnnnnnnnnnnnnnnnnnnnnnnnnnnnnctacatattttattatagaaaaagtattttttctccaccagacaaatggaaaaaaagaggaaagattaactatttgcaccgaaatgtcttgttttgttgcgacataggaaaataaccaagcacaaagttatattccatcctttttactgannnnnnnnncttctatctgttccatctgctgtattcatttctccaaatctcatgtccattttggtgtgggagtcggggtagggggtactcttgtcaaaaggcacattggtgcatgtgtgtttgctagctcacttgtccatgaaaatattttatgatattaaagaaaatcttttgaattggctgtttttttaaggaagagaatttatgtgggcttcttcatttt

SEQ ID NO: 185288 - DNA, 2486 bp, Homo Sapiens
  misc_feature (1053)..(1088): n is a, c, g, or t
ttggatggcttcgatgttagccgggacccgactcaggtgaagatcgatgctatagaagacaaacaagggaaggttttttttccttttgcatcatggctcaatttggaggacagaagaatccgccatgggctactcagtttacagccactgcagtatcacagccagctgcactgggtgttcaacagccatcactccttggagcatctcctaccatttatacacagcaaactgcattggcagcagcaggccttaccacacaaactccagcaaactatcagttaacacaaactgctgcattgcagcaacaagccgcagctgcagcagctgcattacaacagcaatattcacaacctcagcaggccctgtatagtgtgcaacaacagttacagcaaccccagcaaaccctcttaacacagccagctgttgcactgcctacaagccttagcctgtctactcctcagccaacagcacaaataactgtatcatatccaacaccaaggtccagtcaacagcaaacccagcctcagaagcagcgtgttttcacaggggtggttacaaaactacatgatacatttggatttgtggatgaagatgtattctttcagcttagtgctgtcaaagggaaaaccccccaagtaggtgacagagtattggttgaagctacttataatcctaatatgccttttaaatggaatgcacagagaattcaaacactaccaaatcagaatcagtcgcaaacccagccattactgaagactcctcctgctgtacttcagccaattgcaccacagacaacatttggtgttcagactcagccccagccccagtcactgctgcaggcacagatttcagcagcttctattacaccactattgcagactcaaccacagcccttattacagcagcctcagcaaaaagctggtttattgcagcctcctgttcgtatagtttcacagccacaaccggcacgacgattagatcccccatcccgattttcaggaagaaatgacagaggggatcaagtgcctaacagaaaagatgatcgaagtcgtnnnnnnnnnnnnnnnnnnnnnnnnnnnnnnnnnnnntcacctcagaggaaacgttcccgggaaagatctccacgaagagagcgagagcgatcacctcggagagttcgacgtgttgttccacgttacacagttcagttttcaaagttttctttagattgtcccagttgtgacatgatggaactaaggcgccgttatcaaaatttgtatatacctagtgacttttttgatgctcaatttacatgggtggatgctttccctttgtcaagaccatttcagctgggaaattactgcaatttttatgtaatgcacagagaagtagagtccttagaaaaaaatatggccattcttgatccaccagatgctgaccacttatacagtgcaaaggtaatgctgatggctagccctagtatggaagatttatatcataagtcatgtgctcttgctgaggacccacaagaacttcgagatggattccaacatcctgctagacttgttaagtttttagtgggcatgaaaggcaaggatgaagctatggccattggaggccactggtctccttcgttggatggaccagacccagaaaaagatccctctgtgttgattaagactgctattcgttgttgtaaggctctgacaggcattgatctaagtgtgtgcacacaatggtaccgttttgcagagattcgctaccatcgccctgaggagacccacaaggggcgtacagttccagctcatgtggagacagtggttttatttttcccggatgtttggcattgccttcccacccgctcagagtgggaaaccctctcccgaggatacaagcagcagctggtcgagaagcttcagggtgaacgcaaggaggctgatggagaacaggatgaagaagagaaggatgatggtgaagctaaagaaatttctacacctacccattggtctaaacttgatccaaagacaatgaaggtaaatgacctccgaaaagaattagaaagtcgagctcttagttccaaaggattaaaatcccagttaatagcccgattgacaaaacagcttaaagtagaggaacaaaaagaagaacagaaggagttagagaaatctgaaaaagaagaggatgaggatgatgataggaaatctgaagacgataaagaggaagaagaaaggaaacgtcaagaggaaatagaacgccagcgtcgagaaagaagatatattttgcctgatgaaccggccatcattgtacatccaaattgggctgcaaaaagtggcaagtttgattgtagcatcatgtctttgagtgtcctattggactacagattagaggataataaagaacattcatttgaggtttcattgtttgcggaacttttcaacgaaatgcttcaaagagattttggtgtccgtatatacaaatcattactgtctcttcctgagaaagaggac

SEQ ID NO: 185289 - DNA, 2129 bp, Homo Sapiens
  misc_feature (1026)..(1081): n is a, c, g, or t
ttggatggcctttaaaggtctggagccaggttaccgatgaggaggcctaggttcccttcctctttgcttctgggagcatctcgagcagtgcagagtggcttcccagccccagatggcaggattggggtgggtttgggatctgctgcctttgctcagtgtgcagggttggggtggaaatgggggacaggctagggcctctgcattaggctgccttcttaggcaggtgggctttcacttccagctcctcttccattttcacgatgtccttcttcctaggcactgcgaggggaggagaaaaggggctttgcagaggcctgggagtattcccaggaagtgcctggttggcgaaacaaccagggagctgctcctgggagctgggctgaggctttgctgggctgcctctcccactcacccttctcccggcccccaccatgccttccccatgggggaggggcagggggctggaggaacacagcttccccctgttctagcagagaaatgctggctgtatgcctcccctagggttcccaggctgactagggtgtggctggccttctgatggagcccactcatgctgggccgctgcccaggggctttgtggcacctaggtcgagatggtactcaggccaggggtcaggattcctgggtgctctggtcccggtgcctctgtctcatctttaggctgggattcctgccaccttgctgctctggggcccaaatactttgagacaaggctataggcttgtcccactgactctcctttccctccctggggtctcctctctctccagagatgccctgtatccaagcccaatatgggacaccagcaccgagtccgggaccccgtgaccacctggcaagcgaccccctgacccctgagttcatcaagcccaccatggacctggccagccccgaggcagcccccgctgcccccactgccctgcccagcttcagcaccttcatggacggctacacaggagagtttgacaccttcctctaccagctgccaggaacagtccagccatnnnnnnnnnnnnnnnnnnnnnnnnnnnnnnnnnnnnnnnnnnnnnnnnnnnnnnnngcctctgcctccttcaagttcgaggacttccaggtgtacggctgctaccccggccccctgagcggcccagtggatgaggccctgtcctccagtggctctgactactatggcagcccctgctcggccccgtcgccctccacgcccagcttccagccgccccagctctctccctgggatggctccttcggccacttctcgcccagccagacttacgaaggcctgcgggcatggacagagcagctgcccaaagcctctgggcccccacagcctccagccttcttttccttcagtcctcccaccggccccagccccagcctggcccagagccccctgaagttgttcccctcacaggccacccaccagctgggggagggagagagctattccatgcctacggccttcccaggtttggcacccacttctccacaccttgagggctcggggatactggatacacccgtgacctcaaccaaggcccggagcggggccccaggtggaagtgaaggccgctgtgctgtgtgtggggacaacgcttcatgccagcattatggtgtccgcacatgtgagggctgcaagggcttcttcaaggtaccgcgcagccccaggtggggccttttgttggaaatggagagaggctggcctcatcccattgggacctgtggtctccccctgggttctcctcctagctaagtcctgtcctgcagggtgggatcagccctgccaggtgggccgccttcctggagacccgtagatgccagggctggaagctttcatttgccgggacactcgggcccatgggattgcacagagctggagggaggggtgagataggggcagataggagctgcaggggtgcctggcgagcctctggttttcctctgctcctctgcctgtcctctcccaactcaaggttctagtgggaaggggtgcccccaggctctcatgttcctggcgtgagatgaaaggatccctgcggagggtttggttcttgagggctgggggtgcaccttccaactagaaccttgagttgggagaggacaggcagagg

SEQ ID NO: 185290 - DNA, 2263 bp, Homo Sapiens
  misc_feature (360)..(408): n is a, c, g, or t
tacaaaaaagttggcgaaacttcgcccgggagtgcacagaagaacttcgggagcgcacgcgggaccagggaccaggctgagactcggggcgccagtccgggcaggggcagcgggagccggccggagatgccctgtatccaagcccaatatgggacaccagcaccgagtccgggaccccgtgaccacctggcaagcgaccccctgacccctgagttcatcaagcccaccatggacctggccagccccgaggcagcccccgctgcccccactgccctgcccagcttcagcaccttcatggacggctacacaggagagtttgacaccttcctctaccagctgccaggaacagtccagccatgnnnnnnnnnnnnnnnnnnnnnnnnnnnnnnnnnnnnnnnnnnnnnnnnntcccctgcctctgcctccttcaagttcgaggacttccaggtgtacggctgctaccccggccccctgagcggcccagtggatgaggccctgtcctccagtggctctgactactatggcagcccctgctcggccccgtcgccctccacgcccagcttccagccgccccagctctctccctgggatggctccttcggccacttctcgcccagccagacttacgaaggcctgcgggcatggacagagcagctgcccaaagcctctgggcccccacagcctccagccttcttttccttcagtcctcccaccggccccagccccagcctggcccagagccccctgaaagttgttcccctcacaggccacccaccagctgggggagggagagagctattccatgcctacggccttcccaggtttggcacccacttctccacaccttgagggctcggggatactggatacacccgtgacctcaaccaaggcccggagcggggccccaggtggaagtgaaggccgctgtgctgtgtgtggggacaacgcttcatgccagcattatggtgtccgcacatgtgagggctgcaagggcttcttcaagcgcacagtgcagaaaaacgccaagtacatctgcctggctaacaaggactgccctgtggacaagaggcggcgaaaccgctgccagttctgccgcttccagaagtgcctggcggtgggcatggtgaaggaagttgtccgaacagacagcctgaaggggcggcggggccggctaccttcaaaacccaagcagcccccagatgcctcccctgccaatctcctcacttccctggtccgtgcacacctggactcagggcccagcactgccaaactggactactccaagttccaggagctggtgctgccccactttgggaaggaagatgctggggatgtacagcagttctacgacctgctctccggttctctggaggtcatccgcaagtgggcggagaagatccctggctttgctgagctgtcaccggctgaccaggacctgttgctggagtcggccttcctggagctcttcatcctccgcctggcgtacaggtctaagccaggcgagggcaagctcatcttctgctcaggcctggtgctacaccggctgcagtgtgcccgtggcttcggggactggattgacagtatcctggccttctcaaggtccctgcacagcttgcttgtcgatgtccctgccttcgcctgcctctctgcccttgtcctcatcaccgaccggcatgggctgcaggagccgcggcgggtggaggagctgcagaaccgcatcgccagctgcctgaaggagcacgtggcagctgtggcgggcgagccccagccagccagctgcctgtcacgtctgttgggcaaactgcccgagctgcggaccctgtgcacccagggcctgcagcgcatcttctacctcaagctggaggacttggtgccccctccacccatcattgacaagatcttcatggacacgctgcccttctgacccctgcctgggaacacgtgtgcacatgcgcactctcatatgccaccccatgtgcctttagtccacggacccccagagcacccccaagcctgggcttgagctgcagaatgactccaccttctcacctgctccaggaggtttgcagggagctcaagcccttggggagggggatgccttcatgggggtgacccacgatttgtcttatcccccccagcctggccccggcctttatgttttttgtaagataaaccgtttttacacatatcgccgtgctgtaaataagcccagtgctgctgtaaatacaggaagaaagagcttgaggtgggagcggggctggga

SEQ ID NO: 185291 - DNA, 2035 bp, Homo Sapiens
ttggctcagcaacagcttttacagcagcagctcgctactgcatatgatgatgataccacttcactattacgagactgttatttgttggaagaaaaggaacgtctcaaagaagaatggtccctttttaaagagcagaaaaagaattttgagagggagagacgaagctttacagaagccgctattcgcctgggattggagagaaaggcatttgaagaagaaagagccagttggttaaagcagcagtttctaaatatgactacctttgaccaccagaactcagaaaatgtgaaacttttcagtgccttctcaggaagttctgattgggacaatcttatagtgcactcgaggcagccgcaaaagaagcctcacagtgtgtctaatgggtctccagtttgcatgtctaaacttactaaatctcttcctgcttcaccttccacttcagacttttgccagacacgttcctgcatatctgaacatagttcaatcaatgtactgaatataactgctgaagaaattaaaccaaatcaggttggaggagaatgtacaaatcaaaaatggagtgtggcgtcaagacctggatcacaggaaggttgctatagtggatgctccttgagctacacaaattctcatgtagaaaaagatgacttaccttagacatgtggactggaatttttttcattaatgtgttcatcaagtttcacatctaagttgaaacagggtgtgtcataaagtcagttatctctaataacttaagatggtctgagttgtttgtttggacttccctgtcttcccccaaagagttgaaatcttaaatctatttaaaaggatataaaagctttggatatgtatttttagtaacagaagcatctggttctgtgaataaaggaatgtatagatgtttggatggaaacaaaagcactagactgagtttcctcttataggtattaaaaatagcacttttaggaaactgattattgtaaatgtttaattttgtctcaaatatagttggcattggaagtttagcctttacttgaatgtatactgtagatttttaacaaagcgagttctatatttattatgtttagtgtggtttgaaattacctctttcatatgttttaaataaagtgaaatttatgtatgttttgtacatagatacacatgattatgttaagaggctttaagatttaaaagtttcacacaaccataagtatagtatttcatgccagtaaaattttttagtggtattctgtttacagatgtattaggaccattgatgcattacatttaagaattctctttaatacatctgggcaataaatattgaaaggtattccatgaagctgagttctttagataatcaacactactaacattacatttttgagatttttatgacattagatttttattttgtatatgtagaatattataatttttaaaaggactattgatgatagaagaataggggcaagacgacaaaagtacctttgaataaaacaatttaagaaattggtttaagatattggatgatagaagatatttaagatatctagatggtgatattttccttagatgggtaccagtatagtaatatctgtatactaactagggctttgtattgtcaataattttttaataattttttaatgaggtatttaccactgaagaaatatgataatataaaaccatcaaattttataattgagatgatactctggaaaaacatgtcatttcattttcagaaaactcttaagctctcttcagtctctgtaatgtttctgattgcatgtttcttcatgaaaagtatgttgttgttttgatagtaataataataaatgtaggctcagctctttcccaggattttcatcaaaaagctttaagtgcctaaccctgcttgtctctgtacatagaagcctgcacagatccaacccttgctaggtatcatagtttacgcccatttaccttcccctgtactggcagttcagccgcttacatgcactcaccctgtttgtggctattttaaattcatattatt

SEQ ID NO: 185292 - DNA, 1371 bp, Homo Sapiens
actccctgacagtgacatctttaccttctctcgcgtctttacaaataaaagaagatcgatggtaaaggttattttagtgcacttcccaaagataaggacagacagtgctttaaactacgcccaggaattgataagaagattgtcatctatgtgcagcaaacaactaataaagaacttgccattgaaaggtgttttggtcttctccttagtccaggaaaagatgtacgaaatagtgacatgcacttattagatttggaatctatgggcaaaagttcagatggaaagtcgtatgttattacggggagctggaatccaaaatccccacattttcaagttgtaaatgaagaaactcctaaagataaagtcctgtttatgaccacagctgtagatttggtaataacagaagtacaggagcctgttcgatttctcctggagacaaaagtccgcgtttgctcacctaatgaaagattattctggcccttcagcaaacgtagtactactgaaaatttctttttgaaactaaaacagataaagcaaagggagagaaagaataatactgacactttatatgaagttgtatgcttggaaagtgaatcagaaagagagaggaggaaaactacagccagtccttcagttcgcctgccacagtctggatcgcaaagttcagtgataccttctcctccagaagatgatgaagaggaagataatgatgaacctctcctgagtggatctggtgatgtatccaaagaatgtgcagaaaaaattcttgaaacatggggagaactgttgtcaaaatggcatctcaacttgaatgtgagaccgaagcagttgtcatccttagtaagaaacggtgtccctgaagctcttcgaggagaagtctggcagctgctagcaggctgtcataacaatgaccacctggtagagaaataccgcattcttatcacaaaggagtctccccaggacagtgctatcacccgggatattaaccgaacattcccagcccatgactactttaaggacacaggaggagatggacaagattccttatataaaatatgcaaggcttattctgtgtatgatgaagagattggttattgccagggccagtcatttcttgctgctgtgctccttctccatatgcctgaagaacaggcattcagtgttctggtcaagatcatgtttgactatgggctcagggaacttttcaagcaaaacttcgaagatttgcattgcaaattttaccagttggagcgcctcatgcaggaatacattcctgacctgtacaaccacttcctggatataagccttgaagcacacatgtatgcctcccagtggtttcttactcttttcactgcaaaattccctctctac

SEQ ID NO: 185293 - DNA, 1224 bp, Homo Sapiens
  misc_feature (366)..(391): n is a, c, g, or t
  misc_feature (393)..(437): n is a, c, g, or t
  misc_feature (757)..(801): n is a, c, g, or t
  misc_feature (805)..(820): n is a, c, g, or t
ttgggggaaagagacttgctgagagcagctgccgcctcccgacaccttcagaaaacacgacaccttttgttgccttctttggccagatgtgtgattctgtgacttgtcccaggaccagaatgtacctaagtcagatccatagacgcatgttggtaggtcactggaccagagcttgtgaagcaggcaacctctggggtaagactactgatactaacaggcctgctagctcagccgacgctctggacactctagaaatcactcctcagtgtgacctcccaggcctcttccccgtgtacgtcaacacctcacccagcctaaaggctgagtttacatgatcagagttaggggatccttcagtctgttgannnnnnnnnnnnnnnnnnnnnnnnnnannnnnnnnnnnnnnnnnnnnnnnnnnnnnnnnnnnnnnnnnnnnngtgggggtggggcaagggatcagaaattcaaataattcttttctgcttcaatgccagcagaaggtcccccaggtagacatggagaagcactttgttttaaataggagggtttcatagttgcatctgaagccacctggttctgttaaactgtatcgtgcaagttttgggtttggattattcatgtttctgatcaattctatgcaactctcatagttcctgttactttttagcattagctgccaaatgacttcaaaaggctggggtgggtgacttgactgtgagactggattataacatggacaaatcttattttgcttaannnnnnnnnnnnnnnnnnnnnnnnnnnnnnnnnnnnnnnnnnnnnatgnnnnnnnnnnnnnnnnaatatctttcccaatatgccccgttgacagtgtttaaattccagactaggactgctgatctgcacaatttaattatgtggttattcgagcacttaatttcactcaaggttcattgggctctgctctcctccctgccattacgggagctgtggacagagctccctcacttcaagattcctagtgtttttgcacaacaggttgtccaagtgagaaagactgagttgcgtgtctgtaaatgtctgcgcagggtgcacatgctgcgaggtctccatcctccgggcctgtccctcccagatgggctgggcctttgggccctcctcagagtatgcctgggtacaaacctcactgttcagatgggctgtaagttctcacttcaaagctatggaatggattttagcaccttt

SEQ ID NO: 185294 - DNA, 1883 bp, Homo Sapiens
  misc_feature (171)..(205): n is a, c, g, or t
  misc_feature (207)..(231): n is a, c, g, or t
cccaaaaccttgcacgatacagtttaacagaaccaggtggcttcagatgcaactatgaaaccctcctatttaaaacaaagtgcttctccatgtctacctgggggacctttctgctggcattgaagcagaaaagaattatttgaatttctgatcccttgccccacccccacnnnnnnnnnnnnnnnnnnnnnnnnnnnnnnnnnnntnnnnnnnnnnnnnnnnnnnnnnnnntcaacagactgaaggatcccctaactctgatcatgtaaactcagcctttaggctgggtgaggtgttgacgtacacggggaagaggcctgggaggtcacactgaggagtgatttctagagtgtccagagcgtcggctgagctagcaggcctgttagtatcagtagtcttaccccagaggttgcctgcttcacaagctctggtccagtgacctaccaacatgcgtctatggatctgacttaggtacattctggtcctgggacaagtcacagaatcacacatctggccaaagaaggcaacaaaaggtgtcgtgttttctgaaggtgtcgggaggcggcagctgctctcagcaagtctctttcccttgaaccccggttgctgtctttatggagctcagtgttcggttaaaccacgtcttcttggctgcctgcacctcattgagggcaagccctaaatggtgttccaagtcctgtatcttacactcggcctccaccagctggagtttggtctgtgccagttctagctccatttctctcagctggttcttgagcgtctctttctcttcatccgtgtcctcatctaaaacctccttggttgagcttatgccttttacacgcccttctttgttgaaaaattcccggcaccgctcacagtcatccactttttgccgaattttctcaatttccaccttattggctgtctgctgcttctccaatctttcactcaactgagaacaaatctgcttatagtcaccaatgatagaactgttttttttaatctcagattctgccttgtcgagttcccgacggcacatttcttttaactgagcagactcttcttccagccgtcttttctcttcttctgcatcaatcaacttctgtttggtcatcagcagctccttattcagagcatctgccttttcctcagcgttatccaggtccttccgtagtgcaatcttgctggtcaccagctcatgggctaagtcatcgttttcctgttccaacctcatgttagcttcttgtagacgcctattctcccgctcaaatcgctcgatggggtcttcttgctgggcctgctgttccctcatggtgtgatattctttctcgtattttttcaacttcttctgactaatcttcatgttgcaggctaattccattagtttttttgcattttcttctgagcggtatctcttaggaagctgaaccctaaagaacttcaaggcaccttcaaagtctgtcaacagcaggtcatctttcgaagtctttaataatccaagggcgacattaaaaataacacttattccctcacataaaagcaggtcgatgatatggaagaccatgtagagagggaattttgcagtgaaaagagtaagaaaccactgggaggcatacatgtgtgcttcaaggcttatatccaggaagtggttgtacaggtcaggaatgtattcctgcatgaggcgctccaactggtaaaatttgcaatgcaaatcttcgaagttttgcttgaaaagttccctgagcccatagtcaaacatgatcttgaccagaacactgaatgcctgttcttcaggcatctgtaacagataggcaagttgttgggtagggaggatggcggtggggaatcacaaaacatacagaagttttctcaggatccaa

SEQ ID NO: 185295 - DNA, 819 bp, Homo Sapiens
  misc_feature (242)..(274): n is a, c, g, or t
  misc_feature (595)..(649): n is a, c, g, or t
  misc_feature (651)..(675): n is a, c, g, or t
tcagtctttctcactttggacaacctgttgtgcaaaaacactaggaatcttgaaagtgagggagctctgtccacagctcccgtaatggcagggaggagagcagagcccaatgaaccttgagtgaaattaagtgctcgaataaccacataattaaattgtgcagatcagcagtcctagtctggaatttaaacactgtcaacggggcatattgggaaagatatttatatatatatatatacatnnnnnnnnnnnnnnnnnnnnnnnnnnnnnnnnnttaagcaaaataagatttgtccatgttataatccagtctcacagtcaagtcacccaccccagccttttgaagtcatttggcagctaatgctaaaaagtaacaggaactatgagagttgcatagaattgatcagaaacatgaataatgccaaacccaaaacctgcacgatacagtttaacagaaccaggtggcttcagatgcaactatgaaaccctcctatttaaaacaaagtgcttctccatgtctacctgggggaccttctgctggcattgaagcagaaaagaattatttgaatttctgatcccttgccccacccccacnnnnnnnnnnnnnnnnnnnnnnnnnnnnnnnnnnnnnnnnnnnnnnnnnnnnnnntnnnnnnnnnnnnnnnnnnnnnnnnntcaacagactgaaggatcccctaactctgatcatgtaaactcagcctttaggctgggtgaggtgttgacgtacacggggaagaggcctgggaggtcacactgaggagtgatttctagagtgtccagagcgtcggctgagcccaa

SEQ ID NO: 185296 - DNA, 1145 bp, Homo Sapiens
ttggggcagcggcaacggcagagacagcaacgtgcccgccgcagtcagcccggcctcgtcggacccgcaccggcccgcccgcccgcccgcaccgcgtcggggcgccctctccactgcgcgcggtacaaggaaatggtagaaccagtgatctcacccagcctcactgtaaacagcgattgtctggataaactgaagtttaaccgtgctgacgctgctgtgtggactctgagtgacagacaaggcatcaccaaatcggcccccctgagagtgtcccagctcttctccagatcttgcccacgtgtcctcccccgccagccttccacagccatggcagcctacggccagacgcagtacagtgcggggatccagcaggctaccccctatacagcttacccacctccagcacaagcctatggaatcccttcctacagcatcaagacagaagacagcttgaaccattcccctggccagagtggattcctcagctatggctccagcttcagcacctcacccactggacagagcccatacacctaccagatgcacggcacaacagggttctatcaaggaggaaatggactgggcaacgcagccggtttcgggagtgtgcaccaggactatccttcctaccccggcttcccccagagccagtacccccagtattacggctcatcctacaaccctccctacgtcccggccagcagcatctgcccttcgcccctctccacgtccacctacgtcctccaggaggcatctcacaacgtccccaaccagagttccgagtcacttgctggtgaatacaacacacacaatggaccttccacaccagcgaaagagggagacacagacaggccgcaccgggcctccgacgggaagctccgaggccggtctaagaggagcagtgacccgtccccggcaggggacaatgagattgagcgtgtgttcgtgtgggacttggatgagacaataattatttttcactccttactcacggggacatttgcatccagatacgggaaggattgtgaccagatccacgttgatgacgtctcatcagatgacaatggccaagatttaagcacatacaacttctccgctgacggcttccacagttcggccccaggagccaacctgtgcctgggctc

SEQ ID NO: 185297 - DNA, 2753 bp, Homo Sapiens
ttgggaggagcgtcctgcttcccggctgccctgttgctgtcggagtcacaggatggcggctgtcatcctgccctcgactgctgctccgtcttccctgttcccagcctctcagcaaaaaggacacacacagggcggagagctggttaatgagctcctgacaagctggctacggggcttggtaaccttcgaggatgtggccgtggagttcacccaggaggagtgggcgttgctggaccctgcccaaaggacactgtacagggatgtgatgctggagaactgcaggaacctggcctcactagggtgtcgtgttaataaacccagtctgatatcccagttggaacaagacaagaaggtggtgacagaggaaagaggaattctaccaagcacctgtccagatttggagactctacttaaagccaaatggttaactcctaagaagaatgttttcagaaaagaacagtctaaaggtgtaaaaacggaaagaagtcatcgtggagtgaaactcaatgaatgtaatcagtgttttaaagtcttcagcacgaaatctaacctaactcagcacaagagaattcatactggagaaaaaccctatgactgtagtcaatgtgggaagtccttcagtagcagatcttaccttactattcataagagaatccataatggggagaaaccctatgaatgcaatcactgtgggaaagcatttagtgatctctcatcccttagactgcatttgagaattcacactggagaaaaaccctatgaatgtaaccagtgttttcacgttttccgcaccagttgtaacctcaaaagccacaagaggattcacacgggggagaatcaccatgaatgtaatcagtgtggaaaagctttcagcacaaggtcctctctcactgggcacaatagcattcatacaggggagaaaccttatgaatgtcacgattgtgggaaaaccttcaggaagagctcctatctgacacagcacgtaagaactcatactggagaaaaaccctatgaatgtaacgagtgtgggaaatccttcagcagtagcttttctcttactgtgcacaagagaatacataccggagagaaaccctacgagtgcagtgactgtggaaaagcctttaataatctctcagctgtgaagaaacacttaagaactcacactggagaaaaaccctatgaatgtaatcattgtgggaaatccttcacaagtaactcctatctttctgtgcacaagagaatacataatagatggatatgaattactgcaggaacttctggaggaaagcactcattgatctttcatccctaagatagtttgagagagctcacactggatatataagttatttgttgcagcataacaaatgatccccgcaaattttgtggcttcaaacacgaaatgtttattctctaacaatttctacagatcaggaattcaagaacagcttatctctgtagttacactgcaggatctctcatgcctttacttacaatcaagatgtcagccaaagctatagtcatctaacatctttactgatgaacagtccacttccaagatgacttattcacatgcctggaaagttgatgttggttgttgtcaggggaccttcagtcattaccatgtaggcctctttacaaggcccagctccttgacaatttggcaataagttctcgccaaggttagtgatccaagagaggaccaatacagaggccaaaatggcttttatgacctatcctcaggaggactgctaagctttcacttatttcctattgtgttggtctcacaacacaccaatcctgatacaatgtgagagactgcagaaggtatgaataccaggaaacagataactcagaagcatctgggaaatttgccatggaattaatgaagaaaagccctcagcacatcatccttctactctaatcaatatgaaatagcattcagtaactcctattaattcactctgaagagaaaccttttgaggacaatctgtatggtaaagctctcagctcgaattctcaccttcatgggcccagaagattatgtactgagagaatcctgaagaatggaacagctgtagaaagccttcagtgctatcagcagggattcatgtgacagctcacactaagggagaaaacctgtgaaggtctcagaaggcttcagtgacagtcatcccttaagacacactggaaatcacacaatggaacaacactcagaaatgcggaataccctgcagcaaaagtgttcacattactgagcaaactatagtgtggtattctgcagtgactatgggaaagccttgaatgttctatcggtttttaagggacttgagaattaattctggagagaatgccccattgaacatcatcaatattggagagctttctgtttttctacatttgttaggaaacttgtgagcattcacactacagagaaacttgaaatataaagaagaagagaaagccttcagtgatgcctctgtgttagggaaaatatggaacttctccctggatgcaaaacctatgagtatattaatattggaaaatttttcagtgattcttctctttcttgtatatgagagaacttacatggagaaacccctaggaatgtaatcagtgttaggaagcctcagcctgaactcttcactgagtggccacatttttcactgggaacataaagtataatcactgttttgagtgtgggatatcctttatcagtgtctcatctgtagattggaatgctggctcattaa

SEQ ID NO: 185298 - DNA, 2914 bp, Homo Sapiens
  misc_feature (535)..(549): n is a, c, g, or t
  misc_feature (1544)..(1865): n is a, c, g, or t
ttgggactttaatgggaatgatgaggaagatcttccctttaagaaaggagacatcttgagaatccgggacaagcctgaagagcagtggtggaatgcggaggacagcgaaggcaagagagggatgattccagtcccttacgtcgagaagtatagacctgcctccgcctcagtatcggctctgattggaggtaaccaggagggttcccacccacagccactgggtgggccggagcctgggccctatgcccaacccagcgtcaacactccgctccctaacctccagaatgggcccatatatgccagggttatccagaagcgagtccccaatgcctacgacaagacagccttggctttggaggtcggtgagctggtaaaggttacgaagattaatgtgagtggtcagtgggaaggggagtgtaatggcaaacgaggtcacttcccattcacacatgtccgtctgctggatcaacagaatcccgatgaggacttcagctgagtatagttcaacagttttgctgacagatgggaacaatcnnnnnnnnnnnnnnnccaactgccatctatacaattttcttacagatgtcaaaagcagtctagtttatataagcattctgttacctgtgatattttttagactgaactgctccattcctagtcttaattaccatattcagggtacgaactggagggcttgtgtgttagcttctgaattggcaattggaggcggtagtggtcgtgcctgtgtgtatcagaagggataggtatcttgcctcctttctctcaggcagtgcaaatcaccctgtggaaaaccgatggacaggaaggagtgttacacactgcttaccctgatttattcagtggttttgttttcattctggaaccatactatcaaatggcgacagactgttccgttccacccccgtgaagtaatcatgcaccgtgtgaatagtatcaagcaggattgctttcattgtatggagcatgaccagcgtgtgactcattctgacatttcagatcctaagaattctaagaacactactagaagcatttgttccctcctagtcaatgcttcatactttttcttgggattcttttagcccttgacattcttgtcccccaaacctgtaagtaggtgaattcctaagataagtgtgtattttcattccaggtgaaaagcaggatgtaccgagcactttattcagtgcatagctttaagccagtgttggattcactaagtggacagccagtctcccagctctctgccttccccaaaagggtcgtagtaggtcacccttctacagcagctaactagagtcctaactaatgggatccagcagggccatttctccagagggccagtatcctattaggagactcttggaattcttaggttctactcaagagtggaaggaccaatcacctctgatattctgtggaaggttttggggtcaaattctgccctctgcattctgtgcaacttgtataaaagtcaagttagtattacatgaatttggggtagggttagtgctttgaaaaaatgttgnnnnnnnnnnnnnnnnnnnnnnnnnnnnnnnnnnnnnnnnnnnnnnnnnnnnnnnnnnnnnnnnnnnnnnnnnnnnnnnnnnnnnnnnnnnnnnnnnnnnnnnnnnnnnnnnnnnnnnnnnnnnnnnnnnnnnnnnnnnnnnnnnnnnnnnnnnnnnnnnnnnnnnnnnnnnnnnnnnnnnnnnnnnnnnnnnnnnnnnnnnnnnnnnnnnnnnnnnnnnnnnnnnnnnnnnnnnnnnnnnnnnnnnnnnnnnnnnnnnnnnnnnnnnnnnnnnnnnnnnnnnnnnnnnnnnnnnnnnnnnnnnnnnnnnnnnnnnnnnnnntgttgaaccaattgtgaattacttatgtattattcatttctcatggggagagtaatgctgttgaagaacattacattgtaaactgccttcatttttggctctttgtttatgttcaggtttagtttacaaacccatttaagtatggaatgatttatatggggtcaggtgctccacaaaatagacctatgagaccaaaaatgacctaggctatttagacgacagcatgaaacttccacgttagttctcagtctataaaggcacttaccggtctctggtgtggtatgaccaatagaaacaccttatagtttgctttggacctcattttggaaaaataatctgcctttctaattgttctgcataggttaaaatgataaatttacattctttgaacctataccagattgtggtgtccgagtgaccggcacactgtctgacacacagtcagtgtgcacgtatttgtctgagtgaatgaggagacctgagaaaccggtgacgtggcacagggaagccagctggcccaggattccgtacatggccgcaagcagactaacgcgttgacgctaatttaatgtattttacctcacactaaggtcatgcttgataaagacgttaaactcaacttgtaaaatggtagcccagtgctatgcacagagtgggtgctcattagtgttgaatgaacacatttgtaatactacatgtaattccatctgactgctttgttaaattttcagttagaacgtagatactgtaaagtccacacacacattaaatcttgttttcctgaaagtatggcatcaaaaatacttgtagaaaaaccttgtcacaactgatttgaatgttcctattttctttgactttgatattggcttgtaatgtctcttttcatcatatgtaatatcagtggaacaggcagcgctactcaagtcctaaggattcctcagtgatcagtgatccagggccgttcatgaaccactgggctggatttgactgttgagtgtggcagttaatgcccctcaagaaatcaaaaggatgtcttataagtgtcttcc

SEQ ID NO: 185299 - DNA, 2004 bp, Homo Sapiens
ataatggccaactttgtacaaaaaagttggtgcttgatttcagccaaaaactggatatcaacttattagataatgtggtgaattgcttataccatggagaaggagcccagcaaagaatggctcaagaagtactgacacatttaaaggagcatcctgatgcttggacaagagtcgacacaattttggaattttctcagaatatgaatacgaaatactatggactacaaattttggaaaatgtgataaaaacaaggtggagattcttccaaggaaccagtgcgaaggaataaaaaaatacgttgttggcctcattatcaagacgtcatctgacccaacttgtgtagagaaagaaaaggtgtatatcggaaaattaaatatgatccttgttcagatactgaaacaagaatggcccaaacattggccaacttttatcagtgatattgttggagcaagtaggaccagcgaaagtctctgtcaaaataatatggtgattcttaaactcttgagtgaagaagtatttgatttctctagtggacagataacccaagtcaaatctaagcatttaaaagacagcatgtgcaatgaattctcacagatatttcaactgtgtcagtttgtaatggaaaattctcaaaatgctccacttgtacatgcaaccttggaaacattgctcagatttctgaactggattcccctgggatatatttttgagaccaaattaatcagcacattgatttataagttcctgaatgttccaatgtttcgaaatgtctctctgaagtgcctcactgagattgctggtgtgagtgtaagccaatatgaagaacaatttgtaacactatttactctgacaatgatgcaactaaagcagatgcttcctttaaataccaatattcgacttgcgtactcaaatggaaaagatgatgaacagaacttcattcaaaatctcagtttgtttctctgcacctttcttaaggaacatgatcaacttatagaaaaaagattaaatctcagggaaactcttatggaggcccttcattatatgttgttggtatctgaagtagaagaaactgaaatctttaaaatttgtcttgaatactggaatcatttggctgctgaactctatagagagagtccattctctacatctgcctctccgttgctttctggaagtcaacattttgatgttcctcccaggagacagctatatttgcccatgttattcaaggtccgtttattaatggttagtcgaatggctaaaccagaggaagtattggttgtagagaatgatcaaggagaagttgtgagagaattcatgaaggatacagattccataaatttgtataagaatatgagggaaacattggtttatcttactcatctggattatgtagatacagaaagaataatgacagagaagcttcacaatcaagtgaatggtacagagtggtcatggaaaaatttgaatacattgtgttgggcaataggctccattagtggagcaatgcatgaagaggacgaaaaacgatttcttgttactgttataaaggatctattaggattatgtgaacagaaaagaggcaaagataataaagctattattgcatcaaatatcatgtacatagtaggtcaatacccacgttttttgagagctcactggaaatttctgaagactgtagttaacaagctgttcgaattcatgcatgagacccatgatggagtccaggatatggcttgtgatactttcattaaaatagcccaaaaatgccgcagcatttcgttcagttcagttggagaagtgatgccatttattgatgaaattttgaacaacattaacactattatttgtgatcttcagcctcaacaggttcatacgttttatgaagctgtggggtacatgattggtgcacaaacagatcaaacagtacaagaacacttgatagaaaagtacatgttactccctaatcaagtgtggatagtataatccagcagcaaccaaaaatg

SEQ ID NO: 185300 - DNA, 1066 bp, Homo Sapiens
ttttacagttcgcatacttctaatcaatggtgctttgtaaccatttcaccattagcttggatagctgcagaaatattttcactgaggcacttgtatacattaagcatatctaaataaattcttccaagctgaattacaaaggggtgtccaacagctttgcaggctctcacatttgttttcaaaatgctaccaagctgcttgactgtttcaggatctttcagtatatccacatttttggttgcctgctggattatactatcccacacttgattagggagtaacatgtacttttctatcaagtgttcttgtactgtttgatctgtttgtgcaccaatcatgtaccccacagcttcataaaacgtatgaacctgttgaggctgaagatcacaaataatagtgttaatgttgttcaaaatttcatcaataaatggcatcacttctccaacctgaacctgaacgaaatgcctgcggcatttttgggctattttaatgaaagtatcacaagccatatcctggactccatcatgggtctcatgcatgaattcgaacagcttgttaactacagtcttcagaaatttccagtgagctctcaaaaaacgtgggtattgacctactatgtacatgatatttgatgcaataatagctttattatctttgcctcttttctgttcacataatcctaatagatcctttataacagtaacaagaaatcgtttttcgtcctcttcatgcattgctccactaatggagcctattgcccaacacaatgtattcaaatttttccatgaccactctgtaccattcacttgattgtgaagcttctctgtcattattctttctgtatctacataatccagatgagtaagataaaccaatgtttccctcatattcttatacaaatttatggaatctgtatccttcatgaattctctcacaacttctccttgatcattctctacaaccaatacttcctctggtttagccattcgactaaccattaataaacggaccttgaataacatgggcaaatatagccaacttttttgtacaaagggggcttttatag

SEQ ID NO: 185301 - DNA, 1263 bp, Homo Sapiens
aattgatgagcaatgctttttcataaaagagcaactttgtacaaaaaagttggcttgttttggattccatcatttgggctttcaaacatactatgaggaatgtcgcagatacgggcttacagatactttttacactcttacaaaatgttgcacaagaagaagctgcagctcagagtttttatcaaacttatttttgtgatattctccagcatatcttttctgttgtgacagacacttcacatactgctggtttaacaatgcatgcatcaattcttgcatatatgtttaatttggttgaagaaggaaaaataagtacatcattaaatcctggaaatccagttaacaaccaaatctttcttcaggaatatgtggctaatctccttaagtcggccttccctcacctacaagatgctcaagtaaagctctttgtgacagggcttttcagcttaaatcaagatattcctgctttcaaggaacatttaagagatttcctagttcaaataaaggaatttgcaggtgaagacacttctgatttgtttttggaagagagagaaatagccctacggcaggctgatgaagagaaacataaacgtcaaatgtctgtccctggcatctttaatccacatgagattccagaagaaatgtgtgattaaaatccaaattcatgctgttttttttctctgcaactcgttagcagaggaaaacagcatgtgggtatttgtcgaccaaaatgatgccaatttgtaaattaaaatgtcacctagtggccctttttcttatgtgtttttttgtataagaaattttctgtgaaatatccttccattgtttaagcttttgttttggtcatctttatttagtttgcatgaagttgaaaattaaggcatttttaaaaattttacttcatgcccatttttgtggctgggctggggggaggaggcaaattcgatttgaacatatacttgtaattctaatgcaaaattatacaatttttcctgtaaacaataccaatttttaattagggagcattttccttctagtctatttcagcctagaagaaaagataatgagtaaaacaaattgcgttgtttaaaggattatagtgctgcattgtctgaagttagcacctcttggactgaatcgtttgtctagactacatgtattacaaagtctctttggcaagattgcagcaagatcatgtgcatatcatcccattgtaaagcgacttcaaaatatgggaacacagttagttatttttacacagtt

SEQ ID NO: 185302 - DNA, 1222 bp, Homo Sapiens
  misc_feature (260)..(272): n is a, c, g, or t
  misc_feature (518)..(526): n is a, c, g, or t
  misc_feature (530)..(561): n is a, c, g, or t
  misc_feature (601)..(642): n is a, c, g, or t
  misc_feature (675)..(716): n is a, c, g, or t
ttggtggaatctcccagtctgaaccggtttcaaccggttccgagtttgaggcactaggaggagggggagaagcggctgcagcggccgcggcaggagcagcgggagctacagcatcagcaagagcaacagtagctacagccccggcggcggtgcctgttccagtctttgctgctgcagtccgtgcaaccacccagagggggaggggggaaccaccagtcgctgaggaacaagagaaggggggaaagtttaggcgagccttnnnnnnnnnnnnnccagcgccggacccgcgtgaaaaagggagccgtgttttggtaggggggagtcggactgcaactggcagcagagcgtctccccggccgtgtggactctacaccccctactcctgccgcttctgctgctgcctgtggctggagggtccccctggggctgaatctttgggacttgaccccgttccctcccccttccctcactccccagccgggcgggagcatttattccccagattaattccccttttnnnnnnnnncggnnnnnnnnnnnnnnnnnnnnnnnnnnnnnnnntgggggaagcgtccctgaaatagtaaatattattgagctnnnnnnnnnnnnnnnnnnnnnnnnnnnnnnnnnnnnnnnnnngaggtgggaaaactgaaacccaccttgattcgnnnnnnnnnnnnnnnnnnnnnnnnnnnnnnnnnnnnnnnnnnaacgaggaaggaaggagcagttggttcaatctctggtaatctatgccagcaattatgacaatgttagcagaccatgcagctcgtcagctgcttgatttcagccaaaaactggatatcaacttattagataatgtggtgaattgcttataccatggagaaggagcccagcaaagaatggctcaagaagtactgacacatttaaaggagcatcctgatgcttggacaagagtcgacacaattttggaattttctcagaatatgaatacgaaatactatggactacaaattttggaaaatgtgataaaaacaaggtggaagattcttccaaggaaccagtgcgaacgaataaaaaatacgttgttggcctcattatcaagacgtcatctgacccaacttgtgtagagaaagaaaagtgtatatcggaaaataaatatgatccttgttcagatactgaaacaagaatggcccaaacattggccaccttttatcagtgatattgttggagc

SEQ ID NO: 185303 - DNA, 2303 bp, Homo Sapiens
ttgtacaaaaaagttggctcatctggcattaataagatagatacagaaagaataatgacagagaagcttcacaatcaagtgaatggtacagagtggtcatggaaaaatttgaatacattgtgttgggcaataggctccattagtggagcaatgcatgaagaggacgaaaaacgatttcttgttactgttataaaggatctattaggattatgtgaacagaaaagaggcaaagataataaagctattattgcatcaaatatcatgtacatagtaggtcaatacccacgttttttgagagctcactggaaatttctgaagactgtagttaacaagctgttcgaattcatgcatgagacccatgatggagtccaggatatggcttgtgatactttcattaaaatagcccaaaaatgccgcaggcatttcgttcaggttcaggttggagaagtgatgccatttattgatgaaattttgaacaacattaacactattatttgtgatcttcagcctcaacaggttcatacgttttatgaagctgtggggtacatgattggtgcacaaacagatcaaacagtacaagaacacttgatagaaaagtacatgttactccctaatcaagtgtgggatagtataatccagcaggcaaccaaaaatgtggatatactgaaagatcctgaaacagtcaagcagcttggtagcattttgaaaacaaatgtgagagcctgcaaagctgttggacacccctttgtaattcagcttggaagaatttatttagatatgcttaatgtatacaagtgcctcagtgaaaatatttctgcagctatccaagctaatggtgaaatggttacaaagcaaccattgattagaagtatgcgaactgtaaaaagggaaactttaaagttaatatctggttgggtgagccgatccaatgatccacagatggtcgctgaaaattttgttccccctctgttggatgcagttctcattgattatcagagaaatgtcccagctgctagagaaccagaagtgcttagtactatggccataattgtcaacaagttagggggacatataacagctgaaatacctcaaatatttgatgctgtttttgaatgcacattgaatatgataaataaggactttgaagaatatcctgaacatagaacgaactttttcttactacttcaggctgtcaattctcattgtttcccagcattccttgctattccacctacacagtttaaacttgttttggattccatcatttgggctttcaaacatactatgaggaatgtcgcagatacgggcttacagatactttttacactcttacaaaatgttgcacaagaagaagctgcagctcagagtttttatcaaacttatttttgtgatattctccagcatatcttttctgttgtgacagacacttcacatactgctggtttaacaatgcatgcatcaattcttgcatatatgtttaatttggttgaagaaggaaaaataagtacatcattaaatcctggaaatccagttaacaaccaaatctttcttcaggaatatgtggctaatctccttaagtcggccttccctcacctacaagatgctcaagtaaagctctttgtgacagggcttttcagcttaaatcaagatattcctgctttcaaggaacatttaagagatttcctagttcaaataaaggaatttgcaggtgaagacacttctgatttgtttttggaagagagagaaatagccctacggcaggctgatgaagagaaacataaacgtcaaatgtctgtccctggcatctttaatccacatgagattccagaagaaatgtgtgattaaaatccaaattcatgctgttttttttctctgcaactcgttagcagaggaaaacagcatgtgggtatttgtcgaccaaaatgatgccaatttgtaaattaaaatgtcacctagtggccctttttcttatgtgttttttgtataagaaattttctgtgaaatatccttccattgtttaagcttttgttttggtcatctttatttagtttgcatgaagttgaaaattaaggcatttttaaaaattttacttcatgcccatttttgtggctgggctgggggggaggaggcaaattcgatttgaacatatacttgtaattctaatgcaaaattatacaatttttcctgtaaacaataccattttttaattagggagcattttccttctagtctatttcaccctagaggaaaagatatgagtaaaacaattgcgttgtttaaagggattatagtgctgcattgtc

SEQ ID NO: 185304 - DNA, 1403 bp, Homo Sapiens
ttggattaaaataatttgcttttcaggtattaatatgacatttgtcattgtcactgatttttttaaaaaagcaatgcacatgttggttgtggctgttttccgcatgctatcttcatatctaaatgcttcattaattatccgagcctccggagaattaactctattacgtttgtatagtaagtttgtaaactgcttggcaaactgattaagaaataatttgcaataccgtgctactaaagtggcaggtttctggtagaaattgtgcgagtccaatttggagttttaagttccttgattgatgaaactaaaaaggcaattttggaaaaagagagggggaaaagtagatcacttatcttagcaaacggttgaaaatatgtctgtcctctgtggccccaaatccagtgaaagaaattctcccagtaaaagttgcttcctaactctgtttttctcagaatacctcttacctttctcaaagaaagcttcaaccaccatcatcagaaagaaggtggcctaaaaactgacacatggccagtgcccggaggggtctggaggcataagtctagatgcccagagagcatccaggcactgaactgctcagagcttgagatgaaatgacatacaagcttcagggtaaaactgtctactagcaagattacctccctcaattctaccattgcagatttcttctgaccccaaatgcaaccttacagagaatgctgaatgaggaaggccaattccttacaatgatggcagaacccccaagcgaatgccctattgaggagaaggacatcactgtatttggaattctgcctgctagtgatagctcacacatcacatcccagaatcccactcccaatgcattatttcctgaggcaagaacttaaggtcctcacctaattcctccatcacaaccattaactcttattggacaagctcctcctgtgagtggggcctgtactcacttcctcttagatcataattccatcttcaagagactgatttccagaatagtaatctttttccagcgttctctcttctccaatgccctggttgttatttttcccacctctcctaatattgatcttcttgtcttttggttagaactgcaacttcggagttgagttcatttcctattgctgctcaattcagtagcaacatagctggcttgttcccagacccaggaagtataagtcattgacagtttcctgagtggctctgccaatccataccacccttggtactgtgaaaaggcttcttggcagccaggtggcattgaggatggtattcagggcgctttccttctgtcatatagttgtgggatctctaccaagtgtgaaggtgaatgaggtaaagggagatcagaaccatgcttcctggtttttcatacatccaaggaagaagtc

SEQ ID NO: 185305 - DNA, 965 bp, Homo Sapiens
  misc_feature (83)..(125): n is a, c, g, or t
gccaactttgtacaaaaaagttggagcatcaccatcgtctgttcgatacagctcaagcaagcactactcttcctcccgcagtnnnnnnnnnnnnnnnnnnnnnnnnnnnnnnnnnnnnnnnnnnntgtcatccctaagaatttctagcagcaaaggctcccttggtggaggatttagctcaggggggttcagtggtggctcttttagccgtgggagctctggtgggggctgctttgggggctcatcaggtggctatggaggattaggaggttttggtggaggtagctttcgtggaagctatggaagtagcagctttggtgggagttatggaggcagctttggagggggcagtttcggaggtggcagctttggtgggggcagctttggtggaggcggctttggtggaggcggctttggaggaggctttggtggtggatttggaggagatggtggccttctctctggaaatgaaaaagtaaccatgcagaatctgaatgaccgcctggcttcctacttggacaaagttcgggctctggaagaatcaaactatgagctggaaggcaaaatcaaggagtggtatgaaaagcatggcaactcacatcagggggagcctcgtgactacagcaaatactacaaaaccatcgatgaccttaaaaatcagattctcaacctaacaactgataatgccaacatcctgcttcagatcgacaatgccaggctggcagctgatgacttcaggctgaagtatgagaatgaggtagctctgcgccagagcgtggaggctgacatcaacggcctgcgtagggtgctggatgagctgactctgaccaaggctgacctggagatgcaaattgagagcctgactgaagagctggctatctgaagaagaaccacgatgaggaaatgaaagacctttcgaaatgtgtccactgggtgatgtgaaatgtggaaatgaatgctgcccc

SEQ ID NO: 185306 - DNA, 1711 bp, Homo Sapiens
ttggcctcatccagtctcttccagcctagagatcctggcctacccctccgccaaagcgcgcactgagtgcaaaccccagagtcaatccctgtcccggctccgccccccgcgtccgaatcccgcccagccgggccctcaagcctagtcgggactcgagcctagggaggcgaggttcccgcaccggatagaaaatgtcactgaaattcacaaatgcaaaacggattgaaggacttgatagtaatgtgtggattgaatttaccaaattggctgcagacccttctgttgtgaatcttggccaaggctttccagatatatcccctcctacatatgtaaaagaagaattatcaaagattgcagcaatcgatagcctgaatcagtatacacgaggctttggccatccatcacttgtgaaagctctgtcctatctgtatgaaaagctttatcaaaagcaaattgattcaaataaagaaatccttgtgacagtaggagcatatggatctctttttaacaccattcaagcattaattgatgagggagatgaagtcatactaatagtgcctttctatgactgctatgagcccatggtgagaatggctggagcaacacctgtttttattcccctgagatctaaacctgtttatggaaaaagatggtctagttctgactggacattagatcctcaagaactggaaagtaaatttaattccaaaaccaaagctattatactaaatactccacataacccacttggcaaggtgtataacagagaggaactgcaagtaattgctgacctttgcatcaaatatgacacactctgcatcagcgatgaggtttatgaatggcttgtatattctggaaataagcacttaaaaatagctacttttccaggtatgtgggagagaacaataacaataggaagtgctggaaagactttcagtgtaactggctggaagcttggctggtccattggtccaaatcatttgataaaacatttacagacagttcaacaaaacacgatttatacttgtgcaactcctttacaggaagccttggctcaagctttctggattgacatcaagcgcatggatgacccagaatgttactttaattctttgccaaaagagttagaagtaaaaagagatcggatggtacgtttacttgaaagtgttggcctaaaacccatagttcctgatggaggatacttcatcatcgctgatgtgtctttgctagatccagacctctctgatatgaagaataatgagccttatgactataagtttgtgaaatggatgactaaacataagaaactatcagccatccccgtttcagcattctgtaactcagagactaaatcacagtttgagaagtttgtgcgtttttgcttcattaaaaaagacagcacactggatgctgctgaagaaatcatcaaggcatggagtgtacagaagtcttgatttgtgcagaatggattaatgtttctgttagatgacctagtatggaattgttacttagtgctgccacctgctggatgttaaaaggtatttcagtacaactggaatttaaatatttccattgtttttccaaagcagttaacccaactcctaacaacattttcgggggatctgaccttttttttccagttgaaatgtattaacacaccttccacaatcattttataagagtcagcataacatagtggataagaaatgtg

SEQ ID NO: 185307 - DNA, 1210 bp, Homo Sapiens
aattgatgagcaatgctttctttataaagccaactttgtacaaaaaagttggcaaaagaatggacgatgaggataaacagcaggaaacacagtctcccacgatgtcacccctcgcctcccctccttcttccccgcctcattaccagagggtgcccttgagccatggctacagcaaactgcggagcagcgcagaacagatgcatccagcaccttatgaagctaggcagccccttgtccagcccgagggatcctcatcagggggcccaggaaccaagccccttcggcatcaggcttcccttatccggtccttttcagtggagagggaactacaggataacagcagttaccccgacgaaccctggaggataacagaagaacagcgcgagtactatgtcaatcagttccgatcccttcagccagacccaagctctttcatttcaggttctgtggccaagaacttcttcaccaaatcaaagctttccattccagaactctcctatatatgggagcttagtgatgctgactgtgatggagccctgaccctgcctgagttctgtgctgcgtttcatctcattgtggctcggaagaacggctacccattgcctgagggcctccctccaactctgcagccagaatacctgcaggcagcttttcctaagcccaaatgggactgtcaattatttgattcttattctgagtcactgccggcaaatcaacaacctcgtgacttgaatcggatggagaagacatctgttaaagacatggctgaccttcctgtccctaaccaggatgtaactagtgatgacaaacaagctttgaaaagtactatcaatgaagccttaccaaaggacgtgtctgaggatccagctaccaagtcaggattgttacccccaccacctgcgctccctccaagaccttgtccatcacagtctgaacaagtgtcggaggccgagttactcccacagctgagcagagccccatcccaggctgcagaaagtagtccagcaaagaaggatgtactgtattctcagccaccatcaaagcccattcgtaggaaattcagaccagaaaaccaagctacagaaaaccaagagccttccactgctgcaagtgggccagcttctgcggcaaccatgaaaccgcatccaacagtccaaaagcagtcttccaaacagaagaagccattcaaactgctatccgcaaaaataaa

SEQ ID NO: 185308 - DNA, 1124 bp, Homo Sapiens
  misc_feature (899)..(907): n is a, c, g, or t
ctttgtacaaaaaagttgggttttcattaaccgagccattctggcactttaatgataaaatcccattgtatttaaaacatttcatgtatttctttagaacaacataaaattaaaatttaacatctgcagtgttctgtgaatagcagtggcaaaatattatgttatgaaaaccctcgatgttcatggaattggtttaaacttttatgcgcaaatacaaaatgattgtctttttcctatgactcaaagatgaaagctgtttcatttgtgtcagcatgtctcagattgaccttaccaagttggtcttactttgttaatttatctgttgtccccttcctctcctctgccctcccttcttgtgcccttaaaaccaaaccctatgccttttgtagctgtcatggtgcattttgtctttggaaaattcagataatggtaatttagtgtatatgtgattttcaaatatgtaaactttaacttccactttgtataaatttttaagtgtcagactatccattttacacttgctttatttttcattacctgtagctttgggcagatttgcaacagcaaattaatgtgtaaaattggattattactacaaaaccgtttagtcatatctatctaatcagatcttcttttgggaggatttgatgtaagttactgacaagcctcagcaaacccaaagatgttaacagtattttaagaagttgctgcagattcctttggccactgtatttgttaatttcttgcaatttgaaggtacgagtagaggtttaaagaaaaatcagtttttgttcttaaaaatgcatttaagttgtaaacgtctttttaagcctttgaagtgcctctgattctatgtaacttgttgcagactggtgttaatgagtatatgtaacagtttnnnnnnnnngttggtattttataagcacagacaattctaatggtaacttttgtagtcttatgaatagacataaattgtaatttgggaacataaaaactactgaataaatcatgtggcctaatattgaaaatgtcactgttataaattttgtacatttttgatcaaatgtacatctcccctttgctaacggccgtctgctctcaaaggatgacgtgggtttgatttc

SEQ ID NO: 185309 - DNA, 1257 bp, Homo Sapiens
ttggggataaacacaaagttcacctctcggactctcaccggaaaatggacccagcctaataggatacacttgtgtatacgcctgaaacaatcagacagtctgtttaaacggacagaagtcctagcagctgtcattgctggtggagttattggctttctctttgcaatttttcttatcctgctgttggtgtatcgcatgagaaagaaggatgaaggaagctatgaccttggagaacgcaaaccatccagtgctgcttatcagaaggcacctactaaggagttttatgcgtaaaactccaacttagtgtctctatttatgagatcactgaacttttcaaaataaagcttttgcatagaataatgaagatctttgttttttgttttcattaaagagccattctggcactttaatgataaaatcccattgtatttaaaacatttcatgtatttctttagaacaacataaaattaaaatttaacatctgcagtgttctgtgaatagcagtggcaaaatattatgttatgaaaaccctcgatgttcatggaattggtttaaacttttatgcgcaaatacaaaatgattgtctttttcctatgactcaaagatgaaagctgtttcatttgtgtcagcatgtctcagattgaccttaccaagttggtcttactttgttaatttatctgttgtccccttcctctcctctgccctcccttcttgtgcccttaaaaccaaaccctatgccttttgtagctgtcatggtgcaatttgtctttggaaaattcagataatggtaatttagtgtatatgtgattttcaaatatgtaaactttaacttccactttgtataaatttttaagtgtcagactatccattttacacttgctttatttttcattacctgtagctttgggcagatttgcaacagcaaattaatgtgtaaaattggattattactacaaaaccgtttagtcatatctatctaatcagatcttcttttgggaggatttgatgtaagttactgacaagcctcagcaaacccaaagatgttaacagtattttaagaagttgctgcagattcctttggccactgtatttgttaatttcttgcaatttgaagtacgagtagaggtttaaagaaaaatcagtttttgttcttaaaaatgcatttaagttgtaaacgtctttttaagcctttgaagtgcctctgattctatgtaacttggttgcagactggtgttattgagtatatgtaaacagttt

SEQ ID NO: 185310 - DNA, 1720 bp, Homo Sapiens
  misc_feature (1366)..(1375): n is a, c, g, or t
ttggcacagcgaggcgctagggggaacgctggcctctgaaactagctctgggaccggggtctgcggccggcccctagctggccccgtctcccatccccagaagggtattcactggggattctgagctttggctactccagtttcccacgacacgatgttccctttctacagctgctggaggactggactgctactactactcctggctgtggcagtgagagaatcctggcagacagaagaaaaaacttgcgacttggtaggagaaaagggtaaagagtcagagaaagagttggctctagtgaagaggctgaaaccactgtttaataaaagctttgagagcactgtgggccagggttcagacacatacatctacatcttcagggtgtgccgggaagctggcaaccacacttctggggcaggcctggtgcaaatcaacaaaagtaatgggaaggagacagtggtagggagactcaacgagactcacatcttcaacggaagtaattggatcatgctgatctataaagggggtgatgaatatgacaaccactgtggcaaggagcagcgtcgtgcagtggtgatgatctcctgcaatcgacacaccctagcggacaattttaaccctgtgtctgaggagcgtggcaaagtccaagattgtttctacctctttgagatggatagcagcctggcctgttcaccagagatctcccacctcagtgtgggttccatcttacttgtcacgtttgcatcactggttgctgtttatgttgttggggggttcctataccagcgactggtagtgggagccaaaggaatggagcagtttccccacttagccttctggcaggatcttggcaacctggtagcagatggctgtgactttgtctgccgttctaaacctcgaaatgtgcctgcagcatatcgtggtgtgggggatgaccagctgggggaggagtcagaagaaagggatgaccatttattaccaatgtagattgcactttatatgtccagcctcttcctcagtcccccaaaccaaagctacacagccagatttctcaagcagtctcaactccagtccctcatctcacccttactattgctcttgctttccagtttgcttttgatttgcatcttctcactagtaaaactgccttccctttgttccttattttctgttttttctctagagaggtacagttgtaagtcagagttaatataatagggcctgtgaaaacagaggcttttgcattgtctcttgacatcagaagttacaataggcatatgggcaaaatggtgtagcaggctcactggccgtttgttttttaaacacattttcacaagtttttgagacactggatttctttaattnnnnnnnnnntgccaagaaacattatttatacagggttgattgctttcatgttgttattctgtaccctatagtagcctccatgagaatctggtatttcttgctgcttggaactactttgcagtgattacttggttgcagtccaagtactctcgtttagtctgagcctggagatgttctagacttgcttctcccacctctgagattaggacaggaaaaatgtgaaatttcccaattacaggattatacggtaccatcacatcatttgtggaaattggggtgactgtatagctgggattgggctaaggactgtggtcttatctgtccacatacagccaaaatgcctatccagaaatc

SEQ ID NO: 185311 - DNA, 1110 bp, Homo Sapiens
agcaatgcttttcttataatagccaactttgtacaaaaaagttggctcagattgttctcaaaaagaggaaccaaggacgaggtgcaggaaatgtgtgaaacagctgttgaatatgctccagattatcaaagcttttggacttttctacacctagaaagtacctttgaagaaaaggattacgtatgtgagagaatgttggagtttctgatgggagcagccaagcaggaaacatccaatattttgtcctttcagcttttagaggctcttttgtttagagttcagctgcacatatttactggaagatgccaaagtgcactggcaattttacagaatgcattgaaatctgctaatgatggaatagtagctgaataccttaaaaccagtgatcgatgtttggcatggttggcctacatacatcttattgaattcaacattctcccttcaaaattttatgatccatctaatgataatccttcaagaattgttaacactgaatcatttgtaatgccatggcaagctgttcaagatgtaaagactaatcctgacatgttgttagcagtttttgaagatgcagtgaaagcttgcacagatgagagccttgctgttgaggaaagaatagaggcctgccttccactttacacaaacatgattgctctgcaccaactcctggagaggtatgaggctgcaatggagctttgtaaatctttattggaatcatgtcctattaactgccagttgctggaagcccttgttgcattatatttgcaaacaaatcagcatgacaaagccagagcagtgtggcttactgcatttgaaaaaaatcctcagaatgcagaggttttttatcatatgtgcaaattcttcatcttacagaatcgaggcgataatcttcttccatttttgcggaaatttattgcatccttctttaaaccggggtttgagaagtataataacttggatctgtttcggtatctcttaaatattccaggaccaattgacattccatctcgtttatgtaaagggaattttgatgatgatatgtttaaccaccaagttccttatttgtggctgatttactgcctttgtcatcctcttcaatcaagtattaaa

SEQ ID NO: 185312 - DNA, 1445 bp, Homo Sapiens
  misc_feature (56)..(68): n is a, c, g, or t
ctttgtacaaaaaagttggcctgcttcctgaaagctgttggatttcagtgattttnnnnnnnnnnnnnagcacaggagagcacccacagccgcagaaggggaatgtgtcctcctgctctgcttcctcagggcccagcaggcgggggtttgagccctggaccccaggctcttagagactaaggggcagctcctgaccaaagacgatacagcttggcactttaaagcattaacagcaggtgtgaccctgagggctcctccatggtgctgcattgagtccagctttccttctgcccttcctccaggagaaggggcccaaggtccccgtggatggtctccacctgtgcttggaaccagtgtaactggctgctccctgctcccagggactgacacggggatcatctctgtgaccgccctccgtcgggcccctgcctgccttctcccctccacgcaaggctgtgctcttcctctggtttctgtgtgtccgtttgagtgtctgcgccccgcctccccatacttcctgggatgatgtgtgaaacctgacacctagatttatttggagatattctatgaccactttacagatgaggaaactgaggcctcaagcgtggaggggtagagtgaagagtagaacccaggtctgatgccaaagctgctttcttctctgcctcctcctcacgcaactcacacctccttttcttctagctttgttgtcctcccaggaaccaaaaaaccccagctattttctgaccaaaatgtgtttcataacaaacccatctgggtgcctttccacacagaactggcagagcctcgtgtcctgctagctgtctctcttgttgatttccgtgaaatgcaagtgtttgaagtctgctcattccgagggtgaaacaaaatccaaccctgtcagaatcatgctgttctctttgctgacactgtgaccctgggtcgggacagaccagcagcaatctgtctttagaatcgctttccttcctccccttttgcccccgtggggctcccggcatcctgaaagccagcaaagcctccagcatcttttccatcctgaggtgcctcccagtggcctggcttgtcggagcaagtttcatcagccctagggaaaacacggccctcctgggaacctccttacctggagtaaccggacaccttagacggaggtgcctgagggtggggtgggatttgcagggtcattatcagaacatgaggataacttccttgcccctgctctgtagccacctccttggcaccggcctctatttgtcataaggcggcgtgggcgaggcctgacacaggccagccttggcacgaggggggccaggggttctgagaagcgctgccctgtgagagccacgctggccttcgtctccatctctggttgacgggctgtccgtgtgcctcctgtgtgtctgcagacagtcttgctgtgctttatt

SEQ ID NO: 185313 - DNA, 2157 bp, Homo Sapiens
  misc_feature (978)..(1037): n is a, c, g, or t
  misc_feature (1507)..(1515): n is a, c, g, or t
  misc_feature (1595)..(1664): n is a, c, g, or t
  misc_feature (1944)..(1975): n is a, c, g, or t
ttggctcctcctcctcctcagaagatgaacgacccaagagatcccatgtgaagaatggtgaggttggcaggcggggagacattccccttcccggagtgcttctccatcaccacgaaagcgccaaaaagagacttcccctcggatgcagatgggaaagcgatggcaatcgccagtgactaaaagtggtagacggaggagaagtccatccccaccacccaccagaaggcgacggtctccttctcccgcccctcctcctcgacggcgcaggactcccacaccaccaccacgacgaaggactccttctcctcccccacgtcggcgctcaccttctcctagaagatactctcctccaatacagaggagatactctccttctccacctccaaagagaagaacggcttcacctcctccccctcctaaacgaagagcatcaccatctccaccaccaaagcggcgggtctcccattctccacctcccaaacaaagaagctccccagtcaccaagagacgttcaccttcattatcatccaagcataggaaagggtcttccccaagccgctctacccgggaggcccgatcaccacaaccaaacaaacggcattcgccctcaccacggcctcgagctcctcagacctcctcaagtcctccacccgttcgaagaggagcgtcgtcatcaccccaaagaaggcagtccccgtctccaagtactaggcccattaggagagtctccaggactccggaacctaaaaagataaaaaaggctgcttccccaagcccacagtctgtaagaagggtctcatcctcccgatctgtctccgggtctcctgagccagcagctaaaaagcccccagcacctccatcccccgtccagtctcagtcaccgtctacaaactggtcacgcagctgtaccggtcaaaaaggccaaaagcccaacaccgagcccatcaccgccaagaaattcagatcaggaaggaggtnnnnnnnnnnnnnnnnnnnnnnnnnnnnnnnnnnnnnnnnnnnnnnnnnnnnnnnnnnnncacaaaaaacacaagaaggaaaaggctgtggctgcagctgctgcagctgctgtgacccctgcagccattgcagctgccacaaccacattagcacaggaagagccagtggcagcgccagagccgaagaaggagactgaaagtgaagctgaagataaccttgatgatttagaaaagcacctgcgtgaaaaggccctgagatcaatgaggaaggcccaagtgtccccacagtcttagggggaaatgtttgttatgatgtaaattttatttggtttgtacgcagttcaatttcaaaattgctaaaatgtgtttgagctttagactataacatttgttgtaataattgctaggttgaagttcaacatgtaaaaaaagggggcatggatttacattgcaaaaggtgtccacagtgtattagtgacattctttcattgacagctgacataattcattgagtgaaatattttaagccnnnnnnnnnttccctttttaaaaaagggggtttaaatactgttggcatttttatggttcctttaaatgccctagctattcccagagggnnnnnnnnnnnnnnnnnnnnnnnnnnnnnnnnnnnnnnnnnnnnnnnnnnnnnnnnnnnnnnnnnnnnnngagtcttagctcccatttaagttatgcttctgaccttgtatggtctgtaagcttgcccagaaataagaccactgttttgaactaccacaaaagtataaatgaatattttaatgccacaatctttcctgttgcctgtggagtctctgctgaaatgaatcaggattcgagctctaggatgagacagaaaatgaaagcatgttgtttgccaggacactgtgggtttatattgatgtgtaacaagttgatttggaacactggactctcattctgttattctggnnnnnnnnnnnnnnnnnnnnnnnnnnnnnnnngtaaaggcaatgagctagtcccagaaaggatccttcagttacatacaatttgtttaatgaaatgtcatggctctgttcatatttttgtcttgttcttccaattggtatatacaactttcagagcctcttgtatttggaaggctggaagggcccagactttggaatagtgtcttggtttcact

SEQ ID NO: 185314 - DNA, 2595 bp, Homo Sapiens
  misc_feature (2407)..(2441): n is a, c, g, or t
ttgggctttaaatactgaggaaaatgtggcctgtttacaaaacattcagcacgttgaagaaagtgttcccaatggagtggaagatgtgcttcaaacagatgacaacatggagatctgcactcctgataggagttccccagcaaaagtagaggagacttcccctctaggaaatgcacggcttgataccccagatataaacattgttttgaagcaggatatggcaacggaacatcctcaagcagaggtagtaaaacaggaaagcagcatgtccgaaagtaaagtgttgggtgaagtggggaaacaggacagcagctctgctagcttggctagtgctggagaaagtaccgggaagaaggaggtggctgagaagagccagatcaacctcattgataagaaatggaagcccctgcaaggtgtggggaacctggcagcacctaatgctgccacatccagtgctgtggaagttaaggtgttgaccactgtgcctgaaatgaaaccacaaggcttgagaatagaaattaaaagcaaaaataaagttcggcctgggtctctctttgatgaagtaagaaagacagcacgcttaaaccgtagaccaagaaatcaggagagttcaagtgatgagcagacgcctagtcgggatgatgatagccagtccaggagtccaagtagatctcgaagtaaatctgaaaccaaatcaagacacagaacaaggtctgtctcctatagtcactcaagaagtcgatcgagaagttccacatcatcttatcgatcaagaagctactctagaagtcggagcagaggatggtacagcagaggccgaaccagaagccggagcagttcctaccggagttacaaaagtcacaggacgtccagcaggagcagatccaggagcagctcatatgatccccacagtcgatccagcaggtcctacacctacgatagctactatagcaggagtcggagtcgaagtagaagccagagaagtgacagttaccaccgaggcagaagttataatcggcggtccaggagttgtagatcttatggctctgacagtgaaagtgaccgaagttactctcatcaccggagccccagtgagagcagcagatacagttgaaaacgtccggatacaaattatatcttatttgtaaatatctggcaacttagcttaagaaatgtaatgacagtctgttgttctatttcaatatcagaggtgaatttcaaaaatagacacttcttaattgttactggttcatttacatgtggggagaagaatttaaaatacagatatgtctcctaaaaatatttttatgccacattttacagtagccaactatggaaatgaatttcattttcttgaatcaagaaatcgtgaaatttatctatgtataatttgcaatattattttaagtctatttcactctatcttacgtatcccttagaatacagattctttttgcctgtttttccagttttagcatatatgctgccaagcatagaactgtgaaggagaactgttaaaggcggccaaatatttatatactgattacatagagtcttgtacatatgtgctctaaaaacaaaccacccagaattgatactgttggtaaccaggagtataaggcagtggctctggggttcttaattcattcctaacttctttgatacttcacaggattaggaaagtggtcatcatacatcccacacagtctgtattacttcaggcttgtgggcaaggttaggaagaatcaatcagccttaactataaatacctgcactgtctctgaggacttactattttatgttctttttaatcaataccgatcagaagtttaggttataaaaacaattctacttcatgctttggtgcttggtaatttttggtgcgtctttaagcattactcttatatatcatatattaaaataccataaaaatgaaattcagacaaaatcactggcaccaaaaatggtttattctgagctgtcttcactttgactatttggggggcttctctcaagtacagatgtgggttggggtcccctggagcaggcaggattggcagtaagagatattggccactcaagtctactgtgtgtgtgtgcctctggaagagtgaagaatggacttcaaaagtaacatcaaaaatctaactgccaccatcctggagacattttgcagggctttcctttcaagtctttcaagtacaggatattaccacaacagcagctgaactgttgtaaccagcatgtttttcctatttccactgtgacctgcagctgactcaaagccttgcgtgacctgacccaggtgcaagagacaggggaagagggatagagggtatagcataaattacatattttcatggctttgggtggttcctccaaaaataattggacctgtaaaaactannnnnnnnnnnnnnnnnnnnnnnnnnnnnnnnnnngtttttatttttaatctttactttgaatttgttccccaagtgtacttaatcaccttagtgccagtttactccagttatgcagaataaattcatattggttgcctgatgtagagctcagcaccaccctaccacaggccttgtctggtgtatttgg

SEQ ID NO: 185315 - DNA, 1338 bp, Homo Sapiens
  misc_feature (99)..(144): n is a, c, g, or t
  misc_feature (234)..(249): n is a, c, g, or t
  misc_feature (251)..(261): n is a, c, g, or t
ttggctatgcatatgttcctgtatgctttcagttatctctagatacttattataatacctaatacaatgtaaatgctatgtaaatagttgttataccannnnnnnnnnnnnnnnnnnnnnnnnnnnnnnnnnnnnnnnnnnnnncccaaatattttccatccatggttggttgaatccattgatgcagaacctgcagatatggagggcagactgtattaacttcagaaggtaannnnnnnnnnnnnnnngnnnnnnnnnnnaatctttactttgaatttgttccccaagtgtacttaatcaccttagtgccagtttaatccagttatgcagaagaaattcatattggttgcctgatgtagagctcagcaccaccctaccacaggccttgtctggtgtatttgggaagtggaaaagagccctcagttggagggagctgacaacccttggtggagggagggtgcccttgaatgtattaaaactatcacccaaagaaggtatgaaaacagggtaaggtggtcagttgtttgccaggtcaatagacagaaagtacattagaaaacaggacttaggccaaacaaacaatactggatactgaatacaaaacagtatgatttatattaaaggtttccaaaggttgcctgcaaaggagaatattactactagtcagcaggaaaaaaatgcattcagaacccaagcagaaactgccaaatgtaattaggttaagaaaagttacccttgggcagtgtattagttttctattgctgtgtgacaaattaccccaaatttagcagtttaaaaaacaatacccatagcagttctgtagctcatgagtctggcacagtgtggctggattctctgctcagggtcttaaaggctgaaataagggttggcaggacaacattccttcatggaggctctggggaagaatctgcttctaagttcattcaggttgttggcggaattcagttctttgctggctctcagctggaggcccctctctcacctcaaggctgcctgcattccttcttatgtggtcccctccagcttcaaaccagccttcctgctctttctcatgcttcatatctctctcccgtcctcctgttttaggggcatatgattagctcaagcccacagatatattttaaggttgattgtgcgatagaacataattgcagagtactgtctcatctcatcatattcacgggttctggagattagctcattgaaagtgggaggggcattttcaaattctgcctacacaggcaaataactgcccatctcagctgtagtggaatttttacccagaaagataggccctagaagcctcatttcttttc

SEQ ID NO: 185316 - DNA, 995 bp, Homo Sapiens
ttgtacaaaaaagttggatttatattccttggtttccaaaggttgcctgcaaaggagaatattactactagtcagcaggaaaaaaatgcattcagaacccaagcagaaactgccaaatgtaattaggttaagaaaagttacccttgggcagtgtattagttttctattgctgtgtgacaaattaccccaaatttagcagtttaaaaaacaatacccatagcagttctgtagctcatgagtctggcacagtgtggctggattctctgctcagggtcttaaaggctgaaataagggttggcaggacaacattccttcatggaggctctggggaagaatctgcttctaagttcattcaggttgttggcggaattcagttctttgctggctctcagctggaggcccctctctcacctcaaggctgcctgcattccttcttatgtggtcccctccagcttcaaaccagccttcctgctctttctcatgcttcatatctctctcccgtcctcctgttttaggggcatatgattagctcaagcccacagatatattttaaggttgattgtgcgatagaacataattgcaggagtactgtctcatctcatcatattcacgggttctggagattagctcattgaaagtgggaggggcattttcaaattctgcctaccacaggcaataactgcccatctcagctgtaggtggaatttttacccagaaaagataggccctagaagcctcatttcttttctccatggaaaaggacagccctctgctgcagcgttcaacttgtgtgtttactgacagagtgaactacagaaatagcttttcttcctaaaggggattgttctacattttgaagttattttttaataaaattgaattatgttgtgtattgtgcttcttaataggaaatgcattattggactgtttttgtaacatcctgtttattgcaaatagctagtatcgttcaaaaactgtataaaatacttttgtac

SEQ ID NO: 185317 - DNA, 1773 bp, Homo Sapiens
  misc_feature (1608)..(1616): n is a, c, g, or t
  misc_feature (1658)..(1677): n is a, c, g, or t
ccaactttgtacaaaaaagttggatcctcgcaaacacgccgtccttatgaacttcctgttcaccatgctgcgggaagagggtggctttgagtataagcgcgctatcgtggactgcatcatcagcatcattgaagagaactcagagagcaaggagacagggctgtcacatctgtgcgagttcatcgaggactgcgagttcacagtgctggccacccgtattctacatctcctgggccaggaggggcccaagaccaccaatccctcaaagtacatccgcttcatctataaccgagtggtcttggagcatgaggaggtccgggcaggtgctgtgagtgctctggcgaagtttggagcccagaatgaagagatgttacccagtatcttggtgttgctgaagaggtgtgtgatggatgatgacaatgaagtaagggaccgagccaccttctacctaaatgtcctggagcagaagcagaaggcccttaatgcaggctatatcctaaatggtctgactgtgtccatccctggtctggagagggctctgcagcagtacactctagaaccatcagaaaaaccttttgacctcaagtctgtgcccctggccacggcgcccatggcagagcagagaacagaaagtacccccatcacagcagtcaaacagcctgagaaagtggcagctaccaggcaggagatcttccaggagcagttggcagcagtgccagagttccgcggtcttgggcccctcttcaagtcctcgcctgagcccgtggccctcaccgagtcagagacggagtatgtcatccgctgcaccaaacacaccttcaccaaccacatggtttttcagtttgactgcacaaacacactcaatgaccagaccttggagaatgtcacagtgcagatggagcccactgaggcctatgaggtgctctgttacgtgcctgcccggagcctgccctacaaccagcccgggacctgctacacactggtggcactgcccaaagaagaccccacagctgtggcctgcacattcagctgcatgatgaagttcactgtcaaggactgtgatcccaccactggggagactgatgacgaaggctatgaggatgagtatgtgctggaagatctggaagttactgtagctgatcacattcaaaaggtcatgaaactgaacttcgaagcagcctgggatgaggtaggggatgaatttgagaaggaggaaacgttcaccttgtctaccatcaagacacttgaagaggctgtgggtaatattgtgaagttcttgggaatgcacccttgtgagaggtcagacaaagtgccggataacaagaacacccacacgttgctcctggctggtgtgttccggggtggtcatgacatcctggtgcgctcccggctgctgcttttggacacagtgacaatgcaggtgacagccagaagtttggaggagctgccagtagacatcatcttggcatctgtgggataagaggccagcctgcataggacctcatacccttccccaacactacctggaagttgtgccttcctcatgaaactggcagaaaccccttcccaagcttctgtattgaaaaacaattaggaaacattgcagannnnnnnnnattctgctcccacctcccacccgggactacttgctggtgacnnnnnnnnnnnnnnnnnnnnaaataggggatgattttagcttgtcctaaatcttgctgtccacccttccaggaaagggacattgtaaatgaataaaacatttctcaactcctcttg

SEQ ID NO: 185318 - DNA, 1370 bp, Homo Sapiens
ctttgtacaaaaaagttggcgaaaatctaggcttcgttgggcctttgaaaagccaggctgcagatcaaattacgaagctgtataatctcttcctgaaaattgatgctactcaggtggaagtgaatccctttggtgaaactccagaaggacaagttgtctgttttgatgccaagataaactttgatgacaacgcagaattccgacaaaaagacatatttgctatggacgacaaatcagagaatgagcccattgaaaatgaagctgccaaatatgatctaaaatacataggactagatgggaacattgcctgctttgtgaatggtgctgggctcgccatggctacttgtgatatcattttccttaatggtgggaagccagccaacttcttggatcttggaggtggtgtaaaggaagctcaagtatatcaagcattcaaattgctcacagctgatcctaaggttgaagccatccttgtcaatatatttggtggtatcgtcaactgtgccatcattgccaatgggatcaccaaagcctgccgggagctagaactcaaggtgcccctggtggtccggcttgaaggaaccaacgtccaagaggcccagaagatactcaacaacagcggactccccattacttcagccattgacctggaggatgcagccaagaaggctgtggccagtgtggccaagaagtgatgtctttgtcctgatccaatggagaaagaaagccatttttccgtaaaaagggatggttcatcattgtgaaagaaatggttatctcattggggaagaaaaggggagggggaaggcaagaatcactgaaaaatcttaaatctgtgttttctggaataagatatctagacagcctaaatctgattttggtctttataaaaataatatcttgtgttctcatacttttctgtcactgtaagcctgcccagtaggcagtgttttgcagactttggggagtggtctatgtggccaaatattgtgtgtatagacagaatttgaaatcaagtcctgcttcatttacaagaattttggtgggcatctaatcctacataatgaaaaagaaaaacagaccatttaaaaactcagacaagattatatttaatatattaattactaaaaaggcataagattacactgaacatattagctactaaaaaggcactgctaagacattcaagcaaatagctattacacactactgcagattttacaggtttctaattctaacatatgtttgaaaatccgtgagtattccaaaatatatttaataatggaatatctgcattaatataccatccatgtgtttttaccatttgccttaatattgaatatactgtttacctcacactaaaaagaaaa

SEQ ID NO: 185319 - DNA, 2926 bp, Homo Sapiens
  misc_feature (1170)..(1250): n is a, c, g, or t
  misc_feature (2810)..(2819): n is a, c, g, or t
ttgggccagttaccaacactggagcaggatggtgggactcaaaatccagtgtcttctcccgggatgtctcaggaattgagaacaatgacgaccaatagctcagatcctttccttaacagtggcacctatcactctcgagatgagagtacagacagtggactaagcatgagcagctacagtgtccctcgaaccccagatgacttcctgaacagtgtggatgagatggatacaggtgatactatcaaccaaagcaccctgccctcacagcagaaccgtttcccagactaccttgaagccattcctgggacaaatgtggaccttggaacactggaaggagatggaatgaacatagaaggagaggagctgatgccaagtctgcaggaagctttgagttctgacatccttaatgacatggagtctgttttggctgccaccaagctagataaagaaagctttcttacatggttatagagccctcaggcagactgaattctaaatctgtgaaggatctaaggagacacatgcaccggaaatttccataagccagttgcagttttcaggctaatacagaaaaagatgaacaaacgtccagcaagatactttaatcctctattttgctcttccttgtccattgctgctgttaatgtattgctgacctctttcacagttggctctaaagaatcaaaagaaaaaaactttttatttcttttgctattaaaactactgttcattttgggggctgggggaagtgagcctgtttggatgatggatgccattccttttgcccagttaaatgttcaccaatcattttaactaaatactcagacttagaagtcagatgcttcatgtcacagcatttagtttgttcaacagttgtttcttcagcttcctttgtccagtggaaaaacatgatttactggtctgacaagccaaaaatgttatatctgatattaaatacttaatgctgatttgaagagatagctgaaaccaaggctgaagactgttttactttcagtattttcttttcctcctagtgctatcattagtcacataatgaccttgattttattttaggagcttataaggcatgagacaatttccatataaatatattaattattgccacatactctaatatagattttggtggataattttgtgggtgtgcannnnnnnnnnnnnnnnnnnnnnnnnnnnnnnnnnnnnnnnnnnnnnnnnnnnnnnnnnnnnnnnnnnnnnnnnnnnnnnnntcggaacctaggcaaatgaccatattagtgaatctgttaatagttgtagcttgggatggttattgtagttgttttggtaaaatcttcatttcctggttttttttaccaccttatttaaatctcgattatctgttctctcttttatatacatacacacacccaaacataacatttataatagtgtggtagtggaatgtatccttttttaggtttccctgctttccagttaatttttaaaatggtagcgctttgtatgcatttagaatacatgactagtagtttatatttcactggtagtttaaatctggttggggcagtctgcagatgtttgaagtagtttagtgttctagaaagagctattactgtggatagtgcctaggggagtgctccacgccctctgggcatacggtagatattatctgatgaattggaaaggagcaaaccagaaatggctttattttctcccttggactaatttttaagtctcgattggaattcagtgagtaggttcataatgtgcatgacagaaataagctttatagtggtttaccttcatttagctttggaagttttctttgccttagttttggaagtaaattctagtttgtagttctcatttgtaatgaacacattaacgactagattaaaatattgccttcaagattgttcttacttacaagacttgctcctacttctatgctgaaaattgaccctggatagaatactataaggttttgagttagctggaaaagtgatcagattaataaatgtatattggtagttggatttagcaaagaaatagagataatcatgattatacctttatttttacaggaagagatgatgtaactagagtatgtgtctacaggagtaataatggtttccaaagagtattttttaaaggaacaaaacgagcatgaattaactcttcaatataagctatgaagtaatagttggttgtgaattaaagtggcaccagctagcacctctgtgttttaagggtctttcaatgtttctagaataagcccttattttcaagggttcataacaggcataaaatctcttctcctggcaaaagctgctatgaaaagcctcagcttgggaagatagatttttttccccccaattacaaaatctaagtattttggcccttcaatttggaggagggcaaaagttggaagtaagaagttttattttaagtactttcagtgctcaaaaaaatgcaatcactgtgttgtatataatagttcataggttgatcactcataataattgactctaaggcttttattaagaaaacagcagaaagattaaatcttgaattaagtctggggggaaatggccactgcagatggagttttagagtagtaatgaaattctacctagaatgcaaaattgggtatatgaattacatagcatgttgttgggattttttttaatgtgcagaagatcaaagctacttggaaggagtgcctataatttgccagtagccacagattaagattatatcttatatatcagcagattagctttagcttagggggagggtgggaaagtttnnnnnnnnnnttgtgaaggatttagggggaccttgatagagaaccttataaaccttctttctctttaataaaagacttgtcttacaccgtgctgccattaaaggcagctgttctaga

SEQ ID NO: 185320 - DNA, 1115 bp, Homo Sapiens
ctttgtacaaaaaagttggtgaagatttagggggaccttgatagagaactttataaacttctttctctttaataaagacttgtcttacaccgtgctgccattaaaggcagctgttctagagtttcagtcacctaagtacacccacaaaacaatatgaatatggagatcttcctttacccctcaactttaatttgcccagttatacctcagtgttgtagcagtactgtgatacctggcacagtgctttgatcttacgatgccctctgtactgacctgaaggagacctaagagtcctttccctttttgagtttgaatcatagccttgatgtggtctcttgttttatgtccttgttcctaatgtaaaagtgcttaactgcttcttggttgtattgggtagcattgggataagattttaactgggtattcttgaattgcttttacaataaaccaattttataatctttaaatttatcaactttttacatttgtgttattttcagtcagggcttcttagatctacttatggttgatggagcacattgatttggagtttcagatcttccaaagcactatttgttgtaataacttttctaaatatagtgcctttaaaggaaaaatgaacacagggaagtgactttgctacaaataatgttgctgtgttaagtattcatattaaatacatgccttctatatggaacatggcagaaagactgaaaaataacagtaattaattgtgtaattcagaattcataccaatcagtgttgaaactcaaacattgcaaaagtgggtggcaatattcagtgcttaacacttttctagcgttggtacatctgagaaatgagtgctcaggtggattttatcctcgcaagcatgttgttataagaattgtgggtgtgcctatcataacaattgttttctgtatcttgaaaaagtattctccacattttaaatgttttatattagggaattctttaatgcacacttgtccaaatatatatatatagtaccaatgttacctttttatattttgttttagatgtaaagagcatgctcatatgttaggtacttacattaattgttacattatttttttcttatgtaatacctttttgtt

SEQ ID NO: 185321 - DNA, 1043 bp, Homo Sapiens
  misc_feature (89)..(102): n is a, c, g, or t
ttggtgcttatctggaagacagggtagtgatgctgtcgtgttgtgtacttgttctttctcccgctgctgcatataatttttcaagggcnnnnnnnnnnnnnncatgactcctttagtgctcagcacataatagcaatcaagctgttattggatatctgaacaatgttgaagcaaaagtaaacttggcattgttattttgttatctgtgagttgtttgacctgatataaattctaggtatcagtttaggtcagtcaggagcgcttttctttccctgtgcatttctctgtgctcatatgatacagccctgatgttagcttttcaaaaaggactttgttatctctgtgtgtttccactaggtgatactatcaaccaaagcaccctgccctcacagcagaaccgtttcccagactaccttgaagccattcctgggacaaatgtggaccttggaacactggaaggagatggaatgaacatagaaggagaggagctgatgccaagtctgcaggaagctttgagttctgacatccttaatgacatggagtctgttttggctgccaccaagctagataaagaaagctttcttacatggttatagagccctcaggcagactgaattctaaatctgtgaaggatctaaggagacacatgcaccggaaatttccataagccagttgcagttttcaggctaatacagaaaaagatgaacaaacgtccagcaagatactttaatcctctattttgctcttccttgtccattgctgctgttaatgtattgctgacctctttcacagttggctctaaagaatcaaaagaaaaaaactttttatttcttttgctattaaaactactgttcattttgggggctgggggaagtgagcctgtttggatgatggatgccattccttttgcccagttaaatgttcaccaatcattttaactaaatactcagacttagaagtcagatgctttcatgtcacagcatttagtttgttcaacagttgtttcttcagcttcctttgtccagtggaaaaacatgatttac

SEQ ID NO: 185322 - DNA, 1471 bp, Homo Sapiens
ttggcttctcatatgtgttctgtgttcaagctcctgtgggcaactcaattgttttaagaaaactctatttctgttcatattaattcacttgccagactccaattctgaaagttgtctagttcttccttcatcacacgtgcttctcatcgaaaccctggtttcaggatggatcaagtgctgttacagctcatgttccttagacctgatttgttttgatattttactgcctttccttttaatttttgtttgaatgagaaaagtttaatacaacaggtgtccagaatacttgcagtataaatgaagatttggtttttgtataaaaaaataatgctgttaaacaggagttgaccttcatttagttgatgtaatacatagctgtatggggttttttttagtaagttctttgagcataattcactttaaagtcatttttccagcaatgtttaaattactttctcattcttttagtgtattcaacattgtctgcctcttcctgcagttgatgtaattgctttgtttgcaatagcacaagctgcattattccagtcaggactgtgataacttgctgccagccccactcaactttcagttggctctgtgtcagttttccactcagtgttaactacttgttactgccatgctgcttgccctcccttgaagtgtctataagctcatcacagcctagagttaagtaaagtcaattcacagaagcacaattttgccctttgcgagacattgttgcctctatctagtcctacaagtagggttttgcatactgtgtttgcccctagggttgtcagtgcatcagaaatacttctaaatagtggtaaaaatgcacatggttaatgcacatgttacttttaaatcattaggatatccctcacctgttcctgatgaataaaaagtgtgttaaagaccaaaattcttggcataataatcagctacatacaaatcacatatagtttaatcttttttaatgaaaaaaaatcatgtttaaaatggcaaaagcccatcttatacacttttatatagctgcaaaaaatttatatctgtacagatctaacactacgacactcagtattcattttattgaagcatgcaagtaaagcactttttctaatttatatagaggtatctaattaacacagcacattgtactaatgactaggagtagcagctttttcttctctccctctatgaattcttataatgtccctttttctgtaagtttttgagaggcaattggcaatttaggaggcagcagggtctgttttggtcaaatcttgaatttcgttgttgcactctagtgactgatctttgggaatgtcttgtctttgcatggggctcatagagatgtgtgcagacttgcttattgtggttagtgtgtatcaagaacacacacacaagtgttctgaccagctcagcttgccacagtgagcaactctgtggctagcaaaagaaaagtttattt

SEQ ID NO: 185323 - DNA, 1789 bp, Homo Sapiens
ttggggtcttcgctgaggcccggggcggggtggcgccacccctgattgcggtgccacggactgctcctgctgggcggagaggacagattttgcaaagcggaggctgcgacgggtcctgcagggggacagtgaggaaagggccgcctcgtctccgctcctgggggaccgcagaaataagaatcaaactccacaatgacaacctatttggaattcattcaacaaaatgaagaacgagatggagtccgatttagttggaatgtttggccatcaagtcgactggaagctacaagaatggttgttcctgtggcagccctgtttacaccactgaaagagagacctgacttaccacctattcaatatgaacctgttctgtgtagtaggaccacttgccgtgcagttttgaatcctttatgtcaagtggattatcgagcaaaactttgggcttgcaacttttgttaccaaaggaatcagtttccacctagttatgctggtatatctgaactgaatcagcctgctgaacttttacctcagttttctagcattgaatatgtagttctgcgtggcctcagatgcctttgatattcctctatgtggttgatacttgcatggaagatgaagatttacaagccctgaaagaatccatgcagatgtcattaagtcttttaccacctacagctttggttggacttattacttttgggagaatggttcaggttcatgaacttggatgtgaaggcatttcaaaaagctatgtcttcagaggaacaaaagatttgtctgccaaacaactgcaggaaatgctggggctctctaaagtaccagttactcaagcaacacgtggtcctcaggtacagcagccacctccttccaacagattcttacaaccagtacagaaaatagacatgaatctcacagatcttctgggagaactccagcgagacccttggcctgtaccacagggaaagagacctttgcgttcctctggggtggcactttccatagctgtaggactgctggagtgtacttttcccaacactggtgctcgtatcatgatgttcattggtggtcctgctactcaggggcctggaatggtggttggagatgagttgaagacacctataagatcgtggcatgacattgacaaagacaatgccaaatatgttaaaaagggaactaagcattttgaagcattggctaatcgagctgctacaactggccatgttattgatatctatgcgtgtgcattagatcagacaggtctcctggagatgaaatgctgtcccaaccttactggaggatacatggtaatgggtgattctttcaatacttccttattcaaacaaacttttcaaagagtctttaccaaagacatgcatggacagtttaaaatgggctttggtggtacgctagaaataaagacctcaagggaaataaagatttcaggagctattggaccctgtgtgtcactcaattctaaaggaccctgtgtgtctgaaaatgagataggaacaggtggcacatgtcagtggaagatatgtggacttagtcccactacaaccttagccatatattttgaggttgtcaatcagcataatgctccaattcctcaaggagggcgtggtgcaatccagtttgtgactcagtatcagcattcaagtgggcagagacgcatccgagtgaccaccattgctaggaactgggcagatgctcaaactcaaatccaaaacattgctgcatcttttgaccaggaggcagctgccattcttatgggcccggctagcaatatata

SEQ ID NO: 185324 - DNA, 2253 bp, Homo Sapiens
ataaaagccaactttgtacaaaaaagttgggttattgatatctatgcgtgtgcattagatcagacaggtctcctggagatgaaatgctgtcccaaccttactggaggatacatggtaatgggggattctttcaatacttccttattcaaacaaacttttcaaagagtctttaccaaagacatgcatggacagtttaaaatgggctttggtggtacgctagaaataaagacctcaagggaaataaagatttcaggagctattggaccctgtgtgtcactcaattctaaaggaccctgtgtgtctgaaaatgagataggaacaggtggcacatgtcagtggaagatatgtggacttagtcccactacaaccttagccatatattttgaggttgtcaatcagcataatgctccaattcctcaaggagggcgtggtgcaatccagtttgtgactcagtatcagcattcaagtgggcagagacgcatccgagtgaccaccattgctaggaactgggcagatgctcaaactcaaatccaaaacattgctgcatcttttgaccaggaggcagctgccattcttatggcccggctagcaatatatagagcagaaacagaagaaggtccagatgtgcttaggtggctggacagacagctcattcgactgtgtcagaaatttggagaatatcataaagatgacccaagttccttcagattttcagaaactttctccctttatccacagtttatgtttcatttaagaagatcttctttcctgcaagtttttaacaatagtcctgatgagagttcatattatcgtcaccattttatgcgtcaagatctgacccagtctctaattatgattcagcctatcctgtatgcgtattcttttagtggaccaccagagccggttcttcttgatagcagtagcattcttgcagatcgtattcttctcatggacacattcttccagattttgatttatcatggtgagaccatagcacagtggcggaagtcaggataccaggatatgcctgagtatgaaaatttccgccaccttctgcaagccccagtggatgatgcacaggaaattcttcactccagatttccaatgccaagatacattgacactgaacatggaggcagccaggcccgtttcctcctttcaaaagtcaacccttcacagactcataataatatgtatgcctgggggcaggagtctggagcacctattcttacagatgatgttagtttacaagtgtttatggatcacttgaagaaacttgctgtgtccagtgctgcttgaagtgctaataatgttaaagacacttaagaagatgaaataatattcaaatttcattttttcctttttccatttatctgtggaaaccaacagatattgctctatattttttgtattagtatggtttgagacaacatatggaaaatgttcacatttgtagattaagctggaattataatgagagcaataagaacaaatttattttgcttaccacagtgttatagctggttctagaaatttgaagtctttataacttaattatgtttaataaaaaatagagtctgcctcgtactacagatgtaactcatttgtatattgcagacagacccaaagtggcactgaattttcttgctcaccttttaaaaacttgttccttaattttagccagaaagcaaaaaaacaatagtaatgataaatgtgaacatttttgcttattcattgaatatttttctgtaattttcagcacttatgtatacactttttctgtacttactaggttaaggcagatttatttttatgatttgtttaggaattatttgattttataatggtaattttcatgatgataatgtttttggttatttggaaagatagtttagagatgaaaggtttttttgggtaacaatcccgcagctgacaaaaaatgtgaaatttccacaaaatatccaacttatgtgactaaacgcagtagtttttttaaaaggggagatagaaaataaatggttttgttggagtgcattttagtaagcctttgcagtaaaatgacggttgtaactactaaaccaaatttagttttcacagcatggttttgttggtttccccttgtttttcagaggtaaattttgcattatatccttcagtattttaacactattttggcagtttacacattactttttgtttttccttcctttttgtgaaatgtattaagttgtggttcttattgaaacagtatta

SEQ ID NO: 185325 - DNA, 833 bp, Homo Sapiens
ctttgtacaaaaaagttggatttttatgatttgtttaggaattatttgattttataatggtaattttcatgatgataatgtttttggttatttggaaagatagtttagagatgaaaggtttttttgggtaacaatcccgcagctgacaaaaaatgtgaaatttccacaaaatatccaacttatgtgactaaacgcagtagtttttttaaaaggggagatagaaaataaatggttttgttggagtgcattttagtaagcctttgcagtaaaatgacggttgtaactactaaaccaaatttagttttcacagcatggttttgttgttttccccttgtttttcagaggtaaattttgcattatatccttcagtattttaacactattttggcagtttacacattactttttgtttttccttcctttttgtgaaatgtattaagttgtggttcttattgaaacagtattatataatgtttgcttaattatatcatgtgatgctcagttctattttgatttattcattagtattcacttttacctttaaagtttacttgtagcaaatatgtttacattgataaagccagatatgttttgacaatgaaatttacatatcaagtactgcaaataaaaggtggtgctatgatatatgcttaggaggacagttttaatgattgtacttgcatgaacacaatcatatgatggtaaagcagaaacttaagaaaaaattgtttatgtgttatattcaattagcttaaataagttgctttgttatattttatttgaattgaactacgctaggcctaaatgccaataaaatatacttttcactgttg

SEQ ID NO: 185326 - DNA, 728 bp, Homo Sapiens
tctgggcccacactgagtgaattttaatgcaggatggaagcacacagatgggtgatcaggtctctctttactgaaacacagaacatgtgccaaggtgagtccaaggacacctctgggaacaggtgaagcccctccccacacatacactccggtggatgtgagcgagggtcctgttgccacatctggggtcaggggcttggacatgctgcccttcatgggaaccttctgggtacctctcagcacagtaacgcagctgcagtctgtcggtgggggcccaggctaggggcagcaccctcttttggcatacgggacatgcctggctgcagctgatgtccgttagcctctcctgacacgcagtaaggagacctggaagtgaggcgcgtgggcgtggagttcccggtggagctgctgcatcagcctttctgccactctggggtcagtgaggtcttccggggaagccacactcagccgcaggaggaggaaacctccattttcacctgcactcacgtctgtggtcggcctcgtccgggcagtcgtgggcgtggctgttgggggcttcatcgtggtcttcgctgaggttgtgatcttggctaaggtgctgttcgtccctcggctgctgttggttgtagtcggagggacagaaggaagagggtccctgctggtggggaagggccccttggttgcgatgtccatggtcggtgtctctgaaggggtgaagttcttgccaa

SEQ ID NO: 185327 - DNA, 1501 bp, Homo Sapiens
  misc_feature (683)..(973): n is a, c, g, or t
ttgggaccagccagaccgggagcaaaccgtcccttgtccccgtctcctccctgttcccgttcctccctggcccaccccactcacactccccaaggcccacggctcaaaggcaagcgagctctccctctgcttccctgggggagccccgacggccacaggactccagctccaagtgggttttcttggctcccctgttcaaagtggccacagcgcagaccgaagcaaaattcttgtatacattggcgccagggctgatgctggggtgtgggttttatgaagaacattgagaacaatcagctggtaattatggatggaggaagagggagaggaaaaaaatattgtatttttgaatcattgttgcaggagggggtgggaatcttaggatttgttgccagatttgaaagtcactggaacttgcatattttcattttaatcctaagtgttattacgcaccagttggggttcacccttcatccctcacatttaattgtctgatatagaatagtgttgtgtccactgccccgctagacggctttcttaggggaattttcttctggttgtttcacaagacagattctgtccttgtcacccgggacagaaaactcagtcttttcaccctcattcagatgaagggactcaggacaggctctgtgacttacagggacccaatcaattcacaatgnnnnnnnnnnnnnnnnnnnnnnnnnnnnnnnnnnnnnnnnnnnnnnnnnnnnnnnnnnnnnnnnnnnnnnnnnnnnnnnnnnnnnnnnnnnnnnnnnnnnnnnnnnnnnnnnnnnnnnnnnnnnnnnnnnnnnnnnnnnnnnnnnnnnnnnnnnnnnnnnnnnnnnnnnnnnnnnnnnnnnnnnnnnnnnnnnnnnnnnnnnnnnnnnnnnnnnnnnnnnnnnnnnnnnnnnnnnnnnnnnnnnnnnnnnnnnnnnnnnnnnnnnnnnnnnnnnnnnnnnnnnnnnnnnnngagacaaattacccagaaacccctcccttccccacatggaggccttggcaaatgttaattttcctagaaaatccttcagacctgaagacgcaggaaaagaatctggctctcagggtggcttctgcgtccccgccgccaggccccagactatggtcacagggccgtcctgttcctccccgggactccagaatttctctcctcaaaggaaagaaaacagggcatgcgcttgttggcaaaacgcagggccggctcccaaaaaccccatgtgtgtacgattaaaagttggccgtccccaggcctcccagcgcaaacttaaagagacagggctttgctgaaaaccaaacatgggccagctgggctttttaacaacctagagactttccggagctgcctggaacagagcctgtgggaaacggggcttgccagagacactcacagtttccttcatggcctgttttggtcccctaagaatctccacatcattgtctttcttgtgccttttccttggtgagcaacagaaagggaagg

SEQ ID NO: 185328 - DNA, 1129 bp, Homo Sapiens
tcagcgagacagaaaactcaaccatatgggatggcagaagtgggataaaaggaagagagagagccaatgggtaagagatgctctgtgctcgggcccaggagcgatctggggtggcaggcttaccacatcagcccttccccactgtgggcagaccgctccggcctcatgatcacagcctcttctgcgagctccttcccaccgccactcaccttgatgggtgtgaggtgctggaagtgacggtgagggtgcgggatcaggcccagggggcagtcccactgggaagcagagtaaactcggatctcgctcttctggtccgtggtcaggagccgggctccatcgggactgaaacaagctctttgccgtccatgttcagcaggatcacgttccccacgttgtctcctgtgaccaccattcggctactagcagacacatccaggctacaaaaccagatgttgatggtgtctgagctggcaaaaactcgtagaatgttgcctttaaagtcttgcagcctagttgttccctccattgaggaggcgtaaaactggttggtattgagagggttaaacttcagcccagtgatgctccctccagctccaatccctttgatgaaggtgggtttgtccttgatgccaaaattccagagcatgatatctccccctttggaacccacagccacggtgctggggtgagttgggtgccacgccaaggatgtagccctcctgtcaaagggggcagccttttgtaatatccggtaagaatccagagtgtgcaaaaaggactgctggagcccctgctggacagatggccaggaagctctgcccagcttatgctggtggagggtcctgacgatgctgcggcatggtggcaggatctgtgggccagccagccccacccagaggcagtctgagtcacatcttctgctaggacccgccaagcagaacagacatattttcctctccaatctcacgaaaggtttttctgctgaattccccgaaaggaagccttgtttcattcggcacggttaatctctgtctcatcacctcctgcggcctttccatgtctgtgtggtctcaacgagcaccagaaataaaaaaatgagtgaggatttggccccttccccaaaacccaa

SEQ ID NO: 185329 - DNA, 1057 bp, Homo Sapiens
actttgtacaaaaaagttggtgtttggcgggaccgttggcttagctcggctacctgtggccccgcagttttgtagtccccgccttgtttctccccagaggcctctcaatcctccctccatgatcttcgcatagagcacagtaccccttcacacggaggacgcgatggctcccaagaaacgcccagaaacccagaagacctccgagattgtattacgccccaggaacaagaggagcaggagtcccctggagctggagcccgaggccaagaagctctgtgcgaagggctccggtcctagcagaagatgtgactcagactgcctctgggtggggctggctggcccacagatcctgccaccatgccgcagcatcgtcaggaccctccaccagcataagctgggcagagcttcctggccatctgtccagcaggggctccagcagtcctttttgcacactctggattcttaccggatattacaaaaggctgccccctttgacaggagggctacatccttggcgtggcacccaactcaccccagcaccgtggctgtgggttccaaagggggagatatcatgctctggaattttggcatcaaggacaaacccaccttcatcaaagggattggagctggagggagcatcactgggctgaagtttaaccctctcaataccaaccagttttacgcctcctcaatggagggaacaactaggctgcaagactttaaaggcaacattctacgagtttttgccagctcagacaccatcaacatctggttttgtagcctggatgtgtctgctagtagccgaatggtggtcacaggagacaacgtggggaacgtgatcctgctgaacatggacggcaaagagctttggaatctcagaatgcacaaaaagaaagtgacgcatgtggccctgaacccatgctgtgattggttcctggccacagcctccgtagatcaaacagtgaaaatttgggacctgcgccaggttagagggaaagccagcttcctctactcgctgccgcacaggcatcctgtcaacgcagcttgtttcagtccc

SEQ ID NO: 185330 - DNA, 1339 bp, Homo Sapiens
ttgggggagcttcctgctcgtgttcgctgttgagaagctacccgcggggttgtagacctcggacctcatggcagagataattcaggaacgcatagaagatcggctcccggaattggaacagctggagcgcattggactgttcagtcatgcggagattaaggctatcattaagaaggcttccgatctagagtacaaaatccagagaagaacccttttcaaggaagactttatcaattatgttcaatatgaaattaatcttttggagctgatccggagaagaagaacacgcattggatattcatttaagaaggatgagattgagaattctattgtacaccgggtacaaggtgttttccagcgtgcctcagcaaaatggaaagacgatgttcaactttggctctcctatgtggctttttgtaagaagtgggctactaaaactcgacttagcaaggtattctctgccatgttggcgattcattccaacaaaccagctttgtggattatggcagccaaatgggaaatggaagatcgattgtcttcagaaagcgcaaggcaactatttcttcgcgcactgcgctttcatccagagtgcccaaaactttataaagaatactttaggatggagctgatgcatgctgaaaaactgaggaaggagaaggaagaatttgaaaaagccagtatggatgtggagaatcctgattattctgaagaaatccttaagggcgagttggcatggatcatctacaaaaattctgtaagcataattaaaggtgcagaatttcacgtgtcactgctttcgattgcacagctatttgactttgccaaagatctacaaaaagagatttatgatgaccttcaggctctacacacagatgatcctctcacttgggattatgtggcaaggcgagaattagagattgagtcacagacagaagagcagcctacaacgaaacaagccaaagcagtggaggtcggccggaaggaggagaggtgctgtgctgtgtatgaagaggcagtgaagactctgccaacagaggccatgtggaagtgttacatcaccttttgcttggaaagatttactaagaagtcaaatagtgggttccttagagggaagaggttggaaagaaccatgactgtattcaggaagcacatgaactgaagcttctgtcagaatgccaatacaagcagttgagtgtttcgttgctgtgttataacttcctgagggaagctctggaagtggcagtagctggaactgaattgtttagagactctgggacatgtggcagctgaagctgcagtgctgatcgagtcaaagagccctgacatagccatgcttttt

SEQ ID NO: 185331 - DNA, 1401 bp, Homo Sapiens
  misc_feature (1208)..(1236): n is a, c, g, or t
gttaggaatgaaagtgaagtctctggggcacttgcctctgttcatggcctccatgtgcaattttagccaaataacagcctttccaggcgtaggtttacctatcttttaatattaccggattttacgctttaaaaattctataaattactacctatttacaaatctagattaactgtgacagatggtatgtttaaggaattactttttaaaaatcctttttattactcttttttaagaaatgcaacaagagccttacaaaccatccatctgaagagcaagcacaaagaccggatatttgtggtgccaccgcagttgcagaaaggaatgtcagtcagaaatgaattgtgtttcagtcactctgcatggttgctgccacgcatggaacatttttaggccaactttttaaaattcccagttaaggtaagcaggaaattagatgatcttcattaagactccatgggtgtatctgagctcctgctgccaaaagggccactaatagatgaatttcttgcactcccaagaacaagcctctctcgtcttccaaatgcttcatttactgaagagactgtgcttatatcccagacccgaagcccttctttttgacctccaaaggcataaataaatggcaaatcagggcaacatgaagaacagaagagaactcccattttcatgtccctagaatgaactagacttggcctatctcctaagatgtcccagatcttcacgtatttgtcagctgaagcagtcacgagacagcccttgatttgactgctaagatcaagaccagagatttcatcattgtgtgcattaagtgtaaaaattggcttatctgaacgtgcatccaaattatatacaaagccgtcatctgtactggccaagaaatgacaaggtgaaaagtgattccaagtcactctctctatctgcccactgaatcgccacattcgatggctttcatctggacttcggcagtcatacaaagccactgacttatcatatgagccagaaatcagagtctgtgcttcaaatggatgaaactgcagtgtttggaccttgtctgtgtgtacagcgaggctagctgctggtttccccaaggacatatcccacagaattacagtgttgtcagctgatgcacttgctaaaacatttctgattagcttattccatgaaaggtcaaggacagcatcggtatgcccttctgctgaggaacnnnnnnnnnnnnnnnnnnnnnnnnnnnnngaaagtttacttccgagtgtgaagactggctctaaagagtccactatatcaaggtcccacacttcaataacaggggtcatgtttcctacagcaatgtaatttccagtagaatcatctgggctaggatcaaaattcagccattccacactcagaggatatgcccaa

SEQ ID NO: 185332 - DNA, 1844 bp, Homo Sapiens
ttggcacaaacaaatgcctagctagaggccacacatcatttgaacatcttttaaaagcagataagttaccttcaggccctaattgagaacatttaatttaggctttagaaattattaattactccagactgtatgcacctgaatttccctttcagtgactagatgaatattatataatactcttcaacaagcacattatgtctgcatttgaaatgtgatatggacatatgttttgttacagatgtgggcaatcgggattactgttctggttatcttcatcatcatcatcatcgtgtgggttgtctcttcatgaagaaccagcggaactcaaaactgctgttcaagaaacctcttcaagacttttgacttagaacctgctatattatcaagcttacctactgttatctctaaaattttttttgtgttaatgtaaagttgaatttctaggaaacgtgcctttgttttttaatatgcactccaaattagaaggccggccccgtccacattttgcacagtgcctttacagatttacgtatgggctgatgaagaggccttcttaagttccagagtgctataatctagatgtaatgttgtcactaattaattgccattactcccagttagttacccttgtcatttggcattattttcagaaccacattttaaacctttgggtaatcagatttccaacttatgccttccagaaaaaaacactactgcctaacacaaatctgtgataacaacaggctgtgccttattttgataattttctgattccctagaagagaaccctctactttttgtaagcactactgactctcgctgtatttaagatgctggtgaagagcttttgctcttgcattagatttgaagatgtttacattgttgttattgttatgtatcacttgctaaaaatattgttttaatcagagataacctctttaaaaaaatttttaaagaactatggctatgaccaaagcttctattttgccaaaaagttaaataccgataaaatggccttaagtgtattcctgacagttaaattcagaaacgtgccaaatggaactcaaggtgccccttcagaattaaaatcattaccttgtgtgtgaaccttctacatcttcataggcctttcttccttttgaaaggctgtagacagtgtggctccccttctgattcagtattttgcatgggggttagagaaggtttgaggtagactctgaccgtctcataaaagagttctacccagcagttggcagattatcagctgtggactccagcatgtttctgataattatgcaagcaacaattctgtagcctcaagtaagaccacctgtgaacttgatcattatctggcccaaatatgaagataaactataactttggagtttgtttcctatttgtattcacattctgcttcctaaatcagttttctaaattatgcctgcaattaggcattggtcaggggtgaatggctcttttcacagagagtagccaaccagagacctttgctttgatatcatcaactgcagagaatgctgttgatgggaatgctggaagcagaaactttgtcatcggaaaaacttttcttgtatgcatgagactcaacatcaggatccacagcttaaagatgggaattcaggtatgaaagaaaacaggcaaggaggcactgagggagaaagacacagactttatcgctctgtggctcattgttactggaatattctaaaactcttgttcacatgctattatgacttataaagcagcaacagctgaggcgcaccaggacacagcttccatttctttaacgtctgttcccttaacatcgctgaaatgatttactg

SEQ ID NO: 185333 - DNA, 2856 bp, Homo Sapiens
ttggcgaaaggccgggaggacgtcatcgacgcgctgtcgagcctccagcccgcccgggtttccttcgcagtcgcgcaccgacgctcaaacgcgcgctccaacccgcagcctcctcctgcctcaccgcccgaagatggcggctctcaaactcctctcctccgggcttcggctctgcgcctctgcccgcggatctggggcaacctggtacaagggatgtgtttgttccttttccaccagtgctcatcgccataccaagttttatacagatccagtagaagctgtaaaagacatccctgatggtgccacggttttggttggtggttttgggctatgtggaattccagagaatcttatagatgctttactgaaaactggagtaaaaggactaactgcagtcagcaacaatgcaggggttgacaattttggtttggggcttttgcttcggtccaagcagataaaacgcatggtctcttcatatgtgggagaaaatgcagaatttgaacgacagtacttatctggtgaattagaagtggagctgacaccacagggcacacttgcagagaggatccgtgcaggcggggctggagttcctgcattttacaccccaacagggtatgggaccctggtacaagaaggaggatcgcccatcaaatacaacaaagatggcagtgttgccattgccagtaagccaagagaggtgagggagttcaatggtcagcactttattttggaggaagcaattacaggggattttgctttggtgaaagcctggaaggcggaccgagcaggaaacgtgattttcaggaaaagtgcaaggaatttcaacttgccaatgtgcaaagctgcagaaaccacagtggtagaggttgaagaaattgtggatattggagcatttgctccagaagacatccatattcctcagatttatgtacatcgccttataaagggagaaaaatatgagaaaagaattgagcgtttatcaatccggaaagagggagatggggaagccaaatctgctaaacctggagatgacgtaagggaacgaatcatcaagagggccgctcttgagtttgaggatggcatgtatgctaatttgggcataggaatccctctcctggccagcaattttatcagcccaaatataactgttcatcttcaaagtgaaaatggagttctgggtttgggtccatatccacgacaacatgaagctgatgcagatctcatcaatgcaggcaaggaaacagttactattcttccaggagcctcttttttctccagcgatgaatcatttgcaatgattagaggtggacacgtcgatctgacaatgctaggagcgatgcaggtttccaaatatggtgacctggctaactggatgatacctgggaagatggtgaaaggaatgggaggtgctatggatttagtgtccagtgcgaaaaccaaagtggtggtcaccatggagcattctgcaaagggaaatgcacataaaatcatggagaaatgtacattaccattgactggaaagcaatgtgtcaaccgcattattactgaaaaggctgtgtttgatgtggacaagaagaaagggttgactctgattgagctctgggaaggcctgacagtggatgacgtacagaagagtactgggtgtgattttgcagtttcaccaaaactcatgccaatgcagcagatcgcaaattgaaatatggatatttgtaccaggctgcgtgtttttcattttaaacacacaagatttaattgaaaggacatcaataatcataattgtgtatttaacaggtggttttttattagttttcttgtgtttcagactttatgcagccatataaactgttctctaggcatgctgtgacattttaataaaaagcaaaaggagcatttataattatctcatttgttaaggctgagaaggttgtttttataataggtaattatattgaatgcattttcactgaatatggtatgtatgctaaattatatgaacctttccccaagaagggccctagaaattgatgtggctttcctcttaaatattaattattagtcctgaaagaaagataacatatgtgatttttgtggttaggagagttgctgtcatgattgttttttcttcagcctcctctgacttttcttttggggcttcagattttatgattacatcttgtccccctagaacatcccccttcctcccatactgcttttaaacagatgcccaagaaggcaagcaggaatgcctcttgtgggggagggcagggagaaataactagttcaaaccaactatctatctatgctttgcaaagactaaggcgtattataggaagagggctagaaacctaactgattcttctcagttttctcattttaaaacagcccagtattcctttgtatcctcaagggtccttgagaatacttctgttattgagaccctgtgggctacttgtactgtacctcctctcaagccaagaagggctgtgggataatttaccatgaatccttagtagcaatgacagcagagttaaaaaataaaaggtgttttactttcaggctcttgttttggttcagaggagattttaaatattgaatgacacttctacagaacaacggtttttcttctgccaaggctacttcctttaacgaagtgcctttaattcagccttatccaactagggaaaataatgttggacaagtctaggatttgaagagtcagtgaacttttagtgtcaggaataaacatggtgggtagattaggtttgaaaaaacttccttagaggtatttattctcaatacctgacaggggcccatgggaatgacttcagaagcatctcggataatagatgggtaaaa

SEQ ID NO: 185334 - DNA, 1323 bp, Homo Sapiens
tcatagatgtgaaggtgctccagctatgatggcgccgatgttgggacaagctggggcgctccccagggctgggcttatcggtgcacacgctccgctcgtctgccccacccgaagacacactccaccgcttctccctcttggccgtggactggctgcggtagcggtcgaaagtgtggaacttctggttgagctcgtggtagagttctgaatgccgtttccgggtgtgcatcaccttgtcaaagtccaggtctgaataccgtaatttctttcgctccagggagcccatcttcatggtagagccgggcacggtgcgaggcatggtccggctgcgctcccctggctcgggcacttggcgggcgctgggtgtcggcggtggcggttggaaggtcattccatagggattctggagagatccataggcagggcccagccccaggcccgagtggtccacggacaggaagctggggtagccttcagtgtgggccactgtcttggcagctcgccggggggtcccctccggccgggccctgggggcatcctcaccacctccacccccaccgccaggctgcaggctcaaagtccgccggggcagcaccatgtagtctccctcagagcctggctcagtgggccgcagccatgtgaggtccagctgccgcaggccaccctccccacacatgtaaacagggttggcctcctgtgggggcggaggctcccccagccctggtgaggctgccatgggcaccaggatattcccaggcagtggtgagaagctgaggctgccctcagggcccacgaggcaggacttgggctcctcatcctcatccagggacaggcgggatagtgtgcccgtgatggtggacgggttgcaagtgttgacctccttgaacagcactgtttgacaagccagatccacatccttttcaaagtctgacaggatctgcagctgcccgttcttacacgagtcaggggagtcttcgctctcatcagcccggcacacccccatctggcacttcaccacatcctggacctctcggcgcaggaagcagtgcacagcagtgatgacaaagccctgcgcggagttgaagacagcaaagagggcctggaagaggacggaacggcggtctgtcatagccaggacggcagacatccaggtgagcgccagcaggggcagcaccacgcaggagctccagagtgaggccccggccctctgcttcttggatttgtcggagatgccatcacgtgccatgagcttgttgaagacgatgattccgatgagcatgttcaccaggacaatgacggctgcagggcccacaaaggcgccaa

SEQ ID NO: 185335 - DNA, 2105 bp, Homo Sapiens
  misc_feature (937)..(1070): n is a, c, g, or t
ttggcgcattggggtccgcttctctgcactatgtcgggtggcctcctgaaggcgctgcgcagcgactcctacgtggagctgagccagtaccgggaccagcacttccggggtgacaatgaagaacaagaaaaattactgaagaaaagctgtacgttatatgttggaaatctttctttttacacaactgaagaacaaatctatgaactcttcagcaaaagtggtgacataaagaaaatcattatgggtctggataaaatgaagaaaacagcatgtggattctgttttgtggaatattactcacgcgcagatgcggaaaacgccatgcggtacataaatgggacgcgtctggatgaccgaatcattcgcacagactgggacgcaggctttaaggagggcaggcaatacggccgtgggcgatctgggggccaggttcgggatgagtatcggcaggactacgatgctgggagaggaggctatggaaaactggcacagaaccagtgagtggtgagagctctgtcagtgacaaacactcctttggcctgttgaatttgctgaagaacatcacctaaagtctgcacacgagcccatttttaccaagatttgatcagtgtctttactgagctggaagcctctgaaagttattaaaggacagaatccaaaagaatgcctttaattcttgtctgagaatcttggccatgtgtcagattatcagaacaattttgttaccaggtcagaaattgtgttctttgacaacagattggatctgtaatgttgattagtctttagccataaccactacacttttagaaagacagaaaaatgtaagaatttgtttttaccataatgagtcttaagtaggttcatgatctacattggggcctgggattatttttttaattttaagtttgcatgagatagcctaataaatggaggtggnnnnnnnnnnnnnnnnnnnnnnnnnnnnnnnnnnnnnnnnnnnnnnnnnnnnnnnnnnnnnnnnnnnnnnnnnnnnnnnnnnnnnnnnnnnnnnnnnnnnnnnnnnnnnnnnnnnnnnnnnnnnnnnnnnnnnnacaacaaatggagttgtgctatgttgtattgctttgcacaaaattaggaacaggtgtttgacaattgaatttgttttctgtgaattctaacctctaaaggcatgcttagaggtcaaggaccttcctgtgtagttggtgcaaaagcaatctccacaggacagcactgcttccatgcttcatacatcaggaaatgaggccagaacttgagtatttactaacacgtttttcaaaagatgtcagtgttatacctaaagctaaaaaaaagcaagggtttgtcatagagggaacctctaaataatttcaggggtaggggagatgttgtcaataggaaatgggataaaatatcaagagacaatgaaaacactgccttgacatgaggaccagcaagtttattcttttcattttcagtgatgttgggaatggactgggttttaaaagggagcttgaagagggaatgtttgacagtcacagaaggttcctgcagcagatgcctcttttagccatttctcatttttttcctcaaattttacctactgaggctcaagccttcacagtgagctgatggtctctacaggggaggggagtctagggaatttatttggtatttgtaaggcaagcggtgatttctctctaatatatctgagttattgctcatttaaaactgttaagtccagtataattttccctgatatgaaaaaatgtgcatttttttcacttagcaacaaagtaccttctaatttccaatagtccgtgaaagttggggctgaagtacctaagtgtgaatgtctctcccgttaaactgagtgtagaaatctgaatttttaaaagagctgtaactagttgtaagtgcttaggaagaaactttgcaaacatttaatgaggatacactgttcatttttaaaattccttcacactgtaatttaatgtgttttatattcttttgtagtaaaacaacataactcagatttctacaggagacagtggttttatttggattgtcttctgtaataggtttcaataaagctggatgaactt

SEQ ID NO: 185336 - DNA, 1494 bp, Homo Sapiens
  misc_feature (1163)..(1173): n is a, c, g, or t
gtcatgttacacatttaagtttttgaaattgctccttttatcggtaaagattctcaatccaaattctcctgggtgtgttgtcatcagctgtgatatgtttgtgcacattacgtatagcagaggatgtaagcaatattattgtttgtgaagttttgtttttaatgtcttgagtatgagttatgtttagtcactgtcagcatctgagaactttaataagcccttgagatattccaaagttttattttacttttttaaagaacagaaaaagatgaatgaaagaaccaaggagagatgcagagactatatttagcatgtataggttaaagtaagaaggaggttgtggtaactaaataggagtcctataaaatcaaatacattgtcaaccttttctgcacatctagtttcctaccatagaatcccactggaataccacatagcttttgcactgcagttactatttactaatgtaaacgtagggtttgtaaaagtcacaaacttgtaagcaatgaacttacctgctagtctttttattttggcttgcatgaagtcactgcaaattcaaatgtcagtaccggcatttaaaatatatctatatcactttgttggcaaagttatttcaagataagtgtaattttgttacaagtttattttgaagagacaaatctcctgtgatctatgcaggacctctgtactttctaaagaacaaaatgttatgtagacattatacatggttggttgtctcttcttgaaactgtaatgtaaatctagggtccagtcatatcctaggtatcatcatttatccaagtacttggaggaatacaagtatatataaatacagtcattgagaataagtcgatttgaggcatacaagagtagtttcttacacagtttaacacggcctgattcaagactctgataggattcaaacagataccggttaaccatgactaccaaaactgatcatctgagtcgattgatagaggtgtgactagtccttagcactttttctcattcctctttttattcagcattgctgttacctatttcaggtttataagacctctttcagcagatcacatcagaagccaggaaatgcatagctagatgtcaaaagcccatatgaggagtggaccaagcagcagtggcggtttctcctcgcatcnnnnnnnnnnnaagctttaacttagcaggggcatggactttatagcactttttcaactttttgctttgctttggataagaaatccttacctttaaaaaaagcttctagtctccataacccccaaagtactgcttatttgtttgaagaatccagccatcgtagtgctttagtcactatcgtaaacattcatgatagggcaaggattttaaaacaggattcttgcttctgtagtcatcaaggtgaacagaagcatcctacacaaccactaagggctctatgtttgtgtcatgcctcttcaaacaccaaggagttgaacatgcttccagtgattt

SEQ ID NO: 185337 - DNA, 2096 bp, Homo Sapiens
  misc_feature (949)..(959): n is a, c, g, or t
ttgggaaagtaatgcccaaggagttgaaattgtcctacaggagccctggagaaattcagcacttctcaaaattctatgctgggcagatgaaggaacccattcaacttgaaattactgaaaaaagacatgggactttggtgtgggatactgaggtgaagccagtggatctccagcttgtagctgcatcagcccctcctcctttctcaggtgcagcctttgtgaaggagaaccaccggcaactccaagccaggatgggggacctgaaaggggtgctcgatgatctccaggacaatgaggttcttactgagaatgagaaggagctggtggagcaggaaaagacacggcagagcaagaatgaggccttgctgagcatggtggagaagaaaggggacctggccctggacgtgctcttcagaagcattagtgaaagggacccttacctcgtgtcctatcttagacagcagaatttgtaaaatgagtcagttaggtagtctggaagagagaatccagcgttctcattggaaatggataaacagaaatgtgatcattgatttcagtgttcaagacagaagaagactgggtaacatctatcacacaggctttcaggacagacttgtaacctggcatgtacctattgactgtatcctcatgcattttcctcaagaatgtctgaagaaggtagtaatattccttttaaattttttccaaccattgcttgatatatcactattttatccattgacatgattcttgaagacccaggataaaggacatccggataggtgtgtttatgaaggatggggcctggaaaggcaacttttcctgattaatgtgaaaaataattcctatggacactccgtttgaagtatcaccttctcataactaaaagcagaaaagctaacaaaagcttctcagctgaggacactcaaggcatacatgatgacagtcnnnnnnnnnnngtatgttaggactttaacactttatctatggctactgttattagaacaatgtaaatgtatttgctgaaagagagcacaaaaatgggagaaaatgcaaacatgagcagaaaatattttcccactggtgtgtagcctgctacaaggagttgttgggttaaatgttcatggtcaactccaaggaatactgagatgaaatgtggtaaatcaactccacagaaccaccaaaaagaaaatgagggtaattcagcttattctgagacagacattcctggcaatgtaccatacaaaaaataagccaactctgacatttggattctaccatagactctgtcattttgtagccatttcagctgtcttttgattaatgttttcgtggcacacatatttccatccttttatgtttaatctgtttaaaacaagttcctagtagacaccatctggttgagtcagttttttttatggtgtattttgaacccattctgatagtctcttttaactggaagatttcaattacttacgttaatgtaattattaatatgttaggatttatcctcagtcagccagtttgttatgtcttttctattctactgttatcacatttgtaccacttaaagtggaatctaggcactttatcaccatttagatcctattaccttttctcatctaggatatagttatcttctacataatctttctgtatcttaaaacccatcaataaattattatatattttctacttttaatcactcagaagatttaaaaaactcatgagaagagtaatctgttatgtttttccagatatttaccatttctgttgctcttccttcattattttccaaatttcgttctgcaaatttccacttcttctgatagacgttttttagttcttttagagtggttctgataggtacagattctcttattttttgcttcctctgaggacatctttttctcaccttcattctcagtgatgttttttgcttgtagtatttttagttgacattgttttctgttcagcagtttccttttagcttccgtatttcctgatgagaaatctgcagtcattcaaattgttgtttccctgtatgtagtgtgtcatttttctgtcagatttcaaggtatttatctttagtttta

SEQ ID NO: 185338 - DNA, 1901 bp, Homo Sapiens
gaaactgacctctgtgagattcatgggggacatggtgtccttcgaggaggaccggatcaacgccacggtgtggaagctccagcccgctcccgggctccaggacctgcacatccactcccggcaggaggaggagcaaatcgagatcatggattactcggtgctgctgcctcgaacactcttccagaggacgaaaggccggagcggggaggctgagaagagactcctcctggtggacttcagcacccaagccctgttccaggacaataattccccccaagtcctgggtgacaaggtcttggggattgtggtacagaacaccaaagtagccaacctcacggagcccgtggtgctcactttccatcaacgcctacaccccaagaatgtgactctgccatgtgtgttctgggttgaagaccccacattgagcagcccggggcattggagcagtgctgggtgtgagaccgtcaggagagaaacccaaacatcctgcttctgcaaccacttgacctactttgcagtgctgatggtctcctcggtggaggtggacgccgtgcacaagcactacctgagcctcctctcctacgtgggctgtgtcgtctctgccctggcctgccttgtcaccattgccgcctacctctgctccagggtgcccctgccgtgcaggaggaaacctcgggactacaccatcaaggtgcacatgaacctgctgctggccgtcttcctgctggacacgagcttcctgctcagcgagccggtggccctgacaggctctgaggctggctgccgagccagtgccatcttcctgcacttctccctgctcacctgcctttcctggatgggcctcgaggggtacaacctctaccgactcgtggtggaggtctttggcacctatgtccctggctacctactcaagctgagcgccatgggctggggcttccccatctttctggtgacgctggtggccctggtggatgtggacaactatggccccatcatcttggctgtgcataggactccagagggcgtcatctacccttccatgtgctggatccgggactccctggtcagctacatcaccaacctgggcctcttcagcctggtgtttctgttcaacatggccatgctagccaccatggtggtgcagatcctgcggctgcgcccccacacccaaaagtggtcacatgtgctgacactgctgggcctcagcctggtccttggcctgccctgggccttgatcttcttctcctttgcttctggcaccttccagcttgtcgtcctctaccttttcagcatcatcacctccttccaaggcttcctcatcttcatctggtactggtccatgcggctgcaggcccggggtggcccctcccctctgaagagcaactcagacagcgccaggctccccatcagctcgggcagcacctcgtccagccgcatctaggcctccagcccacctgcccatgtgatgaagcagagatgcggcctcgtcgcacactgcctgtggcccccgagccaggcccagccccaggccagtcagccgcagactttggaaagcccaacgaccatggagagatgggccgttgccatggtggacggactcccgggctgggcttttgaattggccttggggactactcggctctcactcagctcccacgggactcagaagtgcgccgccatgctgcctagggtactgtccccacatctgtcccaacccagctggaggcctggtctctccttacaacccctgggcccagccctcattgctgggggccaggccttgggatcttgagggtctggcacatccttaatcctgtgcccctgcctgggacagaaatgtggctccagttgctctgtctctcgtggtcaccctgagggcactctgcatcctctgtcatttt

SEQ ID NO: 185339 - DNA, 1898 bp, Homo Sapiens
  misc_feature (286)..(345): n is a, c, g, or t
  misc_feature (1321)..(1365): n is a, c, g, or t
  misc_feature (1596)..(1620): n is a, c, g, or t
  misc_feature (1819)..(1827): n is a, c, g, or t
ttggctgtctatttatgaaatggtagtggatgtattattcttgtgttttgccattgatacaaaatacaatgatgggagccctggcagagaattctatatggataaagtgctgatggagtttgtggaaaacagtaggaaagcaatgaaagaagctggtaagggaggcgtcgctgattccagagagctaaagccgatggcttcgggagcaagttctgcttgaacctagccgacggttatggaaacccattgacattccaaaacaatatatacacataactatgtattnnnnnnnnnnnnnnnnnnnnnnnnnnnnnnnnnnnnnnnnnnnnnnnnnnnnnnnnnnnncacacacacacataaatcagccaaaatcagagaaaaggaacagggatttaataccttttttatgcttatttttgtcaaacatgtactcctttcatacgggtggcttttacaaggcaacttccgtcatttaatgttttcaactgtaattgtcttaatggaaatgttaaaattcatatctgattaacatttttaataacttagaggagattttaactttatttaaaaataggtaaaattattgtacctaattatgtctaaagtttattcaggggtaatttccctgatgtctgtataaaatcaagatcttattttactgatgcataagtcctagtgggtcaagactaggcatatgctttcagataaataaggaattactccaatcagttttccccaatcaaagaagccatgtcattttacttttagaaacatacaattgggcccaatatgggaattttcataatagttcatacatttgtcagccaacattaaaaggtaaccaactcctcaggtatttgtagtttaccctaacgcttctttaaaagaaagtaggtaaaaaaagaaaagggtagataatctttcgtatgcaaacttttcccttatattttgtctttctttcctttttgactttagtagcatcctccacacatttgtgtgcctgatttgaaaggaagctggggcacccagcgagtttagcctttaagtttctgtgtattgatttgcagattaagtaatgctgagaggaataaagaagggacagaaacatggaacataaagcattgaaaattccggtgcttgggcttcggcttcagagtaacgtcagtggcttagggttaaacggccattttattcaaatgcttgctatacaatctgaaaacacactggcaggtgctcctctccttggcaattcattgagtatccagagttctacgatgtttaactgaagaattggctaatgttttgatcctccagtgtgacnnnnnnnnnnnnnnnnnnnnnnnnnnnnnnnnnnnnnnnnnnnnnattcctgaagcttaccagatatgaatggctaatactccattgttctgcttgttgtaatggtgaatgctttaagaaaaaaaagtgtaatttgctaagaataattcatgatctgtttatgcgataactcctttttgttacaatttttttaaaaaaagctatttttgttaatgtaaagtaaatatttcagagcaaattttttaaacttattgcactaaatacaggctctgtacnnnnnnnnnnnnnnnnnnnnnnnnngcctcagcattttatcattccatggaaggagaatcttttgaaagaaagcattgcctcctaccagaactagacagtgaattagatcggtattatggaaatgcatacaagtaatgtcactagggcttaataagcagccgtttgctaatgtgcttcctttcaaagggttggacctttaaattgctgcaaaggtaaattgtannnnnnnnnaagtattggtgttctttactctagctaggctaaaatttgctaaatgccttggcttctttaaagttcatgta

SEQ ID NO: 185340 - DNA, 2129 bp, Homo Sapiens
ttggcgagaatggaagccgctggaggaccgtagctgcacagacataccatggctgctgctcttcatcctcttctgcattgggatgggatttatttgtggcttttcaatagcaacaggtgcagcagcaagactagtgtcaggatacgacagctatggaaatatctgtgggcagaaaaatacaaagttggaagcaataccaaacagtggcatggaccacacccagcggaagtatgtattctttttggatccatgcaacctggacttgataaaccggaagattaagtctgtagcactgtgtgtagcagcgtgtccaaggcaagaactgaaaactctgagtgatgttcagaagtttgcagagataaatggttcagccctatgtagctacaacctaaagccttctgaatacactacatctccaaaatcttctgttctctgccccaaactaccagttccagcgagtgcacctattccattcttccatcgctgtgctcctgtgaacatttcctgctatgccaagtttgcagaggccctgatcacctttgtcagtgacaatagtgtcttacacaggctgattagtggagtaatgaccagcaaagaaattatattgggactttgcttgttatcactagttctatccatgattttgatggtgataatcaggtatatatcaagagtacttgtgtggatcttaacgattctggtcatactcggttcacttggaggcacaggtgtactatggtggctgtatgcaaagcaaagaaggtctcccaaagaaactgttactcctgagcagcttcagatagctgaagacaatcttcgggccctcctcatttatgccatttcagctacagtgttcacagtgatcttattcctgataatgttggttatgcgcaaacgtgttgctcttaccatcgccttgttccacgtagctggcaaggtcttcattcacttgccactgctagtcttccaacccttctggactttctttgctcttgtcttgttttgggtgtactggatcatgacacttctttttcttggcactaccggcagtcctgttcagaatgagcaaggctttgtggagttcaaaatttctgggcctctgcagtacatgtggtggtaccatgtggtgggcctgatttggatcagtgaatttattctagcatgtcagcagatgacagtggcaggagctgtggtaacatactattttactagggataaaaggaatttgccatttacacctattttggcatcagtaaatcgccttattcgttaccacctagtacggtggcaaaaggatctttcattatcacattagtcaaaattccgcgaatgatccttatgtatattcacagtcagctcaaaggaaaggaaaatgcttgtgcacgatgtgtgctgaaatcttgcatttgttgcctttggtgtcttgaaaagtgcctaaattatttaaatcagaatgcatacacagccacagctatcaacagcaccaacttctgcacctcagcaaaggatgcctttgtcattttggtggagaatgctttgcgagtggctaccatcaacacagtaggagattttatgttattccttggcaaggtgctgatagtttgcagcacaggtttagctgggattatgctgctcaactaccagcaggactacacagtatgggtgctgcctctgatcattgtttgcctctttgctttcctagtcgctcattgcttcctgtttatttatgaaatggtagtggatgtattatttttgtgttttgccattgatacaaaatacaatgatgggagccctggcagagaattttatatggataaagtgctgatggagtttgtggaaaacagtaggaaagcaatgaaagaagctggtaagggaggggtcgctgattccagagagctaaagccgatgctgaagaaaaggtgactggtttcatgagccctgaagaatgaactcagaggaggttgtttacatgaggttttcccactcaccagctgttgagagtttgcgattatgaagagcaggattttattacttcaatgaaagcatgtaacaagtttttcaaaccaccaacagccaagtggatttggtacagtgcggctgtttaataaataatcaaaagcatttgatag

SEQ ID NO: 185341 - DNA, 1959 bp, Homo Sapiens
ttgcccacaccccactttcatcaactctgttcatgcaggacaaagcagggagctgcccaacaaggatggggttatttctcaggcctagggtattgatgtttaccttaattctttagtctggaagaacttggttgggggtgggggatggtaagcatttcttaaccaaacccacacttcacatctcctaggggtaccccttcatccaccaacctccagagaataacctggctgccctcacttctccagcttttctcacaaggcacttgttacagggctgctgatgggagagggaggaaggcctgggagggggatctggtggtggcgcccaatctacagggtccggaatcagggtggaagttgtcagggactagcggctgccatagtacaggcgcatggccaggccaatgagcaatgtggccaggaagaaggcggctgtgagctgcagccgtagcaggactgctgagagcacggcgttgaccaccagcgagcaggacaccacaaagaggcgtgtgatgctgctgccatgcttcatgacagcagacatgagcagtccatttagtgcctggctcagcaccacgagtgctgcccatcctgagaaaccttccaggaggcctgggccagagccgccgccagcatgcagacctagattcagaagcacaccaaaagtgtagaggaagaggttctgaagtgccaggggcagccgctgtcgcttcatgagcagctctgtgtacactgacgacaagcctgagatgaggcagtacagaatgaggagcagcaggcctagcggagtgatatgcaggggcatggggctggcagcagctgctggagggggactgggaagggtgttcccgggaacttgaaggccccctgctgcatagcaggctcccgcagccatcagcagcagcagcgctaacccctgacgcacagagaggcggtgccggaggcagaggcagtagagcacagctgtgcttccaatcttgagattactcagcacctggtaggtgctggggtccatgtaacgctgaagatagatcaccaggttgttgttagcgccatagagcagggctgatagtgcgaagggagcagcctggcgccagggtgggggcccctggggccatgcttgccagcctaccagaagggagaaggcgcataacagtagcttggtcagctcagtcagcagcacggctgaggagggccggaagggcactcggccgtccacatggcacagtgccagcaatggggcatgggcaccgtacatggcagtggataggagtagcatcagggtccagcgggcctgcctgggacggcccaggcctggcatacccccatcctctacactcatacccacacaagaccctgggtggctaaggggcagcagggattgcaacacgtttggggaaaatcaagttatggagccagctcccaggaaggagaagccgtggaacattgccagagagaatactgaggatcagaggcatctaccaactccacagtcagggcttgaagagtaaggggctggtggtccttgaagccacagtcttggggcgagtcccatggagctaggaaggggaagaaggaatccagggtgcaggctgaggaactactgtccacaatctgcaggaagggaggcacctagagctagtcgggccccttgcgtagcaactgcaaatagtcccttaatgtcttctccacgttgggcacagcatatgcctgagccgcatagatgccagtgcaggtgcccacagcaaagcccaatactgctgatgccctcagtttggccaccacatagccagccaggaatcccttgaggaacggggaggacaacagcgagccatcctggcccactccactgttgacttcgtcttctacacgccgctgcaggctttccagctggttcttgagaaatgccaggtccttaagcttaggcagagaatccttgccaacttttttgtacaaagt

SEQ ID NO: 185342 - DNA, 2345 bp, Homo Sapiens
  misc_feature (2081)..(2119): n is a, c, g, or t
ttggctcagcacaaacctttcaagtatgttgtttctttggaaaatggacatactgtattgtgttctcctgcatatatcattcctggagagagaaggggagaagaatacttttcttcaacaaattttgggggcaggagatcccttcaagaggctgcaccttaatttttcttgtctgtgtgcaggtcttcatataaactttaccaggaagaagggtgtgagtttgttgtttttctgtgtatgggcctggtcagtgtaaagttttatccttgatagtctagttactatgaccctccccacttttttaaaaccagaaaaaggtttggaatgttggaatgaccaagagacaagttaactcgtgcaagagccagttacccacccacaggtccccctacttcctgccaagcattccattgactgcctgtatggaacacatttgtcccagatctgagcattctaggcctgtttcactcactcacccagcatatgaaactagtcttaactgttgagcctttcctttcatatccacagaagacactgtctcaaatgttgtacccttgccatttaggactgaactttccttagcccaagggacccagtgacagttgtcttccgtttgtcagatgatcagtctctactgattatcttgctgcttaaaggcctgctcaccaatctttctttcacaccgtgtggtccgtgttactggtatacccagtatgttctcactgaagacatggactttatatgttcaagtgcaggaattggaaagttggacttgttttctatgatccaaaacagccctataagaaggttggaaaaggaggaactatatagcagcctttgctattttctgctaccatttcttttcctctgaagcggccatgacattccctttggcaactaacgtagaaactcaacagaacattttcctttcctagagtcaccttttagatgataatggacaactatagacttgctcattgttcagactgattgcccctcacctgaatccactctctgtattcatgctcttggcaatttctttgactttcttttaagggcagaagcattttagttaattgtagataaagaatagttttcttcctcttctccttgggccagttaataattggtccatggctacactgcaacttccgtccagtgctgtgatgcccatgacacctgcaaaataagttctgcctgggcattttgtagatattaacaggtgaattcccgactcttttggtttgaatgacagttctcattccttctatggctgcaagtatgcatcagtgcttcccacttacctgatttgtctgtcggtggccccatatggaaaccctgcgtgtctgttggcataatagtttacaaatggttttttcagtcctatccaaatttattgaaccaacaaaaataattacttctgccctgagataagcagattaagtttgttcattctctgctttattctctccatgtggcaacattctgtcagcctctttcatagtgtgcaaacattttatcattctaaatggtgactctctgcccttggacccatttattattcacagatggggagaacctatctgcatggacctctgtggaccacagcgtacctgcccctttctgccctcctgctccagccccacttctgaaagtatcagctactgatccagccactggatattttatatcctcccttttccttaagcacaatgtcagaccaaattgcttgtttctttttcttggactactttaatttggatcctttgggtttggagaaagggaatgtgaaagctgtcattacagacaacaggtttcagtgatgaggaggacaacactgcctttcaaactttttactgatctcttagattttaagaactcttgaattgtgtggtatctaataaaagggaaggtaagatggataatcactttctcatttgggttctgaattggagactcagtttttatgagacacatcttttatgccatgtatagatcctcccctgctatttttggtttatttttattgttataaatgctttctttctttgactcctcttctgcctgcctttggggatagnnnnnnnnnnnnnnnnnnnnnnnnnnnnnnnnnnnnnnnaagcatcattttcttatgtgaggtggggaagggaagggtatgagggaaagagagtctgagaattaaaatattttagtataagcaattggctgtgatgctcaaatccattgcatcctctttattgaatttgccaatttgtaattttgcataataaagaaccaaaagtgtatgtttgttgagaggtggtttagggattttgggccctaaccaatacattgaatgtatg

SEQ ID NO: 185343 - DNA, 796 bp, Homo Sapiens
  misc_feature (371)..(409): n is a, c, g, or t
ttgggtcagaccaaattgcttgtttctttttcttggactactttaatttggatcctttgggtttggagaaagggaatgtgaaagctgtcattacagacaacaggtttcagtgatgaggaggacaacactgcctttcaaactttttactgatctcttagattttaagaactcttgaattgtgtggtatctaataaaagggaaggtaagatggataatcactttctcatttgggttctgaattggagactcagtttttatgagacacatcttttatgccatgtatagatcctcccctgctatttttggtttatttttattgttataaatgctttctttctttgactcctcttctgcctgcctttggggatagnnnnnnnnnnnnnnnnnnnnnnnnnnnnnnnnnnnnnnnaagcatcattttcttatgtgaggtggggaagggaaaggtatgagggaaagagagtctgagaattaaaatattttagtataagcaattggctgtgatgctcaaatccattgcatcctcttattgaatttgccaatttgtaatttttgcataataaagaaccaaaggtgtaatgttttgttgagaggtggtttagggattttggccctaaccaatacattgaatgtatgatgactatttgggaggacacatttatgtacccagaggcccccactaataagtggtactatggttacttccttgtgtacatttctcttaaaagtgatattatatctgtttgtatgagaaacccagtaaccaataaatgaccgcatattcctgactaaacgt

SEQ ID NO: 185344 - DNA, 1222 bp, Homo Sapiens
  misc_feature (837)..(890): n is a, c, g, or t
cagcataattaatattatgacttatatcccagttcccaattcttgctatagcaaatacttcgcatttccattgaaggcactttgtccctgagcaaccatctgtttgtcaccagctatggctagtgcacagaagagtgctcagttttgtgatgtttcctatttgacagatgctttttccccaggatcatttatttatgatctaattaaaggaagaaaaaaagaagtttggtgctaggctttgtgggattcagaaagaaaagaaaatttgctctctcagcaaattatgacatcatgaggtaacactgccaggccatggatgcagtattggaaaataaaaaatacaacaccactgagcttggcaaaccttttttattttgtgataaaaatgctttcatataaatttcatcttaactacctttagaatgaaacggaaaagtaaaaacaaagtgtgcattttccttactacgtttagtcaggaatatgcggtcattttattggttactgggtttctcatacaaacagatataatatcacttttaagagaaatgtacacaaggaagtaaccatagtaccacttattagtgggggcctctgggtacataaatgtgtcctcccaaatagtcatcatacattcaatgtattggttagggccaaaatccctaaaccacctctcaacaaaacattacacctttggttctttattatgcaaaaattacaaattggcaaattcaataagaggatgcaatggatttgagcatcacagccaattgcttatactaaaatattttaattctcaaactctctttccctcatacctttcccttccccacctcacannnnnnnnnnnnnnnnnnnnnnnnnnnnnnnnnnnnnnnnnnnnnnnnnnnnnncctatccccaaaggcaggcagaagaggagtcaaagaaagaaagcatttataacaataaaaataaaccaaaaatagcaggggaggatctatacgtggcataaaagatgtgtctcataaaaactgagtctccaattcagaacccaaatgagaaagtgattatccatcttaccttcccttttattagataccacaccattcaagagttcttaaaatctaagagatcggtaaaaagtttgaaaggcagtgttgtcctcctcatcactgaaacctgttgtctgtaatgacagctttcacattccctttctccaacccaaaggatccaaattaaagta

SEQ ID NO: 185345 - DNA, 1764 bp, Homo Sapiens
ttggggcagagtcggacgccgccagctcttcactccacgcccacctctctcctggagcgctgggccttcgctggccgcaccggcagccatgagctcggagatggagccgctgctcctggcctggagctattttaggcgcaggaagttccagctctgcgccgatctatgcacgcagatgctggagaagtccccttatgaccaggcagcttggatcttaaaagcaagagcgctaacagaaatggtatacatagatgaaattgatgtagatcaggaaggaattgcagaaatgatgctggatgaaaatgctatagctcaagttccacgccctggaacgtctttgaaactccctggaactaatcagacaggagggcctagccaggccgttaggccaatcacacaagctggaagacccattacaggtttcctcaggcccagcacgcagagtggaaggccaggcactatggaacaggctatcagaacacccagaaccgcctacacagcccgccctatcaccagctcctccggaagatttgtcaggctgggaacggcttccatgcttacaagtcctgatggaccatttataaatttatctaggctgaatttaacaaagtattcccagaaacctaagttggcaaaggctttgtttgagtatatctttcatcatgaaaatgatgttaagactgctttggatctggctgccctctccacagaacattctcagtacaaggactggtggtggaaagtacagattggaaaatgttactacaggttgggaatgtatcgtgaagcagaaaaacagtttaaatcagccctgaagcagcaggaaatggtagatacatttctgtacttggcaaaagtttatgtctcattggatcaacctgtgactgctttaaatcttttcaaacaaggcttagataagtttccaggagaagtaaccctgctctgtggaattgcaagaatctatgaggaaatgaacaatatgtcatcagcagcagaatattacaaagaagttttgaaacaagacaatactcatgtggaagccatcgcatgcattggaagcaaccacttctattctgatcagccagaaatagctctccggttttacaggcggctgctgcagatgggcatttataacggccagctttttaacaatctggggctgtgttgcttctatgcccagcagtatgatatgactctgacctcatttgaacgtgccctttctttggctgaaaatgaagaagaggcagctgatgtctggtacaacttgggacatgtagctgtgggaataggagatacaaatttggcccatcagtgcttcaggctggctctggtcaacaacaacaaccacgccgaggcctacaacaacctggctgtgctggagatgcggaagggccacgttgaacagattggagatctgcagagaagctatgttgctgcgcagaagtctgaagcagcatttccagaccatgtggacacacaacatttaattaaacaattaacgcagcattttgctatgctctgattgttccttagaccacatatgttcttatgaagcagcattatgcaaggggaaaaaagcactatgtctgtgtatgtatgtatatagtgtaatacgtatattttaacaaacctgtcctttgatattagttaacgtgacacataacggtgacacagaatgtgtaatgcaaatttcatagtaatagtaactttataaataaatattataaaatacaggatttaaacctttctaaatagatcctgaaa

SEQ ID NO: 185346 - DNA, 1883 bp, Homo Sapiens
ttggccacctctctcctggagcgctgggccttcgctggccgcaccggcagccatgagctcggagatggagccgctgctcctggcctggagctattttaggcgcaggaagttccagctctgcgccgatctatgcacgcagatgctggagaagtccccttatgaccaggcagcttggatcttaaaagcaagagcgctaacagaaatggtatacatagatgaaattgatgtagatcaggaaggaattgcagaaatgatgctggatgaaaatgctatagctcaagttccacgccctggaacgtctttgaaactccctggaactaatcagacaggagggcctagccaggccgttaggccaatcacacaagctggaagacccattacaggtttcctcaggcccagcacgcagagtggaaggccaggcactatggaacaggctatcagaacacccagaaccgcctacacagcccgccctatcaccagctcctccggaagatttgtcaggctgggaacggctttgtttgagtatatctttcatcatgaaaatgatgttaagactgctttggatctggctgccctctccacagaacattctcagtacaaggactggtggtggaaagtacagattggaaaatgttactacaggttgggaatgtatcgtgaagcagaaaaacagtttaaatcagccctgaagcagcaggaaatggtagatacatttctgtacttggcaaaagtttatgtctcattggatcaacctgtgactgctttaaatcttttcaaacaaggcttagataagtttccaggagaagtaaccctgctctgtggaattgcaagaatctatgaggaaatgaacaatatgtcatcagcagcagaatattacaaagaagttttgaaacaagacaatactcatgtggaagccatcgcatgcattggaagcaaccacttctattctgatcagccagaaatagctctccggttttacaggcggctgctgcagatgggcatttataacggccagctttttaacaatctggggctgtgttgcttctatgcccagcagtatgatatgactctgacctcatttgaacgtgccctttctttggctgaaaatgaagaagaggcagctgatgtctggtacaacttgggacatgtagctgtgggaataggagatacaaatttggcccatcagtgcttcaggctggctctggtcaacaacaacaaccacgccgaggcctacaacaacctggctgtgctggagatgcggaagggccacgttgaacaggcaagggcactattacaaactgcatcatcattagcaccccatatgtatgaaccgcattttaattttgcaacaatctctgataagattggagatctgcagagaagctatgttgctgcgcagaagtctgaagcagcatttccagaccatgtggacacacaacatttaattaaacaattaaggcagcattttgctatgctctgattgttccttagaccacatatgttcttatgaagcagcattatgcaaggggaaaaaagcactatgtctgtgtatgtatgtatatagtgtaatacgtatattttaacaaacctgtccttgatattagttaaggtgacacataagggtgacacagaatgtgtaatgcaaatttcatagtaatagtaactttataaaataatattataaaatacaggatttaaacctttctaaatagatcctgaaactgtctctcacattatatagtagatgtttgtttataatgtttacaaaacattttggtgaatttcctcaatgttttataaatgtacattttttaagtccttaagctgactcttagccatcatgtagcttaaagagtctgaaatctgccattaaaactgcacct

SEQ ID NO: 185347 - DNA, 907 bp, Homo Sapiens
tgtacaaagaatatgaacaggatgagagagaccagaaagaggagggaaatgattatgacactcgaagtgaggccagtgactctggttctgaatctgtttccttcacagatgggtctgtcagatctggttcaggcacagatggatcagatgagaaaaagaaggaaaggaagagagctagaggcatatctccaattgtttttgatagaagtggaagctctgcatcagagtcatatgcaggttcagaaaagaagcatgagaaattatcatcttccgttcgtgctgtccgaaaagatcaaaccagtaaactcaaatatgtgcttcaagatgcaagatttttcctcataaagagtaacaaccatgagaatgtgtctcttgccaaagcgaagggtgtatggtccacgctccctgtaaatgagaagaaattaaatcttgcatttagatctgcaaggagtgttatcttaatattttctgtcagagagagtggaaaatttcaagggtttgcaagactttcttcagaatcacatcacggaggatctcctatacactgggtgcttccagcaggaatgagtgctaaaatgctgggaggtgtctttaaaattgactggatttgcaggcgtgaattacccttcactaagtcggctcatctcaccaatccttggaatgaacataaaccagtaaagatcggacgtgatggacaggaaattgaacttgaatgtggaacccagctttgtcttctgtttccccccgatgaaagtattgacttgtatcacgtcattcataaaatgcgtcacaagagaagaatgcattctcagccccgatcacgaggacgtccatcccgtcgagaaccagtccgggatgtgggaaggcgtcgaccagaagattatgatattcataacagcagaaagaa

SEQ ID NO: 185348 - DNA, 1177 bp, Homo Sapiens
  misc_feature (23)..(36): n is a, c, g, or t
  misc_feature (714)..(741): n is a, c, g, or t
tgacagaatgagaccctgtctcnnnnnnnnnnnnnngcaagcacttggccgggtgcagtggctcacgcctgtaatcccagcactttaaaccagacaactggtggggagggcaggggggtcacaactacaactacccaacccccgttccctgccaaaatggaaatgccgcttgcatcccagggccttgggatgtcctgccatgccccttccccatcattgcctctgaccacacctggcacatggtagcctcattctcgtccagactgtcccgcagctgctgaagctctgcctcccggtctcggagctttccttccaggacacagtgcagcagggcctcatccgaaggaggtggaggcgggggtggtggtgagcgctccccacaggagctgctgtcaggggaggcccgagtaccactgcccaaaagccccccagccacacggccccctagggagcctgtgctcttgctggaggaggaccggccactgtctgagtgggagggcccagtagggacccctcgggctggcccaggcagtgcccctcgcccagagccatgggaaggcaggtgcccgcctggggagctggtggttggctcggcacctccggtgctgtaggtgggcaggctggacagtgagtttcggccagagtcggatagcgtccctgatgggcagccactggcccagccactaaatgccaggggtttgtcagcagctgaannnnnnnnnnnnnnnnnnnnnnnnnnnncagggcccccaaacagctgcgtcaggctgccctggctcccagacagcccggtggcccgaggacccatgaagctaggcagggacggagcccctcgaggtttgggcagcactggcttgaaggctgttgggcggatcaggatcttctccatgttcttctccagctttccagagacagggatgagctttggtggtgggccgcggaggtgggcattgtgtgcccgctgctctcgggcatcctcaacatcactgcttgggctggggggtgactctgtccggaagtcctcattgatgtaggtgaagctggtgacagggacagccttcctagggggcacagctgggcacagcggctcctgtgcctcatagccaccccgtagcaggccatcctgctggcggaagaaggtgggcccaggagggccgtggtggcggggaggagccaa

SEQ ID NO: 185349 - DNA, 1999 bp, Homo Sapiens
  misc_feature (104)..(140): n is a, c, g, or t
  misc_feature (943)..(1003): n is a, c, g, or t
  misc_feature (1051)..(1100): n is a, c, g, or t
  misc_feature (1850)..(1858): n is a, c, g, or t
ttggattctttaagaagacttccatctgaagttctgccttatactaggttagtgctgtgagttgaaattctgcagttttctaggtaggcagacatttatttttnnnnnnnnnnnnnnnnnnnnnnnnnnnnnnnnnnnnnttttacttttatcctcttaccgaaggttacactgttgtgcctgtttgtctgcaatgctgtttatattttgggtgatgaaataggagtttcctagctatataaaccagattactcacccatgcatatagtaagaactaatgaataatcaaaataatttcatcaacttttagaatattttatgttgcttgcactataggagtcataaaaggaacttagttaaaatatgttggattgttaaacatttggggaaatatgaactgtattttaaatttgttaggtctgaagaatctaaaactgttaatttaacccttaacttgtgcctagaaactacagcacatataaaatatgtaaacaccagcctgttgctgtacttttctgcttattttacagcctcaaatatttctcattatcttgtcacttagttcttcatgtttctccttctgacttttaataatggtaataggaaaacaaaacccaaagcttttcagaacttcagtgtgaggtttcctattttgacaagttaacttgtaaatactcaggttttacgatgtataatttacctaatagaccaaactaactcatggagatattttgaactattatttaggtacaaactttataaagaatgttagtatgtcataaaatataacattacagcttatttaaaaccaaatatagttgaacatatttaaaatacattttcacagaatggatgaattagttgtttcttcagagttacttatgaacagttgaatgctttaaaatgttctgtctgtaggtaacatctaaaacacaagtgggtnnnnnnnnnnnnnnnnnnnnnnnnnnnnnnnnnnnnnnnnnnnnnnnnnnnnnnnnnnnnntatcgcaaatgagtgtcagatttttgagtaccaatgatcatgcttccnnnnnnnnnnnnnnnnnnnnnnnnnnnnnnnnnnnnnnnnnnnnnnnnnnatcttataatatagaaatcttatgtaaatgaaattttggcatgtttcaaataaagagaactgaagtagaaaatagaaatgccagtaaacaacataatgtttaatttacaacttacattaggggtttgggggaatgctaattatatattgagaatatacattagaactcttcaaaatgggctcttctaatgaggtcactactgaacaaaattgttccctcttctgttaaatagaataggtttaaatgactagtcaaatgaattattttcttcttgttaaataaattaaatcttactttcttttaatgaccaaccttaggtaaaacaaaaatattgtaatcctagaaattatcctccagctttctcacctgaaaatctattgaagtgatccctggtcatcctaataatgggatgagggaagtttccagcagatttcaggctgttcttaaagtttttgttggtcattttctcaatagtacatgaaatcaagatgcttatgagcatggaaatgtatttaaagtttttgcttgtgtcctcctcagtcagaatagaaaagtaactgaaatactcttacctttctgtccttgataaaatagtaaagaaaaccaaacaaacccaggcctgatgggaaaaatgattcctttattctagcaacttactttctgttggtatgggaaatgttattaatttctattactaaagttcatatcacaaaatgatatttaataataaccttggggtaaatcatgaannnnnnnnnctacgtgtgagtataaaagacaaaagttgaacagcatggaatctcattgccaaattattagtgaatgtatagttcaggtattctttgagacacacagtatcattaatttccgaattgtatttcagtgttattttttgtttg

SEQ ID NO: 185350 - DNA, 1261 bp, Homo Sapiens
  misc_feature (812)..(864): n is a, c, g, or t
ttggcaaaagaagaagacagtgccaacctgaagccatctgaattaaaaaaagatacatgctactctccaaagccatctgtgtacctttcaacaccttccagtgcttctaaagcaaatacaactgctttcctgactccattagaaatcaaagctaaagtggaaacagatgatgtgaaaaaaaattccctggatgaacttagagcccagattattgaattgttgtgcattgtagaagcactgaaaaaggatcacgggaaagaactggaaaaactgcgaaaagatttggaagaagagaagacaatgagaagtaatctagagatggaaatagagaagctgaaaaaagctgtcctgtcttcttgagtggtgtggacctggtgttcataatgttccagggattcagaagcaacgctatgaacttcagctgacttgttacttaaaaattgtgaattctgttgttgtgataaatatgagcaaatgaagtgtaatatctatagaaaagtagagtgagggtgaatttatatatatattttgttttgccaatatgaagaaaaagaggccttatttcttaactgtgctgggattgcaaacactttttaaaaaattgtttgcttgaaaatactactgaatataaataagaatgtgcacagtagtttttttattgaaacttgtattatttttaaagagatctatactataaatatggtgatatatttacaagtaatctgtaagatatactatttgagagggacagattagccttttagtaactatagtcactactttttccataatgcataagggatataaactcnnnnnnnnnnnnnnnnnnnnnnnnnnnnnnnnnnnnnnnnnnnnnnnnnnnnnatatatatttttacttttatcctcttaccgaaggttacactgttgtgcctgtttgtctgcaatgctgtttatattttgggtgatgaaataggagtttcctagctatataaaccagattactcacccatgcatatagtaagaactaatgaataatcaaaataatttcatcaacttttagaatattttatgttgcttgcactataggagtcataaaaggaacttagttaaaatatgttggattgttaaacatttggggaaatatgaactgtattttaaatttgttaggtctgaagaatctaaaactgttaatttaactcttaacttgtgcctagaaactacagcacatataaaatatgtaaacaccagcctgttgctgtacttttctgcttattttaca

SEQ ID NO: 185351 - DNA, 2886 bp, Homo Sapiens
ttgggtttccttgggtcatcactaattatgaatcagaagaactggatcttaccttgcccaccaacttcagagatttgtccaagccaataggagctctgaacccaaaaagagcagcattcttcgctgagcgttatgaatcatgggaagatgatcaagttccaaagtttcactatggtactcattactcaactgcaagttttgttcttgcatggctgctaagaatagaaccctttacaacttatttcctaaatttgcaaggaggcaaatttgatcatgcagatcgaactttttcatcaatttccagagcttggcgaaacagtcagcgtgatacctctgatattaaggagttgatccctgaattttattatctccctgagatgtttgtcaacttcaataattataatcttggagtgatggatgatgggacagtagtgtctgatgtcgaacttcctccttgggccaaaacctcagaagaatttgttcacataaacagattggccctggagagtgaatttgtttcctgccagcttcaccaatggattgatctcatttttggctataaacagcaaggaccagaagctgtccgagccctcaatgtgttctattacttgacctatgaaggagctgtcaatctgaattcaataactgatcctgtgttgagagaggctgttgaagctcaaatccgaagttttggacagactccttctcaactactcatagagccccatcctcccagaggttctgccatgcaagtgtatctcccgcaagtccattgatgttcacagacaaagcccagcaggatgttatcatggtcctcaagtttccctccaactcccctgttactcacgtggcagccaacacccagcctggtttggcaactcccgctgtgatcacagtcactgctaacaggttatttgcggtgaacaaatggcacaaccttcctgctcatcaaggtgctgtacaagaccagccataccagctgccagtggaaatcgatcctctcatagccagcaatacaggaatgcacaggaggcaaatcactgaccttttagaccaaagtattcaagtgcattcccagtgctttgtcatcacttcagacaaccgctatattctcgtctgtggcttctgggataaaagtttcagagtctattctacagacacaggaagattgatccaagtggtgtttggccattgggatgtcgtcacttgccttgctcgttctgagtcatatattgggggaaattgctacattctctcagggtcacgtgatgcaactcttttgctgtggtattggaatggaaaatgcagtgggattggagataacccaggcagtgagactgctgctcctcgggccattttgaccggccatgactatgaggtcacatgtgctgcggtgtgtgcggagctaggcctggtgttgagtggttcacaagaaggaccatgtctcatacattccatgaatggagacttgttgaggaccttggagggtcctgaaaactgcctgaaaccaaaactcattcaggcttcaagagagggtcattgtgtcatattctatgaaaacggcctcttctgtacattcagtgtgaatggaaaactccaggccacgatggaaacagatgataacataagagccatccagctgagccgagatgggcagtacctgctcacaggaggagacagaggagtggtcgtggtccggcaggtgtcggacctcaagcagctctttgcctatccaggatgtgacgctggaatccgggccatggcgctgtcttacgaccagaggtgcatcatttctggcatggcttcaggaagcattgtgctattttacaacgactttaaccggtggcatcatgaataccaaacccgctactgatggtgacagctgtacatcaactctgcccctaggatgagcagaagtacctggagcatcattctcttctaccacatctgaatgtaacttaaatttgctcaaagaagcaaaatattttttaaagttattaataattgctatttttgtagtctttgcttgacttttttgggggggattagcaaagcagaaaactggctgctgggttctgtagttttaaaaaatctatatttttagtcataatgagaagtctattttcaccaattatggaaacatacagtggagcaagtaaaccacttattccagctataatattatgaagaacatttcccatgcatctacaagcttgagaaataggattttcacagtggggaagtgggttacaatattggaataggaaaatttgatgctgtaatttgggtcctgtatttttccaaacaactgtgcttcttcagcactaatatttctgggatttaaatagtaatgtttaaattatggtaaatgtaatttaaaacatctcaattaagtctgtctatcaatattgttcttcaagcatgttttagacctagaaaagtatggtttgggggaggctattttattgtgtggttagcacaaggaatctaatttatagcaagtgtgaaatagttaccatttttttcctgatctgtcatcttcatagcacaacaaaacgaaatgatggaaatgctcttgagctcacaacatttgtttttcttttaaagtaaatgcaagtaccaaagctcactactgcggtttgcctgtgcctggacaatgaggcggagccactgttgttggggcacccccttccctccccgggtttgcaaatagaagctaccgggtgctgtattcagcaacacctgttttactatttgttattaaactatcatctccaccttccttttgattagcaatttgtactaagaaacgaaacaatgttatttggtggtgtataattcctacttttctagtagattactgtgtggaattctgtgaaaaatatt

SEQ ID NO: 185352 - DNA, 2005 bp, Homo Sapiens
ttggggacgattgttttacggatcccgtgatcggcccgtccttctcccctttccccccctccctaccgcccctgtcccgccggggagcggcggcggccttggactttgctgtctttcctcgcggagacagatttcaacactacacttgcacaatgtctttgaaaccaagagtagtagattttgatgaaacatggaacaaacttttgacgacaataaaagccgtggtcatgttggaatacgtcgaaagagcaacatggaatgaccgtttctcagatatctatgctttatgtgtggcctatcctgaaccccttggagaaagactttatacagaaactaagatttttttggaaaatcatgttcggcatttgcataagagagttttggagtcagaagaacaagtacttgttatgtatcataggtactgggaagaatacagcaagggtgcagactatatggactgcttatataggtatctcaacacccagtttattaaaaagaataaattaacagaagcggaccttcagtatggctatggtggtgtagatatgaatgaaccacttatggaaataggagagctagcattggatatgtggaggaaattgatggttgaaccacttcaggccatccttatccgaatgctgctccgagaaatcaaaaatgatcgtggtggagaagacccaaaccagaaagtaatccatggggttattaactcctttgttcatgttgaacagtataagaaaaaattccccttaaagttttatcaggaaatttttgagtctccctttctgactgaaacaggagagtattacaaacaagaagcttcaaatttattacaagaatcaaactgctcacagtatatggaaaaggttctaggtagattaaaagatgaagaaattcgatgtcgaaaatacctacatccaagttcatatactaaggtgattcatgaatgtcaacaacgaatggtagcagaccacttacagtttttacatgcagaatgtcataatataattcgacaagagaaaaaaaatgacatggcaaatatgtacgtcttactccgtgctgtgtccactggtttacctcatatgattcaggagctgcaaaaccacatccatgatgagggccttcgagcaaccagcaaccttactcaggaaaacatgccaacactatttgtggagtcagttttggaagtgcatggtaaatttgttcagcttatcaacactgttttgaatggtgatcagcattttatgagtgcgttggataaggcccttacgtcagttgtaaattacagagaacctaagtctgtttgcaaagcacctgaactgcttgctaagtactgtgacaacttactgaagaagtcagcgaaagggatgacagagaatgaagtggaagacaggctcacgagcttcatcacagtgttcaaatacattgatgacaaggacgtctttcaaaagttctacgcaagaatgctggcaaaacgtttaattcatgggttatccatgtctatggactctgaagaagccatgatcaacaaattaaagcaagcctgtggttatgagtttaccagcaagctacatcggatgtatacagatatgagtgtcagcgctgatctcaacaataagttcaacaattttatcaaaaaccaagacacagtaatagatttgggaattagttttcaaatatatgttctacaggctggtgcgtggcctcttactcaggctccttcatctacgtttgcaattccccaggaattagaaaaaagtgtacagatgtttgaattattttatagccaacatttcagtggaaggaaacttacatggttacattatctgtgtacaggtgaagttaaaatgaactatttgggcaaaccatatgtagccatggttacaacataccaaatgggcagttcttcttgcctttaacaacagtgaaactgtcagttataaagagcttcaggacagcactcagatgaatgaaaagggacctgacaaaatcatcaaatcattac

SEQ ID NO: 185353 - DNA, 1397 bp, Homo Sapiens
ttggcgtttctaggcctggtcggctggcggcggtccttatgtcgtcagaagatcgagaagctcaggaggatgaattgctggccctggcaagtatttacgatggagatgaatttagaaaagcagagtctgtccaaggtggagaaaccaggatctatttggatttgccacagaatttcaagatatttgtgagcggcaattcaaatgagtgtctccagaatagtggctttgaatacaccatttgctttctgcctccacttgtgctgaactttgaactgccaccagattatccatcctcttccccaccttcattcacacttagtggcaaatggctgtcaccaactcagctatctgctctatgcaagcacttagacaacctatgggaagaacaccgtggcagcgtggtcctgtttgcctggatgcaatttcttaaggaagagaccctagcatacttgaatattgtctctccttttgagctcaagattggctcagaaaaaagtgcagagaaggacagctcaagcttctcccaacacagagctagattttggaggagctgctggatctgatgtagaccaagaggaaattgtggatgagagagcagtgcaggatgtggaatcactgtcaaatctgatccaggaaatcttggactttgatcaagctcagcagataaaatgctttaatagtaaattgttcctgtgcagtatctgtttctgtgagaagctgggtagtgaatgcatgtacttcttggagtgcaggcatgtgtactgcaaagcctgtctgaaggactactttgaaatccagatcagagatggccaggttcaatgcctcaactgcccagaaccaaagtgcccttcggtggccactcctggtcaggtcaaagagttagtggaagcagagttatttgcccgttatgaccgccttctcctccagtcctccttggacctgatggcagatgtggtgtactgcccccggccgtgctgccagctgcctgtgatgcaggaacctggctgcaccatgggtatctgctccagctgcaattttgccttctgtactttgtgcaggttgacctaccatggggtctccccatgtaaggtgactgcagagaaattaatggacttacgaaatgaatacctgcaagcggatgaggctaataaaagacttttggatcaaaggtatggtaagagagtgattcagaaggcactggaagagatggaaagtaaggagtggctagagaagaactcaaagagctgcccatgttgtggaactcccatagagaaattagacggatgtaacaagatgacatgtactggctgtatgcaatatttctgttggatttgcatgggttctctctctagagcaacccttacaaacatttcaatgaccctggttcaccatgtttt

SEQ ID NO: 185354 - DNA, 1675 bp, Homo Sapiens
ctttgtacaaaaaagcagtggctgagctcaaccgcccgcaagagggttctggaagcaaaggagctggcgttacagcccaaagatgatattgtagaccgagcaaaaatggaagataccctgaagaggaggtttttctatgatcaagcttttgctatttatggaggtgttagtggtctgtatgactttgggccagttggctgtgctttgaagaacaatattattcagacctggaggcagcactttatccaagaggaacagatcctggagatcgattgcaccatgctcacccctgagccagttttaaagacctctggccatgtagacaaatttgctgacttcatggtgaaagacgtaaaaaatggagaatgttttcgtgctgaccatctattaaaagctcatttacagaaattgatgtctgataagaagtgttctgtcgaaaagaaatcagaaatggaaagtgttttggcccagcttgataactatggacagcaagaacttgcggatctttttgtgaactataatgtaaaatctcccattactggaaatgatctatcccctccagtgtcttttaacttaatgttcaagactttcattgggcctggaggaaacatgcctgggtacttgagaccagaaactgcacaggggattttcttgaatttcaaacgacttttggagttcaaccaaggaaagttgccttttgctgctgcccagattggaaattcttttagaaatgagatctcccctcgatctggactgatcagagtcagagaattcacaatggcagaaattgagcactttgtagatcccagtgagaaagaccaccccaagttccagaatgtggcagaccttcacctttatttgtattcagcaaaagcccaggtcagcggacagtccgctcggaaaatgcgcctgggagatgctgttgaacagggtgtgattaataacacagtattaggctatttcattggccgcatctacctctacctcacgaaggttggaatatctccagataaactccgcttccggcagcacatggagaatgagatggcccattatgcctgtgactgttgggatgcagaatccaaaacatcctacggttggattgagattgttggatgtgctgatcgttcctgttatgacctctcctgtcatgcacgagccaccaaagtcccacttgtagctgagaaacctctgaaagaacccaaaacagtcaatgttgttcagtttgaacccagtaagggagcaattggtaaggcatataagaaggatgcaaaactggtgatggagtatcttgccatttgtgatgagtgctacattacagaaatggagatgctgctgaatgagaaaggggaattcacaattgaaactgaagggaaaacatttcagttaacaaaagacatgatcaatgtgaagagattccagaaaacactatatgtggaagaagttgttccgaatgtaattgaaccttccttcggcctgggtaggatcatgtatacggtatttgaacatacattccatgtacgagaaggagatgaacagagaacattcttcagtttccctgctgtagttgctccattcaaatgttccgtcctcccactgagccaaaccaggagttcatgccaatttgtcaaggaattatcggaagccctgaccaggcatggagtatctcacaaag

SEQ ID NO: 185355 - DNA, 1505 bp, Homo Sapiens
aaaatgctactttaagaatgtgtttacaactactgatgagtgaatataaaatatggatgaactcaaatatttgccagacctaagagtatatgtatgtactatatggttccatttatacatgaatttctacagtgagctatttaaggtggtagaaatcattttatgtagacatagcattattatcccgttaaaaacgagagcaaatacttgtttcttataatagccaatgctatcagaagacttaaaaactaatggattttatcactttacaaattgttatgtagacatcctttttttcctaataaaaaaagaatgtgttgataggtattctgacaccaaaactgcccaaaaatagcactataaattagaacatatttttcagtctcagggtagtagtcatctgtatttaagttttgtgtgatttagagaaatttcataaattaatttctgtaggactttatattaacaatttattcatattcttttcttctaaggtttcattgtaggtataattatgcaaagcaaagaatccaggaaagaattgccagagaagaaattaaaaagaagatattatatgaaggtacccacctcgatcctgaaagaaaacacaacggcagcagcagcaattgaacaatcttgagcatagaaaagaagtcaatgtaaacgaagttaagatcaaccacataaaacatttcatgtgcaataagctctcaatcaagtaaataaagtttaagttgtagtcatttttttcccacacttgtgtggaatgaaaacttgccagtttattctggccctgtgtctactgccaggatagcattcttacgtgttacatatagtggacttgtcatccttaaaatgtgaacagaatttattggcagtgtggcaaagaattataaaacatagtgtttaatgtacttggagtttccttgtagtagtaagtatagagtttgatgataagtaaacgtcccttaacaaaaacctcagccttattactatcccattaaaaaacagcaaatacttactgagttcttgtaagagctaatgtcattgtaagatttaaaactaagggcttttatcactttgcaaattattttttaaatgcattcatcatttgacagtgttctctcatttcttaaaatgcgagtcatcttccaaaagagttgtttttaactgccctaaacatttttggggaagtatgcagggtttaaatttttaagtataattagttctgaattaaaatatgcacatggaacttgtctggcagactgatgcaatagtaaaacaactgcagaattactattaatgtaaacaatccatttgaaagtcaatcagctgctcccattaaaatattatttaaaatacaatacccacagcatctaactaaatcctcaggatttattctccgggagaaattatccctttctaggaaaatgaagttatttctggttttaattcatacatactttaagaaaatctgttaatataacaaaacacaagctagatgc

SEQ ID NO: 185356 - DNA, 1665 bp, Homo Sapiens
ttggctacgcggaggattagagcaggcggtgcgctgggggcgggagcagcgcggagcccggctcggccacaccgatcgcccgccgccatgggctcctcgcaaagcgtcgagatcccgggcgggggcaccgagggctaccacgttctgcgggtacaagaaaattccccaggacacagagctggtttggagcctttctttgattttattgtttctattaatggttcaagattaaataaagacaatgacactcttaaggatctgctgaaagcaaacgttgaaaagcctgtaaagatgcttatctatagcagcaaaacattggaactgcgagagacctcagtcacaccaagtaacctgtggggcggccagggcttattgggagtgagcattcgtttctgcagctttgatggggcaaatgaaaatgtttggcatgtgctggaggtggaatcaaattctcctgcagcactggcaggtcttagaccacacagtgattatataattggagcagatacagtcatgaatgagtctgaagatctattcagccttatcgaaacacatgaagcaaaaccattgaaactgtatgtgtacaacacagacactgataactgtcgagaagtgattattacaccaaattctgcatggggtggagaaggcagcctaggatgtggcattggatatggttatttgcatcgaatacctacacgcccatttgaggaaggaaagaaaatttctcttccaggacaaatggctggtacacctattacacctcttaaagatgggtttacagaggtccagctgtcctcagttaatcccccgtctttgtcaccaccaggaactacaggaattgaacagagtctgactggactttctattagctcaactccaccagctgtcagtagtgttctcagtacaggtgtaccaacagtaccgttattgccaccacaagtaaaccagtccctcacttctgtgccaccaatgaatccagctactacattaccaggtctgatgcctttaccagcaggactgcccaacctccccaacctcaacctcaacctcccagcaccacacatcatgccaggggttggcttaccagaacttgtaaacccaggtctgccacctcttccttccatgcctccccgaaacttacctggcattgcacctctccccctgccatccgagttcctcccgtcattccccttggttccagagagctcttctgcagcaagctcaggagagctgctgtcttccctcccgcccaccagcaacgcaccctctgaccctgccacaactactgcaaaggcagacgctgcctcctcactcactgtggatgtgacgccccccactgccaaggcccccaccaccgttgaggacagagtcggcgactccaccccagtcagcgagaagcctgtttctgcggctgtggatgccaatgcttctgagtcaccttaactttgaaccattctttggaattggcgtggtatatttaaccacgggagcgtgtctggaaacgcaaactatcattaatttcatactagtttgtaccgtatctgtaagcatcctgtaaataattccaaggggaaaactaaacgaggacgtgggttgtatcctgccaggttgagtggggctcacacgctagggtgagatgtcagaaagcgctttgtattttaa

SEQ ID NO: 185357 - DNA, 1730 bp, Homo Sapiens
  misc_feature (1331)..(1339): n is a, c, g, or t
  misc_feature (1449)..(1482): n is a, c, g, or t
ttggctcgtgtttctgttataagtggtcctcagaacacaagatccagtcatttaaataaaaagggaaacagtgcttctaagagaagaaagaaagttgctcctccactaattgcacctaacgcttcccaaaacttggtaacaagtgacttaacaacaatgggactcatagcaaagagtgttgaaatcccaactactaaccttcattcaaatgtaattccaacttgtgaacctcagagtttggtggaaaatctaacacagaaattaaataatgttaacaatcagttatttatgactgatgtaaaagagaatttcaaaaccagtcttgagtcccatacagtgttagcccctttaacattaaaaactgaaaatggtgattcccaaatgatggctttgaattcatgcacaacttcagtaaattctgatttgcagatttctgaagacaatgttatacaaaactttgaaaagactcttgaaattattaaaactgctatgaattctcaaatacttgaggtaaaaagtggatctcagggtgctggtgaaacttcacaaaatgctcaaataaattataacattcagcttccttcagtaaacactgtgcaaaataacaaattacccgattcttctccgttttcctcctttataagtgtcatgccaacaaaaagtaacattcctcagtctgaagtatcacataaggaggatcaaatacaggaaattttagaaggcttacagaaattaaaattagaaaatgacctatccactccagcatcccaatgtgtactgataaatacatcagtgacactgactcccacgcctgttaaatcaactgcagatatcacagttattcagccagtttctgaaatgataaacattcaatttaatgacaaagttaataaaccctttgtgtgtcaaaaccaaggctgtaactacagtgctatgacaaaggatgcactatttaagcactatggtaaaattcatcaatacactccagaaatgattcttgaaattaagaagaatcaattgaaatttgctccctttaaatgtgtagtacctacatgtacaaaaacatttacaagaaattctaacctccgggcacactgtcagttggtgcatcattttacaactgaagaaatggtaaagttaaaaattaaaaggccttatggaagaaaatctcagagtgaaaatgtgccggcctcacgaagtacacaagtgaaaaaacagctagctatgacagaggaaaataaaaaggaatctcagcctgctttagaattgagagcagagacccaaaatacccacagtaatgtagcagtgatcccagaaaaacaacttgtagnnnnnnnnngtcctgacaaaacagaaagttctttacaagtgattacagttacttcagaacaatgtaatacaaatgcactcacaaacacacaaaccaaaggacggaagattaggaggcannnnnnnnnnnnnnnnnnnnnnnnnnnnnnnnnnccagtttctccaatcctcttgagtttccaacaagatacagtctcttacagaccttatcgatgtgttcaccagggatgctttgctgcctttacgatacagcaaaatttgattctccattaccaggctgtacacaaatcagatctacctgcattttcagcagaggtcgaagaggaaagtgaagctggtaaagaaagtgaagaaactgaaactaaacaaactttgaaagaatttcgatgtcaggtaagtga

SEQ ID NO: 185358 - DNA, 1567 bp, Homo Sapiens
  misc_feature (271)..(279): n is a, c, g, or t
  misc_feature (389)..(422): n is a, c, g, or t
  misc_feature (1104)..(1162): n is a, c, g, or t
ttggatttacaagaaattctaacctccgggcacactgtcagttggtgcatcattttacaactgaagaaatggtaaagttaaaaattaaaaggccttatggaagaaaatctcagagtgaaaatgtgccggcctcacgaagtacacaagtgaaaaaacagctagctatgacagaggaaaataaaaaggaatctcagcctgctttagaattgagagcagagacccaaaatacccacagtaatgtagcagtgatcccagaaaaacaacttgtagnnnnnnnnngtcctgacaaaacagaaagttctttacaagtgattacagttacttcagaacaatgtaatacaaatgcactcacaaacacacaaaccaaaggacggaagattaggaggcannnnnnnnnnnnnnnnnnnnnnnnnnnnnnnnnnccagtttcccaatcccttgagtttccaacaagatacagtccttacagaccttatcgatgtgttcaccagggatgctttgctgcctttacgatacagcaaaatttgattctccattaccaggctgtacacaaatcagatctacctgcattttcagcagaggtcgaagaggaaagtgaagctggtaaagaaagtgaagaaactgaaactaaacaaactttgaaagaatttcgatgtcaggtaagtgactgttctcgaattttccaagcaattactggcctaatacaacactacatgaaacttcatgaaatgactcctgaagaaattgaaagtatgactgcttcagtggatgttgggaagtttccatgtgaccagttagagtgtaaatcttcatttactacatatttgaactatgttgttcatctagaggcagaccacgggattggactaagggcaagtaaaacagaagaagatggtgtatacaaatgtgattgtgaaggctgtgaccgtatatatgcaacccggtcgaatctcctccgacacatttttaataagcataatgacaaacataaggctcatttgattcgtccaagaagattaacaccaggccaggaaaatatgtcaagcaaggcaaaccaagaaaaatcaaagtctaaacatcgggggacgaagcacagcagatgtnnnnnnnnnnnnnnnnnnnnnnnnnnnnnnnnnnnnnnnnnnnnnnnnnnnnnnnnnnncaagaatgcaaagattgtgcagattgaagaaaataagccttattctctgaaacgtgggaagcatgtatattctataaaggctagaaatgatgccctgtctgagtgtacaagcagatttgtaacccagtatccatgtatgataaagggatgtacttcagttgttacaagtgaaagcaatataattagacattataagtgccataaattatctaacgcatttacatcacaacaccgaaatcttcttattgtattcaaacggtgttgcaactcacaagtaaaggaaacgtctgagcaagaacgtgctaagaatgatgtgaaagattctgacacgtgtgtatcagagagcaatgataattcaagaacaacagctacagtttcacaaaaggaagttgaaaaaaatgaaaa

SEQ ID NO: 185359 - DNA, 1843 bp, Homo Sapiens
ttggcataaacagaaggcttctggccaagctgtggatgattttaagacacaaggtgtgaacatagaacagttcagagaattgaagaacacagtatcatacagtgggaaaaggaaagggcccgattcgttgtctgatggacctgcttgcaaaaggccagctctgttgcattcccaatttttgacaccacctcaaacaccaacgcccggggagagcatggaagatgttcatctcaatgaacccaaacaggagagcagtgctgatctgcttcagaacattatcaacattaagaatgaatgcagccccgtttccctgaacacagttcaagttagctggctgaaccccgtggtggtccctcagagctcccccgcagagcagtgtcaggacttccatggagggcaggtcttttctccacctcagaaatgccaaccattccaagtcaggggctcccaacaaatgatagaccaggcttccctgtaccagtattctccacagaaccagcatgtagagcagcagccacactacacccacaaaccaactctggaatacagtccttttcccatacctccccagtcccccgcttatgaaccaaacctctttgatggtccagaatcacagttttgcccaaaccaaagcttagtttcccttcttggtgatcaaagggaatctgagaatattgctaatcccatgcagacttcctccagtgttcagcagcaaaatgatgctcacttgcacagcttcagcatgatgcccagcagcgcctgtgaggccatggtggggcacgagatggcctctgactcttcaaacacttcactgccattctcaaacatgggaaatccaatgaacaccacacagttagggaaatcactttttcagtggcaggtggagcacgaagaaagcaaattggcaaatatttcccaagaccagtttctttcaaaggatgcagatggtgacacgttccttcatattgctgttgcccaagggagaagggcactttcctatgttcttgcaagaaagatgaatgcacttcacatgctggatattaaagagcacaatggacagagtgcctttcaggtggcagtggctgccaatcagcatctcattgtgcaggatctggtgaacatcggggcacaggtgaacaccacagactgctggggaagaacacctctgcatgtgtgtgctgagaagggccactcccaggtgcttcaggcgattcagaagggagcagtgggaagtaatcagtttgtggatcttgaggcaactaactatgatggcctgactccccttcactgtgcagtcatagcccacaatgctgtggtccatgaactccagagaaatcaacagcctcattcacctgaagttcaggagcttttactgaagaataagagtctggttgataccattaagtgcctaattcaaatgggagcagcggtggaagcgaaggatcgcaaaagtggccgcacagccctgcatttggcagctgaagaagcaaatctggaactcattcgcctctttttggagctgcccagttgcctgtcttttgtgaatgcaaaggcttacaatggcaacactgccctccatgttgctgccagcttgcagtatcggttgacacaattagatgctgtccgcctgttgatgaggaagggagcagacccaagtactcggaacttggagaacgaacagccagtgcatttggttcccgatggccctgtgggagaacagatccgacgtatcctgaagggaaagtccattcagcagagagctccaccgtattagctccattagcttggagcctgctagcaacactcactgtcagttagcagtcctgatgtatctgtacataga

SEQ ID NO: 185360 - DNA, 928 bp, Homo Sapiens
  misc_feature (320)..(335): n is a, c, g, or t
  misc_feature (353)..(412): n is a, c, g, or t
  misc_feature (486)..(595): n is a, c, g, or t
  misc_feature (691)..(703): n is a, c, g, or t
ctttgtacaagagagttggctgtatataattcgttatatatttgtccttaaaatattgtacatacttggttgttaacatggtcatatttgaaatgtataagtccatcacactagaaaagaacaagtgaattgttgctatttaaaaaaattttacaattcttactaaggagtttttattgtgtaatcactaagtctttgtagataaagcagatggggagttacggagttgttcctttactggctgaaagatatattcgaattgtaaagatgctttttctcatgcattgaaattatacattatttgtagggaattgcatgcnnnnnnnnnnnnnnnnctcccgagacagggtctnnnnnnnnnnnnnnnnnnnnnnnnnnnnnnnnnnnnnnnnnnnnnnnnnnnnnnnnnnnngggctcaagtgatcctcctacctgagccttctgagtaactgggactacaggtgtgcactcctcgcctggctaannnnnnnnnnnnnnnnnnnnnnnnnnnnnnnnnnnnnnnnnnnnnnnnnnnnnnnnnnnnnnnnnnnnnnnnnnnnnnnnnnnnnnnnnnnnnnnnnnnnnnnnnnnnnngagtgagccaccatgcccggctggcagttgcatggaagagaacacctctttatggcttaccctctagaatttctaatttatgtgttctgttgaaannnnnnnnnnnnnacctttattgaaacaacaaaaagtcagtattgaaacatatcttcctgttttctgttgtcaaatgatgataatgtgccatgatgttttatatatatcattcagaaaaagttttattttttaataacattctattaacattattttgcttgccgctggcatgcctgaggaatgtatttggctttgattacacactaagttttgtaataaatttgactcattaaaacc

SEQ ID NO: 185361 - DNA, 1726 bp, Homo Sapiens
  misc_feature (813)..(849): n is a, c, g, or t
ttggcaagtgaatccctgtgctggagaggcgctctgaggctcctggggagtcggtgggaacgacaccagaagctcaggtggagatcttatcttcctgaggctgctggatttgatgaagactggcccatttgcagagcactccaaccagctgtggaacatcagcgccgtcccttcctggtccaaagtgaaccagggtctcatccgcatgtataaggccgagtgcctggagaagttccctgtgatccagcacttcaagttcgggagcctgctgcccatccatcctgtcacgtcgggctaggaggggccaagccgaagagccacccaggccacagttcctgtgcctgccttccccaccccagcagtggcccctccccatcccctccctctgttcgtcccgtttgatgagaggctgtttactggggtggggtggcgagatgggcttgagggggctcagagcataaggcttcagggcccaagttgggagaagtgaccaaagtgtagccagttttctgagttcccgtgtgctagactggccagaagagagggtctggggcctggtcactcggccactctctcctgtttctggcctcttctcccttcactcccgtccagtctggttttgagagcaggggctgttctgcagcacctcagggaagggaggagagatacctgctgcttccattgcttttcccttcctggagtcgatgcctttctaagggttggagctgctccttgcaggggcgggtcagtttcccaggccatgccggggtggccatctatgctagggctggaagctgaggctggccgccagcnnnnnnnnnnnnnnnnnnnnnnnnnnnnnnnnnnnnnagaggccttagctgtcctggctggtgcccctcccaggctccttttcaccctgccccctgggcctgaggccccctgtgtccaagcctccccctggctcttcagttctctagcccttggctttgctgggtttcctgactgtagccacatctctcccgctccctaagggtaacctagccaatggaagctgccctttgggtaggtgctgggctcctgggagggcccagatgatggggtgaggcatgtctttccagaactttccctggcagggaggggatggcagaaactcagggaggggcttggggcccattgtatctggagagcctggattcctcttggcagtcttaggcccggccacttctgctacctttgcgctgctgtgagcctcaccctgggcccctgggccctgcttctctgctcccctgggtgatgggtgggcccagaaggtggcagtcccacaccttgtcctcccacctccctgaactgtccattgcttttatagggtgaggtaagagacagcctcccaagcccaggctttggcactcagaatgggcccagtgggggctgggcaggcccattgagggccaccgccgaggtttctcctagggctgttcctgggcctggctcttacaggctcgtcccccaggcctgcccttctccactgccccctcctgtgtctgggtccacacacccttcagtgaagggggagcactgagaagcacagcacaggggctcagcctgggatccggtgatggtctgggcagaggctgggtcgggaatcccaaaggtcaatgacagtttctcataagaggcccagcgtccacctctctcccagggccagacaccccttcctggctccccatccccctatgggctccca

SEQ ID NO: 185362 - DNA, 1575 bp, Homo Sapiens
ttggctgctgctcaggtagaacatctgggaggtcccttgctgaccactggaagaagatgagctcgagctattggagtgagacgagcagcagcagctgtggaacccagcagctcccagaggtgctgcagtgccagccccagcattaccactgctaccatcagtcaagccaagcccagcagcctccagaaaaaaatgtagtgtatgagcgagtgaggacctacagtgggcccatgaacaaggtggtgcaggccttggaccccttcaactcacgggaagtgctctcccctctcaaaaccacctcctcctaccaaaatttggtttggagcgaccattctcaggaactccattctccaactttaaaaatatctacatgtgccccaagtactctacatataacccaaaatactgaacaggaacttcattctccaacagtgaaacttactacatatccacagaccactattaggaaatatgtagtacaaaatcctgaacaggaaccactgtctcaattcctaagaggaagccatttcttcccaggaaacaatgttatttatgaaaaaacaataagaaaagtggagaagctaaatactgatcaggggtgccatcctcaggctcaatgccatcatcacattatccaacagccccaggtcatccactctgcacactggcaacaacctgattctagccagcaaatccaagccatcacaggaaataatccaatttctacacatattggaaatgaactgtgccatagtggatcaagccagatttgtgagcaggtgataattcaggatgatggccctgaaaaattggaccccagatattttggagagttgcttgctgatctgagccgtaagaatacggatctatatcactgcttattagaacatttgcagagaattggaggaagcaaacaggactttgagtctacagatgagtcggaagacattgaatcattgattcctaaaggattatcagagtttacaaaacagcaaatacgctacattctgcagatgaggggtatgtctgataagtcactccgactagtgctgtccacatttagcaacatacgggaggagcttggacatcttcaaaatgatatgacatcactggaaaatgacaagatgagacttgagaaagatttatcattcaaagacactcaattaaaagagtacgaagaactcttggcatcagtgagagcaaataatcaccagcagcagcaaggacttcaagactcaagttcaaaatgccaggcattggaagaaaacaatctctctcttcgacatacactatcagacatggaatacagactaaaagaactggaatattgtaaacgtaatttagagcaagagaatcaaaaccttagaatgcaggtttctgagacttgcacaggcccaatgttgcaggctaaaatggatgagattggcaaccactacacggagatggtaaaaaaacttgagaatggagaaagatagagagatctgcagactgagggtcccaattaaaccagtaccataaagatgtttcaaagagagaagaagttgtagtgacttccaatttaagcttcatgaactg

SEQ ID NO: 185363 - DNA, 2046 bp, Homo Sapiens
ttgggtggtggtcgcgagagagccggaaagatggtggttaccagatctgcacgggctaaggccagcatccaagccgcgtcggctgaaagttccgggcaaaagagttttgctgctaatgggattcaagcgcatccagaaagtagtactggatctgatgcccgaactactgctgaatcacagaccactgggaagcaaagtttaatccctagaactcctaaagctagaaagaggaagagcagaactacaggctcactaccaaaggggactgaaccatctacggatggagagacctctgaggcagagtcaaattattctgtgtctgagcaccatgataccattttaagggtaactaggagaaggcagatcttaattgcatgctccccagtgtccagtgttaggaaaaagccgaaagtaactccaacaaaggagtcttacactgaagaaatagtgtctgaagcagaatctcatgtttcaggtatttctagaattgtgcttcccacagaaaaaactacaggagccagaagaagtaaggctaaatctctgacagatccaagccaagaatctcatacagaagctatatctgatgctgagacatcaagctcagacatttcattctctggaattgcaactagaagaaccaggagtatgcagaggaaattaaaggcacaaactgaaaagaaagatagtaagattgtaccaggaaatgagaaacagatcgtgggtacacctgtgaattcagaggattcagataccagacaaacttcccatttacaagcaagatctctttctgagataaataagccaaatttctataataatgactttgatgatgatttctcccacagaagttcagaaaatatattaacagtgcacgaacaggccaatgttgaatctcttaaagaaacaaaacagaattgtaaggatttggatgaagatgccaatggaataacagatgaggggaaagaaattaatgagaaaagttctcagctgaagaatctttctgaacttcaggacactagccttcaacagttagtttctcagagacattcaaccccccaaaataaaaatgctgtatcagtgcactctaatctgaactctgaggctgtaatgaaatcattaactcaaacatttgcaactgtggaagtaggcagatggaataacaacaaaaagagccccataaaagcaagtgacttgacaaagtttggtgattgtggtggtagtgatgatgaagaagagtccacagttataagtgtcagtgaagacatgaacagtgaagggaatgtagattttgaatgtgataccaaactatacacgtctgcgcccaacacatctcagggtaaagataattctgtcttactagttctcagcagtgatgaaagccaacagtctgaaaacagtgagaatgaagaggatactttatgttttgttgaaaatagtggccaaagggagtcattaagtggagacacaggaagtctgtcatgtgacaatgcattgtttgtaattgacacaactcctggaatgagtgctgataaaaatttttacttggaagaggaagacaaggcaagtgaggttgccattgaggaagaaaaagaagaggaagaggatgaaaaaagtgaagaagattcatcagaccatgacgaaaatgaagatgagtttagtgatgaagaagacttcctaaatagcacaaaggctaaacttctgaagttgacaagcagcagcatagaccctggtctgagtatcaagcagttgggtggtttgtatattaatttcaatgcagataaactacagtctaacaagagaaccctaacacagatcaaggagaaaaagaaaaatgagcttctgcagaaagccgtcattacacctgattttgaaaaaaaccactgtgttccaccatatagtgaatcaaagtatcaacttcagaaaaaacgcagaaaagaacgacaaaaaacagcacggggatggctggtttggtatgaaagctccagaaatgacaaatgaactgaaaaatgatctcaaagcactgaagatgagagccagcatggaccc

SEQ ID NO: 185364 - DNA, 1829 bp, Homo Sapiens
  misc_feature (387)..(425): n is a, c, g, or t
  misc_feature (455)..(463): n is a, c, g, or t
  misc_feature (1010)..(1313): n is a, c, g, or t
  misc_feature (1315)..(1330): n is a, c, g, or t
ttggcacatgatcagattatgcgacggtatgggacaaggccaacaagctatgtgtcatgaagctttgtcacatatctgggtaccaggtttgacctcaagagatggctgctgtacactttttgcaactggtttgatgtcacatttcagctccaactttgcatcctgagaacacttaaacgtttctgcaggtccattttatacaacttgaaagaccgtaaaactttctggttgccacaagcatatctttcttttctgctcatccaataaacagctgtgccctactgtgatagattttccaaacaaaaatacctggagcagcagtttagcaaaatatgccttcagtggcattcaacaaatggagtttccccaagcacagttctgtaagannnnnnnnnnnnnnnnnnnnnnnnnnnnnnnnnnnnnnntttaagttattatttgtattgtgcaaaaannnnnnnnngatcttggggattctggctgtgaatttggtgcacgacaattatggtaaaaaaacatttgcttggtctaaagaagatcattaatgttttgtgaccatacaagttgtaacagtggattgtttttatgtgtaggtattgttaaatacagggactgtttccaggcacagaatatgaatcgtaagttaggatggacattagatgtgattatgatgataaagcgaaggtctgcggtcctatatctacagacacgtggtgagaaattagaacaaactggagacgggccattgacacatggactctgcctgggcatgttaggttaattctttgactccaagccttaaaatactcacatggagtcagcgctcacctcattcacacaattatcatagagctccctggacactgaacctctaaagggaaaaggtctaccctggagccaggagcatcagggttggcttgggagcatgagaggtgagcccagggctaggcctgggccaggccccggcagcactgctacttgggaggagccacttcacctttgtattagtnnnnnnnnnnnnnnnnnnnnnnnnnnnnnnnnnnnnnnnnnnnnnnnnnnnnnnnnnnnnnnnnnnnnnnnnnnnnnnnnnnnnnnnnnnnnnnnnnnnnnnnnnnnnnnnnnnnnnnnnnnnnnnnnnnnnnnnnnnnnnnnnnnnnnnnnnnnnnnnnnnnnnnnnnnnnnnnnnnnnnnnnnnnnnnnnnnnnnnnnnnnnnnnnnnnnnnnnnnnnnnnnnnnnnnnnnnnnnnnnnnnnnnnnnnnnnnnnnnnnnnnnnnnnnnnnnnnnnnnnnnnnnnnnnnnnnnnnnnnnnnnncnnnnnnnnnnnnnnnnccatagaatttggatcctttggtcgggttctcccaaattcttttgaggtgtccatggtcaactgcttcagctttgttttggcaaccccctgcccgaagtcgcatataggctgttcttcaccttgtttccaaggctgaggaacagaaagtagcctctgttttgaggaggtggaagttaagtatacatttattttttactgtgacttgttcaggaccacattttacaaaatgccttgtttccttcattgtttctggaaaggaaagttctattaatattgttttactttgaatatagaatagtttttttaattagggcttattttgaaaaattctgagtttaattcaaatgtatgccaataccttccaaagtaaggtaatattcagagacagttgttgtgatcagatggcttaaagaaatttctggaatattcacattcgaaaattccttattaatgaatgtctttgacttaaatctaaccaaaaactgcaacattattctt

SEQ ID NO: 185365 - DNA, 1433 bp, Homo Sapiens
  misc_feature (994)..(1032): n is a, c, g, or t
  misc_feature (1062)..(1070): n is a, c, g, or t
ttggggcttggctggcgagcccggctgaggagcctcttgggccgcacttaccgccgcgtccgctcccggtccctggcccctcagcggcatggcgtgcggggcgacgctgaagcggcccatggagttcgaggcggcgctgctgagccccggctccccgaagcggcggcgctgcgcccctctgcccggccccactccgggcctcaggcccccggacgccgagccgccgccgccgtttcagacgcagaccccaccgcagagtctgcagcagcccgccccgcccggcagcgagcggcgccttccaactccggagcaaatttttcagaacataaaacaagaatatagtcgttatcagaggtggagacatttagaagttgttcttaatcagagtgaagcttgtgcttcggaaagtcaacctcactcctcagcactcacagcacctagctctccaggttcctcatggatgaagaaggaccagcccacatttaccctccgacaagttggcataatatgtgagcgcctcttaaaagactatgaagataaaattcgggaggagtatgagcaaatcctcaataccaaactagcagaacaatatgaatcttttgtgaaattcacacatgatcagattatgcgacggtatgggacaaggccaacaagctatgtgtcatgaagctttgtcacatatctgggtaccaggtttgacctcaagagatggctgctgtacactttttgcaactggtttgatgtcacatttcagctccaactttgcatcctgagaacacttaaacgtttctgcaggtccattttatacaacttgaaagaccgtaaaactttctggttgccacaagcatatctttcttttctgctcatccaataaacagctgtgccctactgtgatagattttccaaacaaaaatacctggagcagcagtttagcaaaatatgccttcagtggcattcaacaaatggagtttccccaagcacagttctgtaagannnnnnnnnnnnnnnnnnnnnnnnnnnnnnnnnnnnnnntttaagttattatttgtattgtgcaaaaannnnnnnnngatcttggggattctggctgtgaatttggtgcacgacaattatggtaaaaaaacatttgcttggtctaaagaagatcattaatgttttgtgaccatacaagttgtaacagtggattgtttttatgtgtaggtattgttaaatacagggactgtttccaggcacagaatatgaatcgtaagttaggatggacattagatgtggattatgatgataaagcgaaggtctgcggtcctatatctacagacacgtggtgagaaattagaacaaactggagacgggccattgacacatggactctgcctgggcatgttagttaattctttgactccaagccttaaaatactcacatggagtcagcgctc

SEQ ID NO: 185366 - DNA, 2192 bp, Homo Sapiens
  misc_feature (2064)..(2098): n is a, c, g, or t
tacaaaaaagttggctcacgaccgagagcagtcattatggcgaaccttggctgctggatgctggttctctttgtggccacatggagtgacctgggcctctgcaagaagcgcccgaagcctggaggatggaacactgggggcagccgatacccggggcagggcagccctggaggcaaccgctacccacctcagggcggtggtggctgggggcagcctcatggtggtggctgggggcagcctcatggtggtggctgggggcagccccatggtggtggctggggacagcctcatggtggtggctggggtcaaggaggtggcacccacagtcagtggaacaagccgagtaagccaaaaaccaacatgaagcacatggctggtgctgcagcagctggggcagtggtggggggccttggcggctacgtgctgggaagtgccatgagcaggcccatcatacatttcggcagtgactatgaggaccgttactatcgtgaaaacatgcaccgttaccccaaccaagtgtactacaggcccatggatgagtacagcaaccagaacaactttgtgcacgactgcgtcaatatcacaatcaagcagcacacggtcaccacaaccaccaagggggagaacttcaccgagaccgacgttaagatgatggagcgcgtggttgagcagatgtgtatcacccagtacgagagggaatctcaggcctattaccagagaggatcgagcatggtcctcttctcctctccacctgtgatcctcctgatctctttcctcatcttcctgatagtgggatgaggaaggtcttcctgttttcaccatctttctaatctttttccagcttgagggaggcggtatccacctgcagcccttttagtggtggtgtctcactctttcttctctctttgtcccggataggctaatcaatacccttggcactgatgggcactggaaaacatagagtagacctgagatgctggtcaagccccctttgattgagttcatcatgagccgttgctaatgccaggccagtaaaagtataacagcaaataaccattggttaatctggacttatttttggacttagtgcaacaggttgaggctaaaacaaatctcagaacagtctgaaatacctttgcctggatacctctggctccttcagcagctagagctcagtatactaatgccctatcttagtagagtttcatagctatttagagatattttccattttaagaaaacccgacaacatttctgccaggtttgttaggaggccacatgatacttattcaaaaaaatcctagagattcttagctcttgggatgcaggctcagcccgctggagcatgagctctgtgtgtaccgagaactggggtgatgttttacttttcacagtatgggctacacagcagctgttcaacaagagtaaatattgtcacaacactgaacctctggctagaggacatattcacagtgaacataactgtaacatatatgaaaggcttctgggacttgaaatcaaatgtttgggaatggtgcccttggaggcaacctcccattttagatgtttaaaggaccctatatgtggcattcctttctttaaactataggtaattaaggcagctgaaaagtaaattgccttctagacactgaaggcaaatctcctttgtccatttacctggaaaccagaatgattttgacatacaggagagctgcagttgtgaaagcaccatcatcatagaggatgatgtaattaaaaaatggtcagtgtgcaaagaaaagaactgcttgcatttctttatttctgtctcataattgtcaaaaaccagaattaggtcaagttcatagtttctgtaattggcttttgaatcaaagaatagggagacaatctaaaaaatatcttaagttggagatgacagaaatatgattgatttgaagtggaaaaagaaattctgttaatgttaattaaagtaaaattattccctgaattgtttgatattgtcacctaacaaatatgtattacttttctgcaatgttattattggcttgcactttgtgagtattnnnnnnnnnnnnnnnnnnnnnnnnnnnnnnnnnnntgcataggacagacttaggagttttgtttagagcagttaacatctgaagtgtctaatgcattaactttttgtaaggtactgaatacttaatatg

SEQ ID NO: 185367 - DNA, 880 bp, Homo Sapiens
ttgggagcaggagagacccaaagagaaacagaaggcagatagagagggagtgagaggcaggagctgagacacagatcctggaggaagaagaccaaaggaagggggcagagacagaaagggaggtgctaggacaaaactcgaaaggtggccctatcagggaagcagaggagaggccgttctagggaagcccagctccggcacttttggccccaactcccgcaggtctgctggctccaggaaaggtggaggagggagggaggagtgggagaatgtgggcgcagggtgggacatgggcatggccaggggcagcctcactcgggttccaggggtgatgggagagggcactcagggcccagagctcagccttgaccctgacccttgctctccccaatccactccggggctcatgaaggggaacaagctggaggagcaggaccctagacctctgcagcccataccaggtctcatggaggggaacaagctggaggagcaggactctagccctccacagtccactccagggctcatgaaggggaacaagcgtgaggagcaggggctgggccccgaacctgcggcgccccagcagcccacggcggaggaggaggccctgatcgagttccaccgctcctaccgagagctcttcgagttcttctgcaacaacaccaccatccacggcgccatccgcctggtgtgctcccagcacaaccgcatgaagacggccttctgggcagtgctgtggctctgcacctttggcatgatgtactggcaattcggcctgcttttcggagagtacttcagctaccccgtcagcctcaacatcaacctcaactcgggacaagctcgtcttccccgcagtgaccatctgcaccctcaatcccta

SEQ ID NO: 185368 - DNA, 3232 bp, Homo Sapiens
  misc_feature (2835)..(2860): n is a, c, g, or t
  misc_feature (2966)..(3042): n is a, c, g, or t
acaaaaaagttgggagggtggccaggagctttggagcattggcggtttgtcttccctccctgagtctgtttggcacagttaggcccttcgccctgggcctgggagacacccttggatttccaaggagcggagctagaatctttgagcggtcaagggaaagacaagccgactcttcagatccctgtggacacactgcctgctcttccatatcatggccctccacccccgcagagtccggctaaagccctggctggtggcccaggtggatagtggcctctaccctgggctcatctggctacacagggactctaaacgcttccagattccctggaaacatgccacccggcatagccctcaacaagaagaggaaaataccatttttaaggcctgggctgtagagacagggaagtaccaggaaggggtggatgaccctgacccagctaaatggaaggcccagctgcgctgtgctctcaataagagcagagaattcaacctgatgtatgatggcaccaaggaggtgcccatgaacccagtgaagatatatcaagtgtgtgacatccctcagccccagggctcgatcattaacccaggatccacagggtctgctccctgggatgagaaggataatgatgtggatgaagaagatgaggaagatgagctggatcagtcgcagcaccatgttcccatccaggacaccttccccttcctgaacatcaatggttctcccatggcgccagccagtgtgggcaattgcagtgtgggcaactgcagcccggaggcagtgtggcccaaaactgaacccctggagatggaagtaccccaggcacctatacagcccttctatagctctccagaactgtggatcagctctctcccaatgactgacctggacatcaagtttcagtaccgtgggaaggagtacgggcagaccatgaccgtgagcaaccctcagggctgccgactcttctatggggacctgggtcccatgcctgaccaggaggagctctttggtcccgtcagcctggagcaggtcaaattcccaggtcctgagcatattaccaatgagaagcagaagctgttcactagcaagctgctggacgtcatggacagaggactgatcctggaggtcagcggtcatgccatttatgccatcaggctgtgccagtgcaaggtgtactggtctgggccatgtgccccatcacttgttgctcccaacctgattgagagacaaaagaaggtcaagctattttgtctggaacattccttagcgatctcattgcccaccagaaaggacagatagagaagcagccaccgtttgagatctacttatgctttggggaagaatggccagatgggaaaccattggaaaggaaactcatcttggttcaggtcattccagtagtggctcggatgatctacgagatgttttctggtgatttcacacgatcctttgatagtggcagtgtccgcctgcagatctcaaccccagacatcaaggataacatcgttgctcagctgaagcagctgtaccgcatccttcaaacccaggagagctggcagcccatgcagcccacccccagcatgcaactgccccctgccctgcctccccagtaattgtgaatgccatcttcttccttctcttttttataatattgtacatatggatttttttattgtttagatttaaccagcttttaaatctctcttttctctaacagtgttagaagtttgtgattctccaaatatgcctagatttaaagctgatttaatttatggaaaaatcacccttcagactttgcttttctttttcaaatctcctaatggtagtatgatatagcatagtagaaggagatttggcctgggagtttggacaccaaagttctagctgcagctttgcttccaatgtgaccttgaacaagtcctttaacctctgggcttcagatttattgcttataaagtgaagagattggagtagtgcctgaaattgcatccagctttagaacggactcaatgaccttcttctacttgtacaaggctaaactgcctggaacagaatccttctgcattgttcttgtaccacatttttccttggttttgttaaagtttcctcaagcactgatttgtccaggatcgagctctgtttgacctgttctgctagtatagtaagctggctccctgatgggggaagtgagagggagaggagctggctggctggttgcttagaaactatgcttgatatctaaatagaaatgggtgccaaagtctgaaagtcacccagcctgtggagtgaaagctcacaaatttggcttctaaagggaagctgttgacacagaaagcctagggattctgtggaagaataggttgtcaggcatttaccttattaccactcaaataccagtgtgtgtgtgttgggggggcggcagggagagggggtaggtgacagtatgtgactcaggggttagctttaagaggaaagagctctatttttcttgttttcttctctgagctagactgagctggggatctaagatgtacttctctgactacaaaagggacagtatcatttagattttttgcagttggaagaaatgggttgttgagtgtgttaaggctgggatgaagaagggctgggcagtactcttctggaaaggctcacctagcacgaacctgcttgtctcccttactagtggaggtatctgagtgtgaacagtgaaggtaaagagtggtatagaacaatgcagctgtatctgtcacaaactggtcttatctagaaacatctgctgagtctctaaccctttcagctttctcttcttttttgagacagagtcttgcttnnnnnnnnnnnnnnnnnnnnnnnnnnaagtcaccacttactgcagctttaagctcctgggctcaagcaatcgtcctgccccagcctcctgagtagttgggacaacagtcgtgcactatgatgcttggctaannnnnnnnnnnnnnnnnnnnnnnnnnnnnnnnnnnnnnnnnnnnnnnnnnnnnnnnnnnnnnnnnnnnnnnnnnnnntgggacctaaatggcaaataagatgctaatctgtggttgcaagccccagtcctcttgaatagtgatgccctatctgtctgtgtcgggacatagtaaagaagcccatgtctagtctggtacctttaaaccaggccatctcccacttttcaaaatgactcaaaagttgagctagccttattttaaaactaaa

SEQ ID NO: 185369 - DNA, 1415 bp, Homo Sapiens
ttggctgagctccatgtcccccctggaggaagaggcaccgcaggccaagaggaggccagagcccattatccctgtcactcagccccggctggcaggcgctggtgggcgcaagaaaattttccgtctcagcgacgtgctgaagccccttaccgatgcccaggtggaagccatgaagctgggcgctgtgaagcggatcctgcgggctgagaaggctgtggcctgcagcggggcagcccaggtccgcataaagatcctggccagcctggtgacacagttcaactcgggcctgaaggcggaggtcctgtccttcatcctggaggatgtgcgggcccgcctggacctggccttcgcctggctctaccaggagtacaacgcctacctggccgcaggtgcctcgggctccctggacaagtatgaggactgcctcatccgcctgttgtctggcctgcaggagaaaccagaccagaaggatgggatcttcaccaaggttgtgctggaggcgccactcatcacagagagtgccctggaggtggtccgcaagtactgcgaggatgagagtcgcacctatctgggcatgtccacacttcgagacctgatcttcaagcgcccgtcccgccagttccagtacctgcatgtcctcctcgacctcagctcccatgagaaggacaaggtgcgctcccaggccctgctgttcatcaaacgcatgtatgagaaggagcagctgcgggagtatgtggagaaatttgccctcaactacctgcagctcctggtgcaccccaacccaccgtctgtgctgtttggagctgacaaggacacagaggtggcagcaccctggacggaggagacagtgaagcagtgtctgtacctctacctggccctcctgcctcagaaccacaagctgatccacgaactggcggccgtgtacactgaagccatcgccgacatcaagcggacggtgctgagggtcattgagcagccgatccgaggaatgggcatgaactccccggagctgctcctgctggtggaaaattgtcccaagggagcagagacactggtcacgagatgtctgcacagcctcacagacaaagtcccaccctccccagagctggtgaagcgggtccgggatctctaccacaagcgactgccagacgtccgcttcctcatcccggtgctcaatgggctggagaagaaagaggtgatccaggccctgcctaaactcatcaaactcaaccccatcgtggtgaaggaagtcttcaaccgcctgctgggcacccagcatggtgagggaaactcagccttgtccccgctgaaccctggagagctcctgatcgcattacacacattgactccgtgaagtgcgacatgaaatccatcatcaaagccaccacctgtgctttgcggagcggaacgtgtac

SEQ ID NO: 185370 - DNA, 1191 bp, Homo Sapiens
tctccaagttccacacgtccaaaatttcgactgactggccagcagagtaggaatccgtcctcgttcgggatcgcttgttgcctttggtatttgtgtccatcagcctccagttcagcaaggggtcatagacaaaggcttccagcacggccatgacactgtctttgtgctctcgcagcacctccatcactgtgtggcatgtgattctgtagttgccatccaggcctgtaacctccatagcattggtcaacattcttgttagtctaaatggaatcttctctggaaacttctctcgggtcatagcaacctcaaagcagtccccaaagtcaatgtgcaggatcttcccactcagacggtccagcatcaggttggatgggtgtctatctcccaggcctaaaatatacccaaccattgacatgaccgctaaagaacgggtataattggttcttcggtcaaaccacacctcggagctggggcttttcagccacagcagcttggccaggtcgtccccagctgtattattgacggcatgctcaaacacctccaccttctgcatcagagtcaagtggtcatagtccggagccatccgcaacatgatgcgatgctcgatgttgagaaggatcttcttcttctccctgtagtcccggatgagggcgtgcagtgtgtcacagtggggaacccagccaatgaggcccgagttggtcgataaagggatgacagcgtatctctggatgctgaggtttttccgaagagatgttgggtcattggccagaagggtgttaaccaggccgaagagctgcatcacacgctcatcctggcgcagatcttcatggccttttagaaggaaaacaaactcatgtccgttgctgcccataagtgtcaatttccggggcctctgcttggatgtgatgacttgcaaagacggtgctatggactgaatgcgaatgattggctggttggggtcatatgttcctggcacagccaattcaaggtcccggcacatcagaagttttggggaaacatattgcagctctaaggatgtgagctgaggcagctgctttgagattcgtcggaacacatgataatagaggtcccaggcttgggtgaggtccttgacattccctgatttcatgtacttcctgcaccactcttgggcctccattaaatctcgaccataggcctgattaaagccaa

SEQ ID NO: 185371 - DNA, 892 bp, Homo Sapiens
ttgggtgggacgtctcattcaccagcttctcacagacattggtcggtaccacccccaggccctcatctacccactgacagtggcttctaagtctaccacgacagcccggcacaatgcagccaacaagattctgaagaacatgtgtgagcacagcaacaccctggtccagcaggccatgatggtgagcgaggagctgatccgagtggccatcctctggcatgagatgtggcatgaaggcctggaagaggcatctcgtttgtactttggggaaaggaacgtgaaaggcatgtttgaggtgctggagcccttgcatgctatgatggaacggggcccccagactctgaaggaaacatcctttaatcaggcctatggtcgagatttaatggaggcccaagagtggtgcaggaagtacatgaaatcagggaatgtcaaggacctcacccaagcctgggacctctattatcatgtgttccgacgaatctcaaagcagctgcctcagctcacatccttagagctgcaatatgtttccccaaaacttctgatgtgccgggaccttgaattggctgtgccaggaacatatgaccccaaccagccaatcattcgcattcagtccatagcaccgtctttgcaagtcatcacatccaagcagaggcctcggaaattgacacttatgggcagcaacggacatgagtacagaatcacatgccacacagtgatggaggtgctgcgagagcacaaggacagtgtcatggccgtgctggaagcctttgtctatgaccccttgctgaactggaggctgatggacacaaataccaaaggcaacaagcgatcccgaacgaggacggattcctactctgctggccagtcagtcgaaattttggacggtgtggaa

SEQ ID NO: 185372 - DNA, 1104 bp, Homo Sapiens
ttggcatgattatctaccgggccgcacccgccgagccgtcccttctccctgtgatcagttaccaactacctgttgatgtgtgtggttacagacttctttctatgctttgtacaactctacagaccgtatcttgatactgatggacattgtgtgggccagaggcagggatggttggctatgaccccaaaccagatggcaggaataacaccaagttccaggtggcagtggctgggtctgtgtctggacttgttactcgggcgctgatcagtcccttcgacgtcatcaagatccgtttccagcttcagcatgagcgcctgtctcgcagtgaccccagcgcaaagtaccatggcatcctccaggcctctaggcagattctgcaggaggagggtccgacagctttctggaaaggacacgtcccagctcagattctctccataggctatggagctgtccaattcttgtcatttgaaatgctgacggagctggtccacagaggcagcgtgtacgacgcccgggaattctcagtgcactttgtatgtggtggcctggctgcctgtatggccaccctcactgtgcaccccgtggatgttctgcgcacccgctttgcagctcagggtgagcccaaggtctataatacgctgcgccacgccgtggggaccatgtataggagcgaaggcccccaggttttctacaaaggcttggctcccaccttgatcgccatcttcccctacgccgggctgcagttctcttgctacagctccttgaagcacctgtacaagtgggccataccagccgaaggaaagaaaaatgagaacctccaaaacctgctttgtggcagtggagctggtgtcatcagcaagaccctgacatatccgctggacctcttcaagaagcggctacaggttggagggtttgagcatgccagagctgcctttggccaggtacggagatacaagggcctcatggactgtgccaagcaggtgctacaaaaggaaggcgctcctgggcttcttcaagggcctgtcccccagcttgctgaacgctgccctctccacaggcttcatgttcttctcgtatgaattcttctgtaatgtcttccactgc

SEQ ID NO: 185373 - DNA, 1097 bp, Homo Sapiens
  misc_feature (578)..(703): n is a, c, g, or t
ttgggtttcacttttagctctgggcacctccagctcctgctcgccggacggctcccagggagagcagacgcgccagacgcgccaccctcggggcgccgacggtcacggagcatggggtcggcctttgagcgggtagtccggagagtggtccaggagctggaccatggtggggagttcatccctgtgaccagcctgcagagctccactggcttccagccctactgcctggtggttaggaagccctcaagctcatggttctggaaaccccgttataagtgtgtcaacctgtctatcaaggacatcctggagccggatgccgcggaaccagacgtgcagcgtggcaggagcttccacttctacgatgccatggatgggcagatacagggcagcgtggagctggcagccccaggacaggcaaagatcgcaggcggggccgcggtgtctgacagctccagcacctcaatgaatgtgtactcgctgagtgtggaccctaacacctggcagactctgctccatgagaggtgggcccgaagagggcagggcagggcagggccccacccaccccaagcaaccctgcnnnnnnnnnnnnnnnnnnnnnnnnnnnnnnnnnnnnnnnnnnnnnnnnnnnnnnnnnnnnnnnnnnnnnnnnnnnnnnnnnnnnnnnnnnnnnnnnnnnnnnnnnnnnnnnnnnnnnnnnnnnnnngggtgagccactgtgccaggtcccagccttgctcttgggaaggtcacaaccttggggcatcaggaaagtcccagaggcaaaagagcgctgtggccggaaccagcttgcaggaaggaagctgcaggggtcatctggggcctccgctgccaggactggatcctaaggaccggactgagccccaggctgctgtgaggacaaggggtggtgtgaacacgggggcccaggtgagggggccgcacctcgagtctggacttggagtccccgagtccacctttcctcatggggtcccgtccccgtggggagcgcacggagaggctgccggtgccccggcacccacagacctctggagggtccctctgcaccacttccccggtggcggggggctgtcagggga

SEQ ID NO: 185374 - DNA, 1052 bp, Homo Sapiens
  misc_feature (291)..(416): n is a, c, g, or t
ttggatcaaggacatcctggagccggatgccgcggaaccagacgtgcagcgtggcaggagcttccacttctacgatgccatggatgggcagatacagggcagcgtggagctggcagccccaggacaggcaaagatcgcaggcggggccgcggtgtctgacagctccagcacctcaatgaatgtgtactcgctgagtgtggaccctaacacctggcagactctgctccatgagaggtgggcccgaagagggcagggcagggcagggccccacccaccccaagcaaccctgcnnnnnnnnnnnnnnnnnnnnnnnnnnnnnnnnnnnnnnnnnnnnnnnnnnnnnnnnnnnnnnnnnnnnnnnnnnnnnnnnnnnnnnnnnnnnnnnnnnnnnnnnnnnnnnnnnnnnnnnnnnnnnngggtgagccactgtgccaggtcccagccttgctcttgggaaggtcacaaccttggggcatcaggaaagtcccagaggcaaaagagcgctgtggccggaaccagcttgcaggaaggaagctgcaggggtcatctggggcctccgctgccaggactggatcctaaggaccggactgagccccaggctgctgtgaggacaaggggtggtgtgaacacgggggcccaggtgagggggccgcacctcgagtctggacttggagtccccgagtccacctttcctcatggggtcccgtccccgtggggagcgcacggagaggctgccggtgccccggcacccacagacctctggagggccctctgcaccacctcccccggtggcgtggggctgtcaggggagggaagacgccttcaggggctgcggcccagcgagctttgctgctcctcggacacaggcacctgcggcagccagaacacaaagtcctgcagcagctgcgcagccgcggggacaacgtgtacgtggtgactgacgtgctgcagacacagaagaggtggaagtcacgcgcacccacaagcgggagggctcgggccggtttttcctgccccggagccacgtgcttgcaggtgtgtaaccagccccc

SEQ ID NO: 185375 - DNA, 710 bp, Homo Sapiens
ggcctggcagcgggcacattcagaattatggtgttctcccagaccaaagaaggtgtctcggggacacacaaggcaggtggagttgccgcagggctccgtgcaaggggccttcaggtagtgctccgctgggcagcctctgcaacaaaacagaccaatcttcttgtggaagtcaccggcacagtcacacctggggctacgagtgccgccctgggcccgggcccccagcagcaccaggaggagcgccgccgccaccgccgcgcagccccgcggccgctgctccatagccctccgacgggcgcccaggggcttcccggctccgtgctctctgcccgtcgtggttccgccttcagccccgcgcccgcagggcccgccccgcgccgtcgagaagggcccgcctggcgggcggggggaggcggggccgcccgagcccaaccgagtccgaccaggtgccccctctgctcggcctagacctgagctcattaggcggcagcggacaggccaagtagaacacgcgaagcgctgggctgcctgctgcgaccaggggcacaggatagagctgcatctcggtccccaccccgactctcgccccaaccctgagaaccacttcaaggtagagccagggcaagtgacttctctctcggcctccgcgtccccagccatggaggaggttgggccaaaagtaccgcaaggggccaagcgcagtagctcag

SEQ ID NO: 185376 - DNA, 932 bp, Homo Sapiens
caaggttcgataaaagcgccatggacatttctcgacagactgggtttttgcgatccccaacgtacctaactaatgtagcatagaatttctcctgacgactaaatggaggagtggccaagatcaggtccacattattgtcctggatactgagtttacagagggtctccagcacaagtctctgaggcgacaggaccgagttgggtcccacagttggaaagggatcttgtgcctctgcagacgggcacaccatccagtgcagcaagccatccaaaattggcaagcagatgctttccgtgtaagcagacaagtctagctgcccggaaatgttggccaacgtgaccaacgtgttatccctcaagacctcgaggcagtcccaccaccactcatctttgctgcaggccacccccttgtcctcatcctcctctttctcataggtctgcggtgctcgctttctctctggatgctcgtggtgaagaagaatcagcttccccaggatcagcaccaggcctggatgtttggacatttcggcatcattgccaggcacgaatgacaagctacggacaatattggacacacagatgcatcgcttagccagcgagtcctgccagtgcgcgatggtacacagaggagtctcgtctcggctcctgggctcgtcctccagcagcttgatgttccggtgacttttggcttgctggataccaaagggaaacttactgctttcggtctggggcccagggtttgcgtcttcaggcaatgcccctggccgagcagagaggacgtcatcgatggttgctatgatgcttttctcttgctgctcttcagagtcgcctttgccttcttgctctttctttctacctgcggagcttaaggggggaggtgggcgcctgcgaggaggaatttccatcttgctctcaaagtgagtctgaatccaa

SEQ ID NO: 185377 - DNA, 1541 bp, Homo Sapiens
ctttgtacaaaaaagttggctgagtacaatgtcaccaacaacagcgttgctcttagaacaccacgaacaccagcttcccaggacagaattctgcaggaagcccagaacctcatggccctcaccaatgtggacaccccattgaaaggtggacttaataccccattgcatgagagtgacttctcaggtgtaactccacagcgacaagttgtacagactccaaacacagttctctctactccattcaggactccttctaatggagctgaagggctgactccccggagtggaacaactcccaaaccagttattaactctactccgggtagaactcctcttcgagacaagttaaacattaatcccgaggatggaatggcagactatagtgatccctcttacgtgaagcagatggaaagagaatcccgagaacatctccgtttagggttgttgggccttcctgcccctaagaatgattttgaaattgttctaccagaaaatgccgagaaggagctggaagaacgtgaaatagatgatacttacattgaagatgctgctgatgtggatgctcgaaagcaggccatacgagatgcagagcgtgtaaaggaaatgaaacgaatgcataaagctgtccagaaagatctgccaagaccatcagaagtaaatgaaactattctaagacccttaaatgtagaaccgcctttaacagatttacagaaaagtgaagaactaatcaaaaaagaaatgatcacaatgcttcattatgaccttctacatcacccttatgaaccatctggaaataaaaaaggcaaaactgtagggtttggtaccaataattcagagcacattacctatctggaacataatccttatgaaaagttctccaaagaagagctgaaaaaggcccaggatgttttggtgcaggagatggaagtggttaaacaaggaatgagccatggagagctctcaagtgaagcttataaccaggtgtgggaagaatgctacagtcaagttttatatcttcctgggcagagccgctacacacgggccaatctggctagtaaaaaggacagaattgaatcacttgaaaagaggctcgagataaacaggggtcacatgacgacagaagccaagagggctgcaaagatggaaaagaagatgaaaattttgcttgggggttaccagtctcgtgctatggggctcatgaaacagttgaatgacttatgggaccaaattgaacaggctcacttggagttacgcacttttgaagaactcaagaaacatgaagattctgctattctccggaggctagagtgtctaaaagaagacgttcagcgacaacaagaaagagaaaaggaacttcaacatagatatgctgatttgctgctggagaaagagactttaaagtcaaaattctgaagtacagtttatattctgtcacaggattaattaattgccgggttttcatactctagaaggctgaaactgatgtttatcttcattgacaaatttaacccaccatctgtggttttcagttgttatttaaa

SEQ ID NO: 185378 - DNA, 1257 bp, Homo Sapiens
ttggcgcttggaggaagtggcggctttgagtccggtggcccaatcgctgttactacttctctgaagctcctctcggctgcttgccgagacaccctgccgccaagatgcctcgaattatgatcaaggggggcgtatggaggaataccgaggatgaaattctgaaagcagcggtaatgaaatatgggaaaaatcagtggtctaggattgcctcattgctgcatagaaaatcagcaaagcagtgcaaagccagatggtatgaatggctggatccaagcattaagaagacagaatggtccagagaagaagaggaaaaactcttgcacttggccaagttgatgccaactcagtggaggaccattgctccaatcattggaagaacagcggcccagtgcttagaacactatgaatttcttctggataaagctgcccaaagagacaatgaagaggaaacaacagatgatccacgaaaacttaaacctggagaaatagatccaaatccagaaacaaaaccagcgcggcctgatccaattgatatggatgaggatgaacttgagatgctttctgaagccagagcccgcttggctaatactcagggaaagaaggccaagaggaaagcaagagagaaacaattggaagaagcaagacgtcttgctgccctccaaaaaagaagagaacttcgagcagctggcatagaaattcagaagaaaagaaaaaggaagagaggagttgattataatgccgaaatcccatttgaaaaaaagcctgcccttggtttttatgatacttctgaggaaaactaccaagctcttgacgcagatttcaggaaattaagacaacaggatcttgatggggagctaagatctgaaaaagaaggaagagatagaaaaaaagacaaacagcatttgaaaggaaaagaatctgatttaccatcagctattcttcaaactagtggtgtttctgaatttactaaaaagagaagcaaactagtacttcctgcccctcagatttcagatgcagaactccaggaagttgtaaaagtagaccaagcgagtgaaattgcacgtcaaactgccgaggaatctggcataacaaattctgcttccagtacacttttgtctgagtacaatgtcaccaacaacagcgttgctcttagaacaccacgaacaccagcttcccaggacagaattctgcaggaagcccagaacctcatggtctcaccaatgtggacaccccattgaaaggtggacttaatacccc

SEQ ID NO: 185379 - DNA, 2944 bp, Homo Sapiens
ttggctcttagctgaccaggcgagagcatcatggataccgacttatatgatgagtttgggaattatattggaccagagcttgattctgatgaagatgatgatgaattgggtagagagaccaaagatcttgatgagatggatgatgatgacgacgacgatgacgtaggagatcatgacgatgaccaccctgggatggaggtggtgctgcatgaggacaagaagtactacccaacagccgaggaggtgtatggtcctgaggtggagaccatagttcaagaggaagacactcagcctctcacagaacccattattaagccagtgaaaaccaagaaattcactctgatggagcagacattacctgttacggtgtatgagatggatttcttggcggatctgatggataactcagagctcatcagaaatgtgaccctttgtggacatctccaccatggcaagacatgttttgtggattgtttaattgaacagactcacccggaaatcagaaagcgctatgaccaagatctgtgctatactgacatcctcttcacagagcaagagagaggtgtaggcatcaaaagcactcctgtgacagtggtcttgccagacaccaaaggaaaatcttatctcttcaatatcatggacactccaggacatgtgaatttctctgatgaggtcacagctggcttgcgcatctcagatggagtggtccttttcattgatgctgctgagggggtgatgctgaacacagagcggctgatcaagcatgcggtgcaggagaggctggcagtcaccgtgtgcatcaacaagattgaccggctgatcctggagctgaagctgcctccaactgatgcttattacaagctgcgccacattgtggatgaggtcaatggattaataagcatgtattccactgatgagaacctgatcctttccccactcctgggtaacgtctgcttctccagctcccagtacagcatctgcttcacgctgggctcctttgccaagatctatgccgacacctttggtgacattaattaccaagaatttgctaaaagactctggggtgacatctacttcaaccctaagacgcgaaagttcaccaaaaaggccccaactagcagctcccagagaagtttcgtggagtttatcttggagcctctttataagatcctcgcccaggttgtaggtgacgtggacaccagcctcccacggaccctagacgagcttggcatccacctgacgaaggaggagctgaagctgaacatccgccccttgctcaggctggtctgcaaaaagttctttggcgagttcacaggctttgtggacatgtgtgtgcagcatatcccttctccaaaggtgggcgccaagcccaagattgagcacacctacaccggtggtgtggactccgacctcggcgaggctatgagtgactgtgaccctgatggccccctgatgtgccacactactaagatgtacagcacagatgatggagtccagtttcacgcctttggccgggtgctgagtggcaccattcatgctgggcagcctgtgaaggtactgggggagaactacaccctggaggatgaggaagactcccagatatgcaccgtgggccgcctttggatctctgtggccaggtaccacatcgaggtgaaccgtgttcctgctggcaactgggttctgattgaaggtgttgatcaaccaattgtgaagacagcaaccataaccgaaccccgaggcaatgaggaggctcagattttccgacccttgaagttcaataccacatctgttatcaagattgctgtggagccagtcaacccctcagagctgcccaagatgcttgatggcctgcgcaaggtcaacaagagctatccatccctcaccaccaaggtggaggagtctggcgagcatgtgatcctgggcactggggagctctacctggactgtgtgatgcatgatttgcggaagatgtactcagagatagacatcaaggtggctgacccagttgtcacgttttgtgagacggtggtggaaacatcctccctcaagtgctttgctgaaacgcctaataagaagaacaagatcaccatgattgctgagcctcttgagaagggcctggcagaggacatagagaatgaggtggtccagattacgtggaacaggaagaagctgggagagttcttccagaccaagtacgattgggatctgctggctgcccgttccatctgggcttttggccctgatgcgactggccccaacattctggtggatgatactctgccctctgaggtggacaaggctcttcttggttcagtgaaggacagcatcgttcaaggtttccagtggggaaccagggagggccccctctgtgatgaattgattcggaatgtcaagtttaagatcctggatgcggtggttgcccaggagcccctgcaccggggcgggggccagatcatccccacagccaggagagtcgtctactctgccttcctcatggctactcctcgtctgatggagccttactactttgtagaggtccaggcccctgcagattgcgtctctgcagtttataccgtcctggccaggcgcagggggcacgtgactcaggatgcacccatcccaggctcccctctgtacaccatcaaagcttttatcccggccatcgactcttttggctttgagactgatctccggactcacacccagggacaagccttttctctgtctgtcttccaccactggcagattgtgcctggtgatcccctggacaagagcattgtcatccgccccttggagccacagccagctcctcacctggcccgggaattcatgatcaaaaccccgcccgtatgaagggcctcagtgaagatgtgagcatcagcaaatttcttcgatgatcctatgttgctggaacttgcccaaacaggatggttgtggctcaatt

SEQ ID NO: 185380 - DNA, 2089 bp, Homo Sapiens
ctttgtacaaaaaagttggggatattcacagacaaagccaacagcggcctttctatggagtcaattcatgttcctgatcctgtcatttcaatagcaatgaagccttctaacaagaacgatctggaaaaattttcaaaaggtattggcaggtttacaagagaagatcccacatttaaagtatactttgacactgagaacaaagagacagttatatctggaatgggagaattacacctggaaatctatgctcagaggctggaaagagagtatggctgtccttgtatcacaggaaagccaaaagttgcctttcgagagaccattactgcccctgtcccgtttgactttacacataaaaaacaatcaggtggtgcaggccagtatggaaaagtaataggtgtcctggagcctctggacccagaggactacactaaattggaattttcagatgaaacattcggatcaaatattccaaagcagtttgtgcctgctgtagaaaaggggtttttagatgcctgcgagaagggccctctttctggtcacaagctctctgggctccggtttgtcctgcaagatggagcacaccacatggttgattctaatgaaatctctttcatccgagcaggagaaggtgctcttaaacaagccttggcaaatgcaacattatgtattcttgaacctattatggctgtggaagttgtagctccaaatgaatttcagggacaagtaattgcaggaattaaccgacgccatggggtaatcactgggcaagatggagttgaggactattttacactgtatgcagatgtccctctaaatgatatgtttggttattccactgaacttaggtcatgcacagagggaaagggagaatacacaatggagtatagcaggtatcagccatgtttaccatccacacaagaagacgtcattaataagtatttggaagctacaggtcaacttcctgttaaaaaaggaaaagccaagaactaactttgtttactgtgagttgactgactctaattgaatctgcgtggttttgatactttgatggattccagtggaataaattcaggctgctgaaacaagaaattctgagcccaggaagcgggctcttctttcttcaaaagaagcccttcttgttcatattcaggagcttctgttatattcaaaggtaattctatgtctatctcaactctattgattggttttatagtttattgaaaatcctcaaataaaatataattattactgaaatatgtttaatatttaaggggaaaagagactaatttcagttatacttttaagcttagaatgtatgttcatttccaaattttgtatcataagagttttcaacatagagaaaagctgaaaaaatgcaaagaataaccacatactttccatctaccttcctttgttaacgggttgtttatcatataataatttttgtcatatttgctttcactgtctattatctgtttaagtctcataactctatttttagtttgctgaagacttgaaagtgaatcgcatatatcatgacacttcttggagtgtcattaatgggcaggcttttctgttgaagagtggattccgtatgttcttcatagagagtgtttttcagattcttcattgggatattaaaatattagccaaatttctctctgttttatatatgtcagtttatttcagtttgtggtttctgcaaatttgtaactgcctctgttttaggagtataagtattacttccttgtggtctattgtgaagtaaaaagtagacccttgcatatactattcttgtttgtgttcatcttaatgtttttgtacagctaaatcaaatgtaatttatagagttagtttcatcaacctaatgaatgctagttaaatttgaattccttggaatttatcgtatattgtattcactgagattatgaagggacaaatgttaatcttttgtttccagaaaaagttgggctttcccaagcagttctattacccggttcagaattgcttcatccaaaaatcatctgatggtatagatggatcctagtccttttcattacctgatggtagaaataaaataattgatttt

SEQ ID NO: 185381 - DNA, 984 bp, Homo Sapiens
actttgtacaaaaaagttggcgaatgggctccaacccagccagggccctgcagcaaatgaggtctaaactaaatcataatgcagcgtttatgcagatacccatgggtttggagggtaattttaaaggtattgtagatcttattgaggaacgagccatctattttgatggagactttggtcagattgttcgatatggtgagattccagctgaattaagggcggcggccactgaccaccggcaggagctaattgaatgtgttgccaattcagatgaacagcttggtgagatgtttctggaagaaaaaatcccctcgatttctgatttaaagctagcaattcgaagagctactctgaaaagatcatttactcctgtatttttgggaagcgccttgaagaacaaaggagttcagcctcttttagatgctgttttagaatacctcccaaatccatctgaagtccagaactatgctattctcaataaagaggatgactcaaaagagaaaaccaaaatcctaatgaactccagtagagacaattcccacccatttgtaggcctggcttttaaactggaggtaggtcgatttggacaattaacttatgttcgcagttatcagggagagctaaagaagggtgacaccatctataacacaaggacaagaaagaaagtacggttgcaacggctggctcgcatgcatgccgacatgatggaggatgttgaggaagtatatgccggagacatctgtgcattgtttggcattgactgtgctagtggagacacattcacagacaaagccaacagcggcctttctatggagtcaattcatgttcctgatcctgtcatttcaatagcaatgaagccttctaacaagaacgatctggaaaaattttcaaaaggtattggcaggtttacaagagaagatcccacatttaaagtatactttgacactgagaaccaaagagacagttatatcttggaatgggaga

SEQ ID NO: 185382 - DNA, 1396 bp, Homo Sapiens
ttggcttagagcccagtgggacaaagcctggggctgggcgggggccatggcgctgccatcccgaatcctgctttggaaacttgtgcttctgcagagctctgctgttctcctgcactcagcggtggaggagacggacgcggggctgtacacctgcaacctgcaccatcactactgccacctctacgagagcctggccgtccgcctggaggtcaccgacggccccccggccacccccgcctactgggacggcgagaaggaggtgctggcggtggcgcgcggcgcacccgcgcttctgacctgcgtgaaccgcgggcacgtgtggaccgaccggcacgtggaggaggctcaacaggtggtgcactgggaccggcagccgcccggggtcccgcacgaccgcgcggaccgcctgctggacctctacgcgtcgggcgagcgccgcgcctacgggcccctttttctgcgcgaccgcgtggctgtgggcgcggatgcctttgagcgcggtgacttctcactgcgtatcgagccgctggaggtcgccgacgagggcacctactcctgccacctgcaccaccattactgtggcctgcacgaacgccgcgtcttccacctgacggtcgccgaaccccacgcggagccgcccccccggggctctccgggcaacggctccagccacagcggcgccccaggcccagaccccacactggcgcgcggccacaacgtcatcaatgtcatcgtccccgagagccgagcccacttcttccagcagctgggctacgtgctggccacgctgctgctcttcatcctgctactggtcactgtcctcctggccgcccgcaggcgccgcggaggctacgaatactcggaccagaagtcgggaaagtcaaaggggaaggatgttaacttggcggagttcgctgtggctgcaggggaccagatgctttacaggagtgaggacatccagctagattacaaaaacaacatcctgaaggagagggcggagctggcccacagccccctgcctgccaagtacatcgacctagacaaagggttccggaaggagaactgcaaatagggaggccctgggctcctggctgggccagcagctgcacctctcctgtctgtgctcctcggggcatctcctgatgctccggggctcaccccccttccagcggctggtcccgctttcctggaatttggcctgggcgtatgcagaggccgcctccacacccctcccccaggggcttggtggcagcatagcccccacccctgcggcctttgctcacgggtggccctgcccacccctggcccaaccaaaatcccactgatgcccatcatgccctcagacccttctgggctctgcccgctgggggcctgaagacattcctggaggacactc

SEQ ID NO: 185383 - DNA, 948 bp, Homo Sapiens
tacaaaaaagttggcttagagccgagtgggacaaagcctggggctgggcgggggccatggcgctgccatcccgaatcctgctttggaaacttgtgcttctgcagagctctgctgttctcctgcactcagggtcctcggtacccgccgctgctggcagctccgtggtgtccgagtccgcggtgagctgggaggcgggcgcccgggcggtgctgcgctgccagagcccgcgcatggtgtggacccaggaccggctgcacgaccgccagcgcgtgctccactgggacctgcgcggccccgggggtggccccgcgcggcgcctgctggacttgtactcggcgggcgagcagcgcgtgtacgaggcgcgggaccgcggccgcctggagctctcggcctcggccttcgacgacggcaacttctcgctgctcatccgcgcggtggaggagacggacgcggggctgtacacctgcaacctgcaccatcactactgccacctctacgagagcctggccgtccgcctggaggtcaccgacggccccccggccacccccgcctactgggacggcgagaaggaggtgctggcggtggcgcgcggcgcacccgcgcttctgacctgcgtgaaccgcgggcacgtgtggaccgaccggcacgtggaggaggctcaacaggtggtgcactgggaccggcagccgcccggggtcccgcacgaccgcgcggaccgcctgctggacctctacgcgtcgggcgagcgccgcgcctacgggcccctttttctgcgcgaccgcgtggctgtgggcgcggatgcctttgagcgcggtgacttctcactgcgtatcgagccgctggaggtcgccgacgagggcacctactcctgccacctgcaccaccattactgtgggcctgcacgaacgccgcggtcttccacctgacggtcgccgaaccccacgcgga

SEQ ID NO: 185384 - DNA, 1496 bp, Homo Sapiens
ttggctgatttgaattatgctactcgagaagatgctccgattggtcctcatttgcaaagcatgccttcagagcagataagaaaccagctgacagccatgtcctcagtacttgcaaaagcacttgaagtcattaaaccagctcatatactgcaagagaaagaagaacagcatcagttggctgtcactgcataccttaaaaattcacgaaaagagcaccagcggatcctggctcgccgccagacaattgaggagagaaaagagcgccttgagagtctgaatattcagcgtgagaaagaagaattggaacagagggaagctgaactccagaaagtgcggaaggctgaggaagagaggctgcgccaggaagcaaaggagagagagaaggagcgtatcttacaggaacatgaacaaatcaaaaagaaaactgtccgagagcgtttggagcagatcaagaaaacagaactgggtgccaaagcattcaaagatattgatattgaagaccttgaggaattggatccagattttatcatggctaaacaggttgaacaactggagaaagaaaagaaagaacttcaagaacgcctaaagaatcaagaaaagaagattgactattttgaaagagccaaacgtttggaagaaattcctttgataaagagcgcttacgaggaacagagaattaaagacatggatctgtgggagcaacaagaggaagaaagaattactacaatgcagctagaacgtgaaaaggctcttgaacataagaatcgaatgtcacgaatgcttgaagacagagatttattcgtaatgcgactcaaagctgcacggcagtctgtttatgaggaaaaacttaaacagtttgaagagcgattagcagaagaaaggcataatcgattggaagaacggaaaaggcagcgtaaagaagaacgcaggataacatactatagagaaaaagaagaggaggagcagagaagggcagaagaacaaatgctaaaagagcgggaagagagagagcgcgccgaacgagcaaaacgcgaggaagagctacgagagtatcaggagcgggtgaagaaattagaagaagtggaaaggaaaaaacgccaaagggagttggaaattgaagaacgagaacggcgtagagaggaagagagaagacttggcgatagttccctttctagaaaggactctcgttggggagatagagattcagaaggcacctggagaaaaggacctgaagcagattctgagtggagaagaggcccgccagagaaggagtggagacgtggagaagggcgagatgaggacaggtctcatagaagagatgaagagcggccccggcgtctgggggatgatgaagatagagagccctctcttagaccagacgatgatcgggttccccggcgtggcatggatgatgacagagccctagacgtggtcctgaggaagataggttctctcgtcgtggggcagacgatgaccgggccttcctggcgtaacac

SEQ ID NO: 185385 - DNA, 1651 bp, Homo Sapiens
ttggctacctgtttaataccagaaaagtggaactagcactagggggaagatatggctgggaggcacacttagtaacctaatcaatggtctagagcgggaagagagagagcgcgccgaacgagcaaaacgcgaggaagagctacgagagtatcaggagcgggtgaagaaattagaagaagtggaaaggaaaaaacgccaaagggagttggaaattgaagaacgagaacggcgtagagaggaagagagaagacttggcgatagttccctttctagaaaggactctcgttggggagatagagattcagaaggcacctggagaaaaggacctgaagcagattctgagtggagaagaggcccgccagagaaggagtggagacgtggagaagggcgagatgaggacaggtctcatagaagagatgaagagcggccccggcgtctgggggatgatgaagatagagagccctctcttagaccagacgatgatcgggttccccggcgtggcatggatgatgacagaggccctagacgtggtcctgaggaagataggttctctcgtcgtggggcagacgatgaccggccttcctggcgtaacacagatgatgacaggcctcccagacgaattgccgatgaagacaggggaaactggcgtcatgcggatgatgacagaccacctagacgaggactggatgaggacagaggaagctggcgaacagctgatgaggacagaggaccaagacgtgggatggatgatgaccgggggccgaggcgaggaggcgctgatgatgagcgatcatcctggcgtaatgctgatgatgaccggggtcccaggcgagggttggatgatgatcggggtcccaggcgaggcatggatgatgaccggggtcccaggcgaggcatggatgatgaccggggtcccaggcgaggcatggatgatgaccggggtcccaggcgagggttggatgatgatcgaggaccttggaggaacgccgatgatgacagaattcccaggcgtggtgcagaggatgacaggggcccttggagaaacatggatgatgatcgcctttcaagacgtgctgatgatgatcggtttcccagacggggtgatgactcaagacctggtccttggagaccattagtcaagccaggtggatggagagagaaagaaaaagccagagaggagagctggggtccacctcgagaatcaaggccatcagaagaacgtgaatgggacagagaaaaagaaagggacagagataatcaagatcgggaggagaatgacaaggaccctgagagagaaagggacagagagagagatgtggatcgagaggatcgcttcagaagacctagggatgaaggtggctggagaagaggaccagctgaggaatcttcaagctggagagactcaagtcgccgggacgatagggatagggatgaccgtcgccgtgagagggatgaccggcgtgatctaagagaaagacgagatctaagagacgacagggaccgaagaggacctccactcagatcaaaacgtgaagaagtaagttcttggagacgtgctgatgacaggaaagatgaccgggtggaagagcgggaccctcctcgtcgagttcctcccccctctctttccagagaccgaaaaaacacctatacc

SEQ ID NO: 185386 - DNA, 2188 bp, Homo Sapiens
ttggcgctttgctttcaccaaacccaaggaggtgacaggaggagcccccgcacaggacctaagaatgctgtgaccagaagatgggatcgcggaacagcagcagtgcaggatccgggtccggagacccctccgagggcttgccccgaagaggggctggcctgcgtcggagtgaggaagaggaagaagaggatgaagatgtggatctggcccaggtactggcctatctcctccgcaggccctcttggactcagaggaagagaatgacagagcttgggatggtcgtcttggggatcgatacaacccacctgtggatgctacccctgacacccgggagctggaattcaatgagatcaagacacaagtggaactggccacagggcagctggggcttaggcgggccgcccagaagcacagctttcctcgaatgttgcaccagagagaacggggcctctgccatcggggaagcttctcccttggagaacagtctcgagtgatatctcacttcttgcccaatgatctgggcttcactgatagctactctcagaaggctttctgtggcatctacagcaaagatggtcaaatattcatgtctgcttgccaagaccagacaatccgactctatgactgccgatatggccgtttccgtaaattcaagagcatcaaggcccgcgacgtaggctggagcgtcttggatgtggccttcacccctgatgggaaccacttcctctactctagctggtctgattacattcatatctgcaatatctatggtgagggagatacacacactgccctggatctcaggccagatgagcgtcgctttgctgtcttctccattgctgtctcctcagatggacgagaagtactaggaggggccaatgatggctgcctgtatgtctttgaccgagaacagaaccggcgcacccttcagattgagtcccatgaggatgatgtgaatgcagtggcctttgctgatataagctcccaaatcctgttctctgggggagatgatgccatctgcaaagtgtgggatcgacgcaccatgcgggaggatgaccccaagcctgtgggtgcactggctggacaccaggatggcatcaccttcattgacagcaagggtgatgcccggtatctgatctccaactctaaagaccagaccatcaaactctgggatatccgacgcttttccagccgggaaggcatggaagcttcacgccaggctgccacacagcaaaactgggactatcggtggcagcaagtgcccaaaaaagcctggcggaagctgaagctcccaggggacagctccttgatgacctaccggggccacggagtgctgcacaccctcatccgctgccggttctcccccattcatagcactggccagcagttcatctacagtggctgctccactggcaaagtggttgtgtacgaccttctaagtggccacattgtgaagaagctgaccaaccacaaggcctgtgtgcgtgacgtcagttggcacccctttgaagagaagattgtcagcagttcgtgggacgggaacctgcgtctgtggcagtaccgccaggctgagtacttccaggatgacatgccagaatctgaggaatgtgccagcgcccctgccccagtgccccaatcctctacacccttttcctcaccccagtagatccaacctccagccccatatagggtgaacctcttgataagctctctgcctcctcctccctttctcccttgtggggaatgtttggaggaatcactggcatttgatggggaataacataagcctgggctctgagcctcagctgagccctggaagattctccccatggggcagagtggtctccttacgtgctcacacccagtcagcttgggtccctatctctggccagagtttggcaggactgccattatctggggtgtggcctctgccagcaagagaagtgtcctgggtgtttttaatcatgtttgaatgttaggggttggatcctagagtagatgcctgaggccacatctgaacagacctgtcagccaggcctgccaggtcttcacgttgaggattcaactggccaatcacaggacaggtgtcctggcctttcttcctgaggtctctaggggaggggcatgggtaagggtgttttctcagcaccctcctggggtggggattatgtctgctgtcatgtctggg

SEQ ID NO: 185387 - DNA, 1283 bp, Homo Sapiens
ttggcttttccttttgctttttgaatagagactccatggagttggtcatggaatgggctgggctcctgggctgaacatggaccacgcagttgcgacaggaggccaggggaaaaacccctgctcacttgtttgccctcaggcagccaaagcactttaacccctgcatagggagcagagggcggtacggcttctggattgtttcactgtgattcctaggttttttcgatgccacgcagtgtgtgcttttgtgtatggaagcaagtgtgggatgggtctttgcctttctgggtagggagctgtctaatccaagtcccaggcttttggcagcttctctgcaacccaccgtgggtcctggttgggagtggggagggtcaggttggggaaagatggggtagagtgtagatggcttggttccagaggtgagggggccagggctgctgccatcctggcctggtggaggttggggagctgtaggagagctagtgagtcgagacttagaagaatggggccacatagcagcagaggactggtgtaagggagggaggggtagggacagaagctagacccaatctcctttgggatgtgggcagggagggaagcaggcttggggttaatttacccacagaatgtgatagtaataggggagggaggctgctgtgggtttaactcctgggttggctgttgggtagacaggtggggaaaaggcccgtgagtcattgtaagcacaggtccaacttggccctgactcctgcgggggtatggggaagctgtgacagaaacgatgggtgctgtggtcctctgcaggccctcaccccttaacttcctcatacagactggcactgggcagggcctctcatgtggcagccacatgtggcgttgtgaggccaccccatgtggggtctgtggtgagagtcctgtaggatccctgctcaagcagcacagaggaaggggcaagacgtggcctgtaggcactgtctcagcctgcagagaagaaagtgaggccgggagcctgagcctgggctggagccttctcccctccccagttggactaggggcagtgttaattttgaaaaggtgtgggtccctgtgtcctcttccaggggtccaagggaacaggagaggtcactgggcctgttttctccctcctgaccctgcatctcccaccccgtgtatcatagggaactttcaccttaaaatctttctaagcaaagtgtgaataggatttttactccctttgtacagtattctgagaaacgcaaataaaagggcaacatgtttctgtt

SEQ ID NO: 185388 - DNA, 1346 bp, Homo Sapiens
ctttgtacaaaaaagttgggataattcttccagaaaaagatatagcaacgaagatgcgtcttcgggctttatcaaggtatggacttgatacagagcaggtgtggaggaaccacattttagctggaaatgaagatccacagctcaagtcactctggtatactctgcactttatgaagcaatacacagaagatatggatcagaaatctccaggcaacaaaggatcattggtttatgcaggaattaaatcaattgtaaagtcatcgttgggaatggtggaaagcagcagacataattggagtgggttggataagcaaagtgatattcaaaatttaaatgaagagagaatcttagctttacagctttgtgggtggataaagaaaggaacggatgtagacgtggggccatttttgaactcccttgtacaagaaggggaatgggaaagagctgctgctgtggcattgttcaacttggatattcgccgagcaatccaaatcctgaatgaaggggcatcttctgaaaaaggagatctgaatctcaatgtggtagcaatggctttatcgggttatacggatgagaagaactccctttggagagaaatgtgtagcacactgcgattacagctaaataacccgtatttgtgtgtcatgtttgcatttctgacaagtgaaacaggatcttacgatggagttttgtatgaaaacaaagttgcagtacgtgacagagtggcatttgcttgtaaattccttagtgatactcagttaaatagatacatcgaaaagttgaccaatgaaatgaaagaggctggaaatttggaaggaattttgcttacaggccttactaaagatggagtggacttaatggagagttatgttgatagaactggagatgttcaaacagcaagttactgtatgttacagggttcacctttagatgttcttaaagatgaaagggttcagtactggattgagaattatagaaatttattagatgcctggaggttttggcataaacgagctgaatttgatattcacaggagtaagttggatcccagttccaagcctttagcacaagtttttgtgagttgcaatttctgtggcaagtcaatctcctacagctgttcagctgtgcctcatcagggcagaggttttagtcagtatggtgtgagtggctcaccaacgaaatctaaagtcacaagttgtcctggctgtcgaaaaccacttcctcgatgtgcgctttgtctcattaatatgggaacaccagtttctagctgtcctgcaggaaccaaatcagatgaaaaagtggacttgagcaaggacaaaaattagcccaatttaacaactggttta

SEQ ID NO: 185389 - DNA, 780 bp, Homo Sapiens
ttggctcccagcactcggactacggccagcgattccagcagcgcatgcagactcacgtgtaggggccagagcctggctggggcatctctgcggggcagaggagaaggctttcacagctgttccctgatattcaggggcattgctcattgctcccttctcggaccagccttcttcctcccaccatggcaggtggggagcaggtctcccagaaacaccccgtcccgaggatggtgctctgtgcatgccccagcctcctgggcctgcccttccctcttcttcgggaggatgtgtctcttctgacctgcactcttgcctgaccctagaatggggacagggaaagtgaaggttagggaaagcagaggggggcactttttagcattccctttctatcccacccctctgatctcccataagtggaaatgggggtacccagggatgggcaggctttggcctagggacatgaagtatgggagtgggtggctgtggcacagacaggtggaaaacgggatagcctggccagtccctctgttgtctgcattcgtgccctgggtgcctctctccttcctcagggtactgcagaagggagcgaacagggtactgttcgctcttgtctacagaacagcactggcactgcattcaaatcaagtcttcattcaactgggatcaaaatgccagtcaccttggctacctactgtggacagctgtctgtcagcatgcagagggatccaggaatccccccggcagcacggcccgctttccttctcctccatgctgggccca

SEQ ID NO: 185390 - DNA, 678 bp, Homo Sapiens
  misc_feature (535)..(543): n is a, c, g, or t
ctttgtacaaaaaagttggcaaaaagaaactaggggtttttttaagtgtaaatttattactagccaacagagttttactattttgattgtctggttggtttaacaaagagcctagctgaccttccttctgtaaagtcctccttgtaggctttttttaaagtactgtacatatttgcaatcacattgtgcatagattcttaatggtagatatgatttcttttgtcaggctacaacaatgaactgcagattccttgtttgtaatgtaaatgattgaatacattttgttaatatgtttttattcctatgttttgctattaaaaattttataacatttccaagacaaaaattccaagtttatgctttgaagaatttatgtaattaaaatttcactaaactaatctttttagtttaggaattatttgggttttgacactggaagttgcgccaaataagcatcagaaataggagatgcttaacattgctatactacttgtgttggttaggggtttggatttgggggttctttggttttaannnnnnnnnccacatttaaaagccttaaatgtactgtaagcctcagatcattgtacaactggactgcggttgattgccagattgtgtactgttgcttggatgcggcacagtggttggtaatggaataaaggatgcatggatcag

SEQ ID NO: 185391 - DNA, 2346 bp, Homo Sapiens
  misc_feature (862)..(876): n is a, c, g, or t
  misc_feature (2157)..(2173): n is a, c, g, or t
ttgggatttcagctgcaatggcaggcatttactgtacatttctcccgagaaaagagtgagatcgtgtcatctcatgctccccatccgcaggtcacttcctgtagaaatatggactaacttaaacctcgttttactgcaatcacagcaaccaaccccatttggcttataaagactcggttacagcttgatgcaaggaaccgcggggaaaggcgaatgggtgcttttgaatgtgttcgtaaagtgtatcagacagatggactaaaaggattttataggggcatgtctgcttcatatgctggtatatcagagactgttatccattttgttatttatgaaagtataaaacaaaaactactggaatataagactgcttctacaatggaaaatgatgaagagtctgtgaaagaagcatcagattttgtgggaatgatgctagctgctgccacctcaaaaacttgtgccacaactatagcatatccacatgaagttgtaagaacaagactacgtgaagagggaacaaaatacagatctttttttcagactctatctttgcttgttcaagaagaaggttatgggtctctttatcgtggtctgacaactcatctagtgagacagattccaaacacagccattatgatggccacctatgaattggtggtttacctactcaatggatagcagcacgaggactgctgtactgcaaaaaaagaagaccaaaagattacagtggaccatgggatacagaagccagcatggcagacagaagaaaaatagtttgggaacatgtaactattctaagtggaagttttgttgtaggaattatagtaatcacaccacattacttggcctttcggtaatgtgnnnnnnnnnnnnnnncctcaaagcctccaaggaaatgcctttagaaacactcctctctcaaaattgccattttctctaccatgtcccccagacacagttgggttttgttgatttatggcagtcttctaaacaaagccatccttaattttacatactgtattgtaactatccaaagatagtattggcagtcataaatttataacttctggcctttgtttaattccagtaaaataacagcaatgacaatgagatcgtcagtattattttcacatttccctgagaggacctggcacaatattttaaatttaattatttggcagtagtcactgtttttgacaaccaatgaaatagcgtctaaatatcttgtatattttttagcatcaaaatgttttggtttccactgctgacaggtgcttgttgtttagcctaatgtggatatttaaattgttaacataccaaacacacatggtaatagtttgggacaaaataactagtaaaatgttgatttctcggctatttcactgactgcggcatgtcctcgtgtcttctctgattttgtggtacatgaatgaatgcatttatctttttagtgacttactagttacgaacttgaattatcacctctttgtcatacttaagtatcatttacataaagtgtaaaagattttttcacttttgaatctttacctacttgctttcacattaagaatttgaacttttgagttttttccaggtctatatataatagattacatttattttgtaaagaaaatagtaatttaaagttttgccattttaaggtgacaatatttgggacagtataaatattatagacaagggcccccttgctgtctgctttagcaggtagtgacattaattgacttatagttttgtgtaaatgaacaaactgcttttgacaagaaatttattctgtcctagtttcctgcgtggtaaatcatagaaagattcaagttcatttgggttaaatgtgctaataggatgtagcttttaaattctgctattgagtcagctgtaccttttaatactttaaatgtgttatttgtatggcccttataaaggtgtttgctgtaattctgttaaaagacttcgcctatgccatactggtgtataaaaactgccgcaattggacgccggtgtggtactcatttcagtatacctgaactgtacattttgtgcaatggctttatctaaaagaatgacgcttcgtgaaagcactttgtggccttttttgggggggagggtgagagagtaggagagaataccatgttaagattnnnnnnnnnnnnnnnnncattggtcatgtattaggcagaaacagtgttcataacatttttctgggttttaaatatgttgtttcggatatccttaatataaatgttttaggtattctgtgtaccctgtcgtacccccaacattatagaatattgcagtgtgtcattgcaagctttctctgctgtcaccagt

SEQ ID NO: 185392 - DNA, 930 bp, Homo Sapiens
ttggaaacgtgtttgcggaaaggggtttgggttccatcttttcatttccccagcgcagctttctgtagaaatggaatccgaggatttaagtggcagagaattgacaattgattccataatgaacaaagtgagagacattaaaaataagtttaaaaatgaagaccttactgatgaactaagcttgaataaaatttctgctgatactacagataactcgggaactgttaaccaaattatgatgatggcaaacaacccagaggactggttgagtttgttgctcaaactagagaaaaacagtgttccgctaagtgatgctcttttaaataaattgattggtcgttacagtcaagcaattgaagcgcttcccccagataaatatggccaaaatgagagttttgctagaattcaagtgagatttgctgaattaaaagctattcaagagccagatgatgcacgtgactactttcaaatggccagagcaaactgcaagaaatttgcttttgttcatatatcttttgcacaatttgaactgtcacaaggtaatgtcaaaaaaagtaaacaacttcttcaaaaagctgtagaacgtggagcagtaccactagaaatgctggaaattgccctgcggaatttaaacctccaaaaaaagcagctgctttcagaggaggaaaagaagaatttatcagcatctacggtattaactgcccaagaatcattttccggttcacttgggcatttacagaataggaacaacagttgtgattccagaggacagactactaaagccaggtttttatatggagagaacatgccaccacaagatgcaaaataggttaccggaattcattgagacaaactaacaaactaaacagtcatgcccatttggaagagtcccagttaaccttctaaatagcccagattgtgatgtgaaga

SEQ ID NO: 185393 - DNA, 2111 bp, Homo Sapiens
ttggcgtcccttggcctgaggagcttggagctcctaggctgggggcgtcccagatgttgtggaactgtccctggatctatagctcttcaccgtctctactttcttccttctaagagatcctgaaacctctgtcatggaaaagtaccacgtgttggagatgattggagaaggctcttttgggagggtgtacaagggtcgaagaaaatacagtgctcaggtcgtggccctgaagttcatcccaaaattggggcgctcagagaaggagctgaggaatttgcaacgagagattgaaataatgcggggtctgcggcatcccaacattgtgcatatgcttgacagctttgaaactgataaagaggtggtggtggtgacagactatgctgagggagagctctttcagatcctagaagatgacggaaaacttcctgaagaccaggttcaggccattgctgcccagttggtgtcagccctgtactatctgcattcccaccgcatcctacaccgagatatgaagcctcagaacatcctcctcgccaagggtggtggcatcaagctctgtgactttggatttgcccgggctatgagcaccaatacaatggtgctgacatccatcaaaggcacaccactctatatgtctccagagctggtggaggagcgaccatacgaccacacagcggacctctggtctgttggctgcatactatatgaactggcagtaggcacccctcccttctatgctacaagcatctttcagctggtcagcctcattctcaaggaccctgtgcgctggccctcaaccatcagtccctgctttaagaacttcctgcagggactgctcaccaaagacccacggcagcgactgtcctggccagacctcttatatcacccctttattgctggtcatgtcaccataataactgagccagcaggcccagatttggggaccccattcaccagccgcctacccccagaacttcaggtcctaaaggacgaacaggcccatcggttggcccccaagggtaatcagtctcgcatcttgactcaggcctataaacgcatggctgaggaggccatgcagaagaaacatcagaacacaggacctgcccttgagcaagaggacaagaccagcaaggtggctcctggcacagcccctctgcccagactcggggccactcctcaggaatcaagcctcctggccgggatcttagcctcagaattgaagagcagctgggctaaatcagggactggagaggtgccctctgcacctcgggaaaaccggaccaccccagattgtgaacgagcattcccagaggagaggccagaggtgctgggccagcggagcactgatgtagtggacctggaaaatgaggagccagacagtgacaatgagtggcagcacctgctagagaccactgagcctgtgcctattcaactgaaggctcctctcaccttgctgtgtaatcctgacttctgccagcgcatccagagtcagctgcagtgattctgttgccttgtattccttctgccgggaggcagggcttcctgggctgctgctgagtctactcaggcacagtcaggagagcaacagcctccagcagcaatcttggtatgggaccttcttacaggacctgatggctgtgattcaggcctactttgcctgtaccttcaatctggagaggagccagacaagtgacagcctgcaggtgtttcaggaggctgccaacctttttctggacctgttggggaaactgctggcccaaccagatgactctgagcagactttgcagagggacagccttatgtgctttactgtcctgtgcgaagccatggatgggaacagccgggccatctccaaagccttttactccagcttgctgacgacacagcaagttgtcttggatgggctccttcatggcttgacagttccacagctccctgtccacactccccaaagtaaccagagtggagaaggaggttctcttgacttacttgttgcataggtcggctccgctctttctattgccatcacctagatcgcacctggcatttagtaatgctcaataaataactgtgaactgagagaatgaatggggatctgagggaaacaaaca

SEQ ID NO: 185394 - DNA, 1061 bp, Homo Sapiens
ttggccacatctttccgatgcccacattgtaccaaaaggctaaaaaacaatattcgattcatgaaccatatgaaacaccacgtagaactcgatcagcagaacggtgaggtagatggtcacactatctgccagcactgttaccgccagttttccactcccttccagcttcagtgccacttggaaaatgttcatagtccctatgaatctactaccaagtgcaagatctgtgaatgggcgtttgaaagtgagccactatttctccagcatatgaaggatactcataagcctggagagatgccttatgtttgccaggtgtgtcaatatcgctcctcactctactctgaggtagatgtccattttcggatgatccatgaggatacccggcatctgctctgcccttattgcctgaaggtcttcaaaaatggcaatgcattccaacagcattacatgaggcaccagaagagaaatgtttatcactgcaacaaatgccggctgcagtttctctttgccaaggacaaaattgaacacaagcttcaacaccataaaaccttccgtaaacccaagcagctggagggcttgaaaccaggcaccaaggtgacaatccgggcttcccgagggcagccacgaactgttcctgtatcctctaatgatacacctcccagcgccttgcaggaggcagcaccgctgacctcctcaatggaccctctgcctgtcttcctttatccccctgtccagcgcagcatccagaagagagctgttaggaaaatgagtgtcatgggccggcagacatgcctggagtgcagcttcgagatcccagacttccctaatcatttccctacttacgtacactgctctctgtgtcgctatagcacctgctgttctcgagcttatgccaaccacatgatcaacaatcatgttccacggaagagccccaagtatttggctttgtttaaaaattctgtgagtggaatcaagctggcctgcacttcatgtaccctttgttacctctgtgggcgatgctatgggccaagcatttggtattcaacccctctcacagatcc

SEQ ID NO: 185395 - DNA, 3102 bp, Homo Sapiens
  misc_feature (87)..(97): n is a, c, g, or t
  misc_feature (2362)..(2374): n is a, c, g, or t
  misc_feature (2418)..(2431): n is a, c, g, or t
  misc_feature (2453)..(2513): n is a, c, g, or t
  misc_feature (2672)..(2692): n is a, c, g, or t
ttgggtgcaatctggtagctttttagcagggtttgttgtctgaaaatcctacattttggggacccatgaggcagtaatgagaattcnnnnnnnnnnncccccacaggagtgtcatgggccggcagacatgcctggagtgcagcttcgagatcccagacttccctaatcatttccctacttacgtacactgctctctgtgtcgctatagcacctgctgttctcgagcttatgccaaccacatgatcaacaatcatgttccacggaagagccccaagtatttggctttgtttaaaaattctgtgagtggaatcaagctggcctgcacttcatgtacctttgttacctctgtgggcgatgctatggccaagcatttggtattcaacccctctcacagatccagcagcatcctgccacggggactcacttggatagctcactcaaggcatggccagactcgtgaccgagtgcatgaccggaacgtgaagaatatgtaccctcctccttccttccccactaacaaagctgccactgtgaaatctgcgggggccaccccagctgagcctgaagagctactaactcccttagccccagcactcccatcaccagcctcaactgcaaccccaccaccaacccccactcacccgcaggctttagcccttccaccgctggctacagagggagccgaatgtctgaatgttgatgatcaggatgaagggagcccagtcacccaagaacctgagctagcatcaggtggtggtggtagtggtggagttggcaaaaaggagcagctgtctgtgaagaagcttcgagtagtactgtttgctctatgctgcaatacagaacaggcagctgaacacttccgaaatccccagcgacgtattcgccgttggcttcgacgtttccaggcctcccagggggagaatctagagggcaaatatctgagctttgaggcagaagagaaactggctgagtgggtgctaacccagcgcgaacaacagctacctgtaaatgaggagaccttgttccagaaggccaccaaaataggacgttctttggaaggggggtttaagatctcctatgagtgggctgtgcgtttcatgctgcggcaccacctgactccccatgcccggcgagctgtggcccacaccctacctaaggatgtagcagagaatgcaggactcttcattgattttgtacaacggcagattcacaaccaggacttacccttgtctatgattgtggctattgatgagatctctttgttcctggatacagaggtgctgagcagtgatgatcgaaaggagaatgccctgcagacagtgggcacaggggaaccttggtgtgatgtagtcctagccattctggcagatggcactgtccttcccaccctggttttctacagagggcagatggatcagcctgctaacatgccagactccatattgctagaggcaaaggagagtggctacagtgatgacgagatcatggagctgtggtcaactcgagtgtggcagaagcacacagcttgccagcgcagcaaaggcatgcttgtgatggactgtcatcgcactcacttgtcagaagaggtactggctatgcttagtgcctctagcactttgcctgcagtggtcccagcaggctgtagctccaaaattcagccattagatgtatgcatcaaaagaactgtcaagaacttcctgcataaaaaatggaaggaacaggctcgggaaatggcagatactgcatgtgattctgatgtcctgcttcagctggtgcttgtctggctgggtgaagtgctaggtgtcattggggactgtccagagctagttcagcgctccttcctggtggctagtgttctgcctggccccgatggcaacattaactcacctacaagaaatgctgacatgcaggaggagctaattgcctccctagaggagcaactgaagctgagtggggaacattctgagtcttccactccacgacccagatcatctcctgaagagacaattgagcctgaaagtcttcaccagctctttgagggtgaaagtgagaccgagtctttctatggctttgaagaagctgacctagatctgatggagatttgagtgttggggtcatgagggggtgtggagtgggggtgggaacatgtgagggagggtaaaggggcttagggaaaagggggcataccaggtggggtatttggtttctattttttaattttataccaccactcccccctgaagttgacttacacttccctgtggatttgtggattaattaggaaaaccaatagtaatcacgtctgagccaaggagctggcccattggtcattcacttctgctaaaaacaggtttttgtgacnnnnnnnnnnnnnaaatttaaatcactgtgtttggtatttttctgacaaaattaagnnnnnnnnnnnnnnttatttgtgggcaaatgttaannnnnnnnnnnnnnnnnnnnnnnnnnnnnnnnnnnnnnnnnnnnnnnnnnnnnnnnnnnnnattgtgtggccaatgtctttgggcatgatgctatctaatcattgttaatgtgagaacatttctgaagatggggaaagacaaattatgtagctcacaaactggtttattatatatatggataaaaaacttttttcattgtggtcttaacacttttatatnnnnnnnnnnnnnnnnnnnnngtcccactgaactctctcttccttctccttttctttccttccctctccagagatgttagtttctacagcaaccctagatataaaattgtggctttaaaaatgcatgaaaccacctttaattatccagaatgaatagatttgtcttttcctcaccaccttccctccaaaacatgacatagaaaatattttttgcacttgtgatccttggcccctttccccattctcaataccatccatccctctggacaaaggatcatacaggtgttattaccaagcgataaatactgaagcgatcaaacaattttagggtggaagccattcccagtttgagtcttcatcctgtaagcccccaggggcattccctgctttactgaacttcatcctgttacagggatagcatgcctgtttaa

SEQ ID NO: 185396 - DNA, 1661 bp, Homo Sapiens
  misc_feature (133)..(144): n is a, c, g, or t
  misc_feature (188)..(201): n is a, c, g, or t
  misc_feature (441)..(461): n is a, c, g, or t
  misc_feature (1454)..(1474): n is a, c, g, or t
ttggctccctgaagttgacttacacttccctgtggatttgtggattaattaggaaaaccaatagtaatcacgtctgagccaaggagctggcccattggtcattcacttctgctaaaaacaggtttttgtgacnnnnnnnnnnnnaaatttaaatcactgtgtttggtatttttctgacaaaattaagnnnnnnnnnnnnnnttatttgtgggcaaatgttaaatttttttgtttccccttttacctcaattgtatcatagtactgggtttttttgtttgttttattgtgtggccaatgtctttgggcatgatgctatctaatcattgttaatgtgagaacatttctgaagatgggaaagacaaattatgtagctcacaaactggtttattatatatatggataaaaaacttttttcattgtggtcttaacacttttatatnnnnnnnnnnnnnnnnnnnnngtcccactgaactctctcttccttctccttttctttccttccctctccagagatgttggtttctacagcaaccctagatataaaattgtggctttaaaaatgcatgaaaccacctttaattatccagaatgaatagatttgtcttttcctcaccaccttccctccaaaacatgacataaacaatattttttgcacttgtgatccttggcccctttccccattctcaacaccatccatccctctggacaaaggatcatacaggtgttattagcaagcaagagatactgaagcgatcaaacagttttagggtggaagccattcccagtttgagtcttcatcctgtaagcccccaggggcagtccctgctttactgaacttcatcctgttagatggagagcatgcctgtttaagggattactggtcctacagccaggagctaattgttcaagaagtgttgaactttaaaaagacaagaccacttgttgaaatccagcgtgctctgtggctttcccctatttctcttaatacttagggaagaatctgacaggaagaagcgcacaggggtgtgcacaaagaaaatgacatgaatctttatttttcactgccagcttcaaggaaagaaaattttttctacaatttgcatgagggatttttttaattgtatgtactcatggttgtaaaccaaaacgtactgtaccgtacagagaaaaggagcaaaaaaccaagtcttctgtttatcctgaggctttccacaatgttcccctcctgtgagccaaggaggcaaactgcacaagcttgtaaatggttcgtctttaaaatgtacataagtggaacatttaataaaatgaggggaaatggatttataaacttgttttttttctaggtgaccctgtttaataggctttcacagactggggaatgctcaagatgtgatgggcctggtggtacaggtgtgacatttgttaccacccatttctcccaccccaccctgcnnnnnnnnnnnnnnnnnnnnncatcccccaacacactataatatagtgaactggaaaaagtcccttccagaaacagcttggccagcttttgtgaacctttgacatctgaaaacaaccaaggatccatctgggcttctcttccccagctttttggctgatgccattttattgacagacaatggattttgaagtcagcccttgcctttga

SEQ ID NO: 185397 - DNA, 1081 bp, Homo Sapiens
  misc_feature (237)..(294): n is a, c, g, or t
ttttttccagcggcaggctgtgcaccagaggtcccggcgctccatgccatacaccctccagcacttcttcgcgtcgccgcggggcttcctcagggtgactccgatccctggaggacaaggcgggtgggcaggctccgacctccgtgggctgcggctccaggcgggcgggcgtcaggcagccctggtagacacggtcactgtgacaggactgggggttagcaacggtgctcaggacannnnnnnnnnnnnnnnnnnnnnnnnnnnnnnnnnnnnnnnnnnnnnnnnnnnnnnnnnccagcagctctggcagctccaggcgggggaaggcaggcggcatggaggccgtgggggacactggagtcaggctggacagcccgtcggtcagcgtgtccacaccaacatccagctctgtgtagtagaagtcctcctcaccatcactctgatcaggctctgcctgcctccccaggtgcaccaggcggatgtgtctctgcatcgccgacgccgtgctcagcaccttcccgcagctcttccacagacactggaacatgacctgggccgggctcttcctttttctcagggtgggctccccaaacagaaagtgggctgcctcggggggcagtgggggtgacggggtggacggagaggactggtcactggccaggtcccatccccagtctccactgttgctgctgctgctgtagctgcctgggggccgcaccagggcctccttccagggctccaggccaggctctgggctgaaggctgcaactggggcccccagaaggagagggctggtggacaggcttgtaagggcagcggcagccatgacctcgtccagccgggcttttcctggggtggctctctgcgctgggacggggatgtgcgccgacggagtccggggccccgccgccgcccccgtccacgtccggggggcccccaggtccgaggcccgcggctccgactcctgcggccgcgcgaactccaagcccgcgaagccgccgcccacggaagagccctgcggatggggagggggcagactcagcggaggcggtggccgggggaggggggtccctcaacccaa

SEQ ID NO: 185398 - DNA, 1138 bp, Homo Sapiens
  misc_feature (953)..(964): n is a, c, g, or t
tacaatgtaaaaatacatttcccaggcccccaaacaaaacacaagtatagtaattataaaatttttgtactgtgagttcatttctcttataattcttgagaaccattctaagcaatctatttgtataaaatataaaatttatcataactgttaatttaaaaattattttaaatttgagtttattgaatttgccatttttttgtacataacagtggtttctggtcccaagttccccttgaacttatttactacaatggtctttttactcctatttatttccttctacaatagaaaagaaaggctaaccattcatgggtcccataaaaaacaatgtgaaggaaggttctaagagtgaccaaatataccagtgaacatactatctttctgaaaaagaaagaattaagtgaccaactaagagatccacttttgcaccaatgaaacacatggaggtgaaacctcagaacaagcggagcttaagctcaatgacagtatgttttatatgacaggccagctgagaatgtatctgtcaatcctgactaagcccaatacatgggtggtgaccctgaggtagcccagatgatatgctctgaattttagataggtctaaatcacaatggtacagtctgatgtgaaactttagtctacctaccataaactcgttttctgaatcagtccttattcataattagacccaaaacccagctatttctcctctcttagatgacatgcccaataaaaacagcatccatgattggtttcattatctcccaattaagtagtggtgacaccaccactaacactagtatccaaacttatgatacaaatcctaaaggtattgagtcagtaagacagagcagaagctatgttgggccatactgaccaatttctgagaaccacattagccacattcatgcaattaaaacccatttaagacacacaaatggcagatgagnnnnnnnnnnnnggatgaggtcattaaactttatcactggaaacatgattccactgtttcaaataggaaacctaccctgggagacttccaccaaagtgcagaaggacctgatgcacgggctcatcatcttaacactagagtcccaagtcaaaactctaggaggaggataagaaagccaaacttttt

SEQ ID NO: 185399 - DNA, 1366 bp, Homo Sapiens
tataacccaccttataattgattcaggcctcttcccctcctgtcacgttgccaggatcccaggatgctggtatcctgcatagatttcaggtacatcactgatgtcctgactgaggaggatgccctaggtgagtttggaagctttctgggatacacgacgtgcacacacagtagtggcatgctttgtttcctaaaagagtgagtgatgctttttatttcttccagaaatactgcagaaaggtcaaattggtaaaaaagaaagaggtgggttgtaagaaaattttcttcattgtttttgctaacattgtccacttttgagtgcccctgtccttttggggtacacattgtcttcccaaatgccctgtgctgagcagctaggccctcaaatcaacattcaagtctgcatggtgaagcctgctgggtatgacctctgactgcagagtttgcttcagccactgctgaaaggaagtttggctttaggattacactgtagggagagccctgggggagcagggcagtccatgagagtatcctgatcacctgggtttgacatcctagtaatttgtggctgggtgtgtgtgtgcagggccggatcaggagaacagctggactctccaggggaaacagcttagctacaggcacttccaattccgaagggccctggaaagtgcaaaatgttgacggcgctgtgttttcacagagaagcaaatgctggcacaaggataccctgcttacacgacatcgtgcgcctggctggggtactcagatgacacgttgaagcagctctgtgcccaggcgctgaaggatggctggaccaggtttaaagtaaaggtgggtgctgatctccaggatgacatgcgaagatgccaaatcatccgagacatgattggaccggaaaagactttgatgatggatgccaaccagcgctgggatgtgcctgaggcggtggagtggatgtccaagctggccaagttcaagccattgtggattgaggagccaacctcccctgatgacattctggggcacgccaccatttccaaggcactggtcccattaggaattggcattgccacaggagaacagtgccacaatagagtgatatttaagcaactcctacaggcgaaggccctgcagttcctccagattgacagttgcagactgggcagtgtcaatgagaacctctcagtattgctgatggccaaaaagtttgaaattcctgtttgcccccatgctggtggagttggcctctgtgaactggtgcagcacctgattatatttgactacatatcagtttctgcaagccttgaaaatagggtgtgtgagtatgttgaccacctgcatgagcatttcaagtatcccgtgatgat

SEQ ID NO: 185400 - DNA, 1601 bp, Homo Sapiens
  misc_feature (949)..(1087): n is a, c, g, or t
caaacttcaccatctggatactggtgtttctttacagattcctcctttcatttctgttgagtagccgggatccttgggaggcatgtaggaagcccgctggatcatcacgggatacttgaaatgctcatgcaggtggtcaacatactcacacaccctattttcaaggcttgcagaaactgatatgtagtcaaatataatcaggtgctgcaccagttcacagaggccaactccaccagcatgggggcaaacaggaatttcaaactttttggccatcagcaatactgagaggttctcattgacactgcccagtctgcaactgtcaatctggaggaactgcagggccttcgcctgtaggagttgcttaaatatcactctattgtggcactgttctcctgtggcaatgccaattcctaatgggaccagtgccttggaaatggtggcgtgccccagaatgtcatcaggggaggttggctcctcaatccacaatggcttgaacttggccagcttggacatccactccaccgcctcaggcacatcccagcgctggttggcatccatcatctgcaaaaagagactcaaagtcttttccggtccaatcatgtctcggatgatttggcatcttcgcatgtcatcctggagatcagcacccacctttactttaaacctggtccagccatccttcagcgcctgggcacagagctgcttcaacgtgtcatctgagtaccccagccaggcgcacgatgtcgtgtaagcagggtatccttgtgccagcatttgcttctctctttcttttttaccaatttgacctttctgcagtatttctagggcatcctcctcagtcaggacatcagtgatgtacctgaaatctatgcaggataccagcatcctgggaccctggcaacgtgacaggaggggaagaggcctgaatcaattataaggtgggttatannnnnnnnnnnnnnnnnnnnnnnnnnnnnnnnnnnnnnnnnnnnnnnnnnnnnnnnnnnnnnnnnnnnnnnnnnnnnnnnnnnnnnnnnnnnnnnnnnnnnnnnnnnnnnnnnnnnnnnnnnnnnnnnnnnnnnnnnnnagttgttcaccccatgtccacaagtaacttccagacaggctttccctcctgcttggcccacaagtcccacaccgcgtttaggacggccgctgtcgccaggtgcaccacgcccttttctggaccaatccatctgagctgcccatcacttgtgagctgcctatagaagcctctgaagtcaccaacaatgtccttgaggtccttgttgagcacatggtgggcgagggcattcacagcacagacaacaacttcagtgccttttcccagagtgaaggtaattccacaccccttgattccatcttctgcatcagtttctatgacgacataggcagccgagtagtcagggtccgtgtgcatggcgtccgcgccgtggcccccaagcgacgtggggaagcgcacgtcccggaccgagagccgggagatcctgccgcgcaccatggcccctgcgccccgtggccgcggcccccgtgcggtcaggactggtcgggatcccgagcgcgcggcgggagggcgccaa

SEQ ID NO: 185401 - DNA, 1618 bp, Homo Sapiens
  misc_feature (372)..(385): n is a, c, g, or t
  misc_feature (998)..(1023): n is a, c, g, or t
  misc_feature (1144)..(1157): n is a, c, g, or t
  misc_feature (1533)..(1548): n is a, c, g, or t
caccaaaccctccacgaccccgtttcattcacgtggaaagccagcctcagtcacatctccctggcccctaacgattcctcagctccctattaaatctctctctgagcagggcagcatcctgtagcgggggccaaactgtgacctgggaaccaagcccagctccgcaggttgcatttccgtcttctcgtgcctttaggataggacgctgcagtgagtcccacagttaacacttgcccagttccccactctaactggggaaaggaacttgagaggctcagaactcatccatttgatctgttaactgaaaaaggattcattttggtaaaacttgttcgcctttgagacacttcagtgagttatttgggattcttnnnnnnnnnnnnnnggtggaaggaaaggcatctgaggggctgtgacacactccggctacctctggccacacgccagcttgcttgtgcctgttggactcaccagaggcaggcaggccctgcggctcctctagagcctgcaaagcctcctcctggcaattctgggcagggccgatgtctgggccacagctagtccaagcctgtcattgaagacccagtcaagcttctgtctgaaattccaccttcttctgtcccaagtggttgtggacacccccgggcgctggtactgaggaccagcagcagccgagggaggcagacaggctcagagcacgcttccatttatagggaacagaacgcaggcctccgagtgtccacggagcaatgtgcaaatcgcagtgatgagtagagtaaaacctctacttcgagcacagtatctctggcaaacacaggggactgcagtcgacaatgctgcggagtacacccgagtacacagtcagacatttgttcggtaaacagtaaatgcgtaagatcaatgaccttgagaggcctgtctgtgctccagacgtgtggttcacgtggagagaatggctgccactcaaagtatcttcacaggaaaccagggcttgaggnnnnnnnnnnnnnnnnnnnnnnnnnnggctcacccaaaaagtcactgtgtacggacttaactttgttcaacatggattttggttttgtggaatctaaatgcagacactcgtttacctcacacccttggatttgtctgtttttggacnnnnnnnnnnnnnntttgtttgtttctttctttcttccataacatcaatgcttcgtctgaatatcatcatcgttcaagagttgggggaagaaagacttcatatgcacagggccgggtggggaatgtttgttttggctgtttgctgcctccattcagattttcctatcgcagctcagctggtgacctgaaggcgagcaacaggcacaagggtccccagggccttccggatggctgctttcacctcctgcctgggccaccgagtctctacacagaaaaatgagtcacccgactcaaaaggggtgggggtagaggcagggacaaggcatgaaaaccacagataaccaaggtgtttcttccaagtggtcagtttaaaacaaacaactgccaccnnnnnnnnnnnnnnnnccccacaaaaaatatttattcagaatcaaagataaaatactgtgtgagagccaggctacaggggccccaa

SEQ ID NO: 185402 - DNA, 1512 bp, Homo Sapiens
gcccactttgtacaaaaaagttgggtttgtgaccttatctgcaacaaatgccaagacaaatgatgtgcgagatgtcataaaacaagctcaaaatgaaaagagctttttcaaaaggaaaaccatcctttttattgatgagattcatcggttcaataaatctcagcaggacactttccttcctcacgtggaatgtgggacgatcactctgattggggcaaccactgaaaacccttccttccaggtcaacgctgctcttctgagccgctgtcgagtgattgttcttgagaagcttccagtagaggcaatggtgactattttaatgcgagcgatcaactccctgggaatccacgtcctagactctagccgtcccactgaccctctgagccacagcagcaacagcagctcagagcccgccatgttcatagaggataaagcagtagacaccctggcttacctcagtgacggtgacgcccgagctgggttgaacggactgcagctggcggtgctggctaggttaagctctaggaagatgttctgtaagaagagtgggcaatcctattctcccagtagagttctgatcacagagaatgacgtgaaggagggcctacagcgatcccacattttatatgaccgggcaggtgaggagcattacaactgcatctccgccctgcacaagtccatgcggggctcagaccagaacgcctccctctactggctggctcgcatgctcgagggaggagaggacccactctacgtggcacggaggcttgtcaggtttgccagcgaggacataggtctggcagacccgtctgcgttaacacaagcggttgctgcctaccaaggctgtcattttataggcatgcctgaatgtgaggtgcttctggcccagtgtgtggtctactttgccagagccccaaagtccattgaggtgtacagcgcctacaacaacgtcaaagcctgcctgaggaaccaccaggggccactgccccccgtgcccctgcacctgaggaacgcgcccactaggctgatgaaggatttgggctatggcaaaggctacaagtacaaccccatgtacagcgagcctgtggatcaggagtacctgcctgaagagttgaggggggtagatttcttcaatgcagaggaggtgctgactcctcagggcacgacagcagaaggatgttgcttttttaagggagggccagaaagaaagttagtggattgcaaagttggttgcctggtggaagttagaacagaccaacattttgtgccagaaatttaagagttccataggtggaggcgcagttctttcgaataaatgtgtaactttgaaattgtgttcatttgcactcggtgcagcggttatgcttatgaaaatacctggcagctttgtgcaatgaattaatgttataggaaattatctattttgtcatagtatttaagtcataatgtcatttcagaattcagttctgtaagattttcttttctttaaaaatgtatattctgggtaggttt

SEQ ID NO: 185403 - DNA, 1322 bp, Homo Sapiens
ttggctccgagctgcggagtccgggactggagctgcccgggcgggttcgcgccccgaaggctgagagctggcgctgctcgtgccctgtgtgccagacggcggagctccgcggccggaccccgcggccccgctttgctgccgactggagtttgggggaagaaactctcctgcgccccagaggatttcttcctcggcgaagggacagcgaaagatgagggtggcaggaagagaagggcgctttctgtctgccggggtcgcagcgcgagagggcagtgccatgttcctctccatcctagtggcgctgtgcctgtggctgcacctggcgctgggcgtgcgcggcgcgccctgcgaggcggtgcgcatccctatgtgccggcacatgccctggaacatcacgcggatgcccaaccacctgcaccacagcacgcaggagaacgccatcctggccatcgagcagtacgaggagctggtggacgtgaactgcagcgccgtgctgcgcttcttcctctgtgccatgtacgcgcccatttgcaccctggagttcctgcacgaccctatcaagccgtgcaagtcggtgtgccaacgcgcgcgcgacgactgcgagcccctcatgaagatgtacaaccacagctggcccgaaagcctggcctgcgacgagctgcctgtctatgaccgtggcgtgtgcatctcgcctgaagccatcgtcacggacctcccggaggatgttaagtggatagacatcacaccagacatgatggtacaggaaaggcctcttgatgttgactgtaaacgcctaagccccgatcggtgcaagtgtaaaaaggtgaagccaactttggcaacgtatctcagcaaaaactacagctatgttattcatgccaaaataaaagctgtgcagaggagtggctgcaatgaggtcacaacggtggtggatgtaaaagagatcttcaagtcctcatcacccatccctcgaactcaagtcccgctcattacaaattcttcttgccagtgtccacacatcctgccccatcaagatgttctcatcatgtgttacgagtggcgttcaaggatgatgcttcttgaaaattgcttagttgaaaaatggagagatcagcttagtaaaagatccatacagtgggaagagaggctgcaggaacagcggagaacagttcagacaagaagaaaacagccgggcgcaccagtcgtagtaatcccctcaaacaaaggaaagcctctgctcccaaaccagcccagtccccagagaacattaaaactaaggagtgcccagaagaaaaacaaacccgaaaaagagtgtgagctaa

SEQ ID NO: 185404 - DNA, 888 bp, Homo Sapiens
ttggcgagcctttgaggggaacgacttgtcggagccctaaccaggggtatctctgagcctggtgggatccccggagcgtcacatcactttccgatcacttcaaagtggttaaaaactaatatttatatgacagaagaaaaagatgtcattccgtaaagtaaacatcatcatcttggtcctggctgttgctctcttcttactggttttgcaccataacttcctcagcttgagcagtttgttaaggaatgaggttacagattcaggaattgtagggcctcaacctatagactttgtcccaaatgctctccgacatgcagtagatgggagacaagaggagattcctgtggtcatcgctgcatctgaagacaggcttgggggggccattgcagctataaacagcattcagcacaacactcgctccaatgtgattttctacattgttactctcaacaatacagcagaccatctccggtcctggctcaacagtgattccctgaaaagcatcagatacaaaattgtcaattttgaccctaaacttttggaaggaaaagtaaaggaggatcctgaccagggggaatccatgaaacctttaacctttgcaaggttctacttgccaattctggttcccagcgcaaagaaggccatatacatggatgatgatgtaattgtgcaaggtgatattcttgccctttacaatacagcactgaagccaggacatgcagctgcattttcagaagattgtgattcagcctctactaaagttgtcatccgtggagcaggaaaccagtacaattacattggctatcttgactataaaaaggaaagaattcgtaagctttccatgaaagccagcacttgctcatttaatcctggagtttttgttgcaaa

SEQ ID NO: 185405 - DNA, 898 bp, Homo Sapiens
ttggggccttagagagagcagcttagtttttgaatcggttgtggcggccgccggcgaggaatggcggtatttgtgagaggagtcggcgtttgaagaggtggaactcctagggcttttttgagagtgctgatttagaagaatacaaatcatggctgaaaatagtgtattaacatccactactgggaggactagcttggcagactcttccatttttgattctaaagttactgagatttccaaggaaaacttacttattggatctacttcatatgtagaagaagagatgcctcagattgaaacaagagtgatattggttcaagaagctggaaaacaagaagaacttataaaagccttaaaggacattaaagtgggctttgtaaagatggagtcagtggaagaatttgaaggtttggattctccggaatttgaaaatgtatttgtagtcacggactttcaggattctgtctttaatgacctctacaaggctgattgtagagttattggaccaccagttgtattaaattgttcacaaaaaggagagcctttgccattttcatgtcgcccgttgtattgtacaagtatgatgaatctagtactatgctttactggatttaggaaaaaagaagaactagtcaggttggtgacattggtccatcacatgggtggagttattcgaaaagactttaattcaaaagttacacatttggtggcaaattgtacacaagagaaaaattcagggttgctgtgagtctaggtactccaattatgaagccagaatggatttataaagcttgggaaaggcggaatgaacaggatttctatgcagcagttgatgactttagaaatgaatttaaagttcctccatttcagattgtattttaagtttcctgggattttc

SEQ ID NO: 185406 - DNA, 1957 bp, Homo Sapiens
gccaactttgtacaaaaaagttggcaaattacttcctgacaaagcaaaggtaaattctggcaataagtacaatgacaacttttttggattgtactgcatttgcaagagaccttatcctgatcctgaagacgagattccagatgagatgatccagtgcgtagtctgtgaagactggttccatggaaggcatcttggtgccattccccctgagagtggggattttcaggagatggtatgccaggcctgcatgaaacgttgttcttttttgtgggcttatgctgcacaattggcagtaaccaaaatatccactgaggatgatggattggtgcggaacattgatggaataggtgatcaggaagttatcaaacctgaaaatggagagcatcaagatagtaccctcaaagaggatgttccagaacagggaaaggatgatgtccgggaggttaaagtagagcagaacagtgaaccatgtgccggctctagttctgaatctgatctccagacagtgtttaagaatgaaagcctcaacgcagaatcaaaatctggctgcaaacttcaggagcttaaagctaagcagcttataaagaaagacactgccacctattggcccctgaactggcgtagcaagttgtgtacctgccaagactgtatgaaaatgtatggagatctagatgtcttattcctgacagatgaatacgacacagttctggcttatgaaaacaaagggaagattgcccaggccactgacaggagcgatcccctaatggatacccttagcagcatgaatagagtccagcaagtggaactcatttgtgaatacaatgatttgaagactgaacttaaagactatctcaagagatttgctgatgaaggcacggttgttaagagagaggacattcagcagttctttgaagagtttcagtcaaaaaagagaagaagagtggatgggatgcagtattactgcagctagagtggagtatgaagctttctcattcaagccaatgaaaatgtgcttcccattcttggaataaaagaggtgtggttcacatttggccccctttccgtcctcctctgtttggagaggcctcgcgctcccttcattctctttagctgcagtagccaccgtgtggatgctgacttcacagccagcgtcctctgtgactcagctgatgcagctcattccacagacttcgccagtgtactcctactccagtgcacccagggttatttgcatagtttttaagtttgattttgttttgagaaagcaaattggtgtcttgtttaatgatctgttatttcactcccagatgtgtgtgttttgccacagagctgttgccttccagaacctcctccgcaggcatcacggaaggctctcttcccgtcacctagaacctctacaggtcccctcgcccctatgatcgtggtgccttgggtcaaagcttcctcaagcctggtctgctccttctttcacgtccctgttttctgaggtttggtcatagcttagaaaggatcttggggcttgttttctctaggcccaacctccagagtagccaggactgatggttttctggtctggatgtctgtcacaggcggagagattaacagatgacagggttgaggaagcaagcctttgttatgaattttactaatacagttcaagtgaaattttcgttcatgattctattggcactagaattagaatttcagtactgtagtgctcacagggcttcctggagaacatttgcccgtatactagtcccttctctgctgcctagaaaacagaccgggtctcacccctgtgaaatcttggtggtttacgaagtcctctggatttcttgatattatcagggatattcataagcatatatcaaaaatggacctattttgatattctgttatgaaatgttattaaaccccataaattatatttttcccccttgaatctgctaagaaaaac

SEQ ID NO: 185407 - DNA, 983 bp, Homo Sapiens
ctttgtacaaaaaagttggcgcctccgccgcctgccgagccgctgttcggctgacagttgaggatggccggagccgagggcgccgctgggcggcagtcggagctggagcccgtggtatcgttggtcgacgtccttgaggaggacgaggagctggagaatgaggcgtgcgctgtcctgggcggcagcgactccgagaagtgctcctactctcagggctcagtaaagagacaagcactatatgcctgtagtacctgcaccccagagggagaagaaccagcaggaatttgtttagcttgcagttatgaatgtcatggaagtcacaaactatttgagctatacacaaaaagaaattttcgttgtgattgtggaaacagcaagtttaaaaatttggaatgcaaattacttcctgacaaagcaaaggtaaattctggcaataagtacaatgacaacttttttggattgtactgcatttgcaagagaccttatcctgatcctgaagacgagattccagatgagatgatccagtgcgtagtctgtgaagactggttccatggaaggcatcttggtgccattccccctgagagtggggattttcaggagatggtatgccaggcctgcatgaaacgttgttcttttttgtgggcttatgctgcacaattggcagtaaccaaaatatccactgaggatgatggattggtgcggaacattgatggaataggtgatcaggaagttatcaaacctgaaaatggagagcatcaagatagtaccctcaaagaggatgttccagaacagggaaaggatgatgtccgggaggttaaagtagagcagaacagtgaaccatgtgccgggctctagttctgaatctgatctccagacagtgtttaagaatgaaagcctcacgcagaatcaaatctggctgcaaacttcaggagcttaaagctaagcagcttataaagaaagaacactgccacctattggcccct

SEQ ID NO: 185408 - DNA, 1684 bp, Homo Sapiens
  misc_feature (1474)..(1496): n is a, c, g, or t
ttggccgggctggaagcctctcggagtgctgcctccagccaaggggcggccggcgagtcccagtgagagcggagggtgccagaggtagggggccgagaaacaaagttcccggggcttcctccggggccgcggtcggggctgcgcgtttgaccgcccccctcctcgcgaaggcaatggcttccaaactcctgcgcgcggtcatcctcgggccgcccggctcgggcaagggcaccgtgtgccagaggatcgcccagaactttggtctccagcatctctccagcggccacttcttgcgggagaacatcaaggccagcaccgaagttggtgagatggcaaagcagtatatagagaaaagtcttttggttccagaccatgtgatcacacgcctaatgatgtccgagttggagaacaggcgtggccagcactggctccttgatggttttcctaggacattaggacaagccgaagccctggacaaaatctgtgaagtggatctagtgatcagtttgaatattccatttgaaacacttaaagatcgtctcagccgccgttggattcaccctcctagcggaagggtatataacctggacttcaatccacctcatgtacatggtattgatgacgtcactggtgaaccgttagtccagcaggaggatgataaacccgaagcagttgctgccaggctaagacagtacaaagacgtggcaaagccagtcattgaattatacaagagccgaggagtgctccaccaattttccggaacggagacgaacaaaatctggccctacgtttacacacttttctcaaacaagatcacacctattcagtccaaagaagcatattgaccctgcccaatggaagaaccaggaagatgtggtcattcattcaatagtgtgtgtagtattggtgctgtgtccaaattagaagctagctgaggtagcttgcagcatcttttctagttgaaatggtgaactgataggaaaacaaatgagtagaaagagttcatgaagaggccctcctctgcctttcaaaaggctggtcacctacacatgtttaaggtgtctctgcacatgtctcaagcccatcacaagaaagcaagtacagtgtggatttcaaatggtgtgtaacttcagctccagctggtttttgacagctgttgctgtggtaatatttttgacatgtgatggtgatagtctctggttctccccatccccacaaaggctgttgaaccacagcaccaggaagcctgagaatgaatcctgagggctctagcccaggctttgtcccaggctttctggtgtgtgccctcctggtaacagtgaaattgaagctacttactcatagtggttgtttctctggtcttgagtgactgtgtccacagttcatttttttccggtaggaataactccttttctacatccacgctccatagagtctctccttttcagacatcctgggatgaaagaatttggcnnnnnnnnnnnnnnnnnnnnnnnggacatctgttttcactcttaggcttttaaacaatagttattgcttttatccctctcagattctaataactgagagcgatggggctatattgaatctctgtatgcactgagaactgagctatgaagaggatcttattaaactgctggtctgactttatggattgacactgttcctttcttttattgtg

SEQ ID NO: 185409 - DNA, 1811 bp, Homo Sapiens
  misc_feature (856)..(872): n is a, c, g, or t
  misc_feature (1230)..(1264): n is a, c, g, or t
  misc_feature (1344)..(1358): n is a, c, g, or t
caaaaaagttggcagatcgatctaagatggcgactgtcgaaccggaaaccacccctactcctaatcccccgactacagaagaggagaaaacggaatctaatcaggaggttgctaacccagaacactatattaaacatcccctacagaacagatgggcactctggttttttaaaaatgataaaagcaaaacttggcaagcaaacctgcggctgatctccaagtttgatactgttgaagacttttgggctctgtacaaccatatccagttgtctagtaatttaatgcctggctgtgactactcactttttaaggatggtattgagcctatgtgggaagatgagaaaaacaaacggggaggacgatggctaattacattgaacaaacagcagagacgaagtgacctcgatcgcttttggctagagacacttctgtgccttattggagaatcttttgatgactacagtgatgatgtatgtggcgctgttgttaatgttagagctaaaggtgataagatagcaatatggactactgaatgtgaaaacagagaagctgttacacatatagggagggtatacaaggaaaggttaggacttcctccaaagatagtgattggttatcagtcccacgcagacacagctactaagagcggctccaccactaaaaataggtttgttgtttaagaagacaccttctgagtattctcataggagactgcgtcaagcaatcgagatttgggagctgaaccaaagcctcttcaaaaagcagagtggactgcatttaaatttgatttccatcttaatgttactcagatataagagaagtctcattcgcctttgtcttgtacttctgtgttcannnnnnnnnnnnnnnnnggctagagtttccactatcccaatcaaagaattacagtacacatccccagaatccataaatgtgttcctggcccactctgtaatagttcagtagaattaccattaattacatacagattttacctatccacaatagtcagaaaacaacttggcatttctatactttacaggaaaaaaaattctgttgttccattttatgcagaagcatattttgctggtttgaaagattatgatgcatacagttttctagcaattttctttgtttctttttacagcattgtctttgctgtactcttgctgatggctgctagattttaatttatttgtttccctacttgataatattagtgattctgannnnnnnnnnnnnnnnnnnnnnnnnnnnnnnnnnncctcatgtaacattggtgaaggatccaggaatatgacacaaaggtggaataaacattaattttgtgcattctttggtaannnnnnnnnnnnnnngtaactacaaagctttgctacaaatttatgcatttcattcaaatcagtgatctatgtttgtgtgatttcctaaacataattgtggattataaaaaatgtaacatcataattacattcctaactagaattagtatgtctgtttttgtatctttatgctgtattttaacactttgtattacttaggttattttgctttggttaaaaatggctcaagtagaaaagcagtcccattcatattaagacagtgtacaaaactgtaaataaaatgtgtacagtgaattgtcttttagacaactagatttgtccttttatttctccatcttttatagaaggatttgtactttcttatgcaacgcagtcctctatattatgtccttcttttgtggtgtcttcatgttgaacagcataagttttggagcactaatttgattatatgtttattacaatttttaa

SEQ ID NO: 185410 - DNA, 1310 bp, Homo Sapiens
gcttttcttataatggccaactttgtacaaaaaagttggcttctatggtaatgaagaactctttggcttagtcagaaggaattaacgaacctcggtaggaatgtatttccatcctcccaccctacagatataagaggttaaaataacagttcgcccaatttaagcccagtagtgtcagttttcctaatctcagtccaggtaggaattaagaaatatctcaagtgttgatgctatccaagcatgttggggtggaagggaattggtgcccagaaaatgggactggagtgaggaatatcttttcttttgagagtacccccagtttatttctactgtgctttattgctactgttctttattgtgaatgttgtaacattttaaaaatgttttgccatagctttttaggacttggtgttaaaggagccagtggtctctctgggtgggtactataatgagttattgtgacccacagctgtgtgggaccacatcacttgttaataacacaacctttaaagtaacccatcttccaggggggttccttcatgttgccactcctttttaaggacaaactcaggcaaggagcatgtttttttgttatttacaaaatctagcagactgtgggtatccatattttaattgtcgggtgacacatgttcttggtaactaaactcaaatatgtcttttctcatatatgttgctgatggttttaataaatgtcaaagttctcctgttgcttctgtgagccactatgggtatcagcttgggagtggccatagatgaccgcatttccatgacctaactgtatttcacccccttttccttccctactgttcttgccccaccccaaccagttcctgctgctgcttttggcttcttggaggtgaagggcttaaaacaaggcttctaagcacccagctatctccatacatgaacaatctagctgggaaacttaagggacaagggccacaccagctgtctcctctttctgccaattgttgcccgtttgctgtgttgaactttgtatagaactcatgcatcagactcccttcactaatgctttttgcatgccttctgctcccaagtccctggctgcctctgcacatcccgtgaacactttgtgcctgttttctatggttgtggagaattaatgaacaaatcaatatgtagaacagttttccttatggtattggtcacagttatcctagtgtttgtattattctaacaatattctataattaaaaatataatttttaaagtcagcaaacctgagaattattttagtaacccagcactgattcatttaatggcttttc

SEQ ID NO: 185411 - DNA, 2711 bp, Homo Sapiens
  misc_feature (528)..(544): n is a, c, g, or t
  misc_feature (1774)..(1823): n is a, c, g, or t
  misc_feature (2554)..(2572): n is a, c, g, or t
ttggccttcatgttagttgggtattataaataagagatacaaccatgaatatattatgtttatacaaaatcaatctgaacacaattcataaagatttctcttttataccttcctcactggccccctccacctgcccatagtcaccaaattctgttttaaatcaatgacctaagatcaacaatgaagtattttataaatgtatttatgctgctagactgtgggtcaaatgtttccattttcaaattatttagaattcttatgagtttaaaatttgtaaatttctaaatccaatcatgtaaaatgaaactgttgctccattggagtagtctcccacctaaatatcaagatggctatatgctaaaaagagaaaatatggtcaagtctaaaatggctaattgtcctatgatgctattatcatagactaatgacatttatcttcaaaacaccaaattgtctttagaaaaattaatgtgattacaggtagaggccttctaggtgagacacttttaaggtacactgcattttgcnnnnnnnnnnnnnnnnngtaatcttttagcaaccccagtattccttcactatttcgcttcctgcattagcaaattttacttacagtcaaaagtgcagatttatactcctgacgtgtctcattcacagctaaataataggccataggacttttggtaggtttaaacttttaattctgtatttcatgattataagtcttgctagaattttttctaatctttagtagatttgattaaataatgattcacagaatttagtaacagaatcaaactaagccatgtatgagggtaatcgagatgaggatattaactcaaaagaaatagggtgatttttaaaggattaataaaattctgaaatgttaagtagaagattacattgtctagtcttgtatttcctccttctgttgctctctttcattcacacactctcagtttctcatatttgtagctcatttatttggttatttcctaagaatattgaaagtgaagcaactatgtgactgtattcttcaggtaaacactgactgcgcttgttggattttccctatttttgtgacttcaagaataatatgccctgctgaatacatgccatttcacattctgaaactgggtagagtggttgggtgttctgccaacaattgctagtggtgtgaattcattcatatttgccagtattgctcacttcaaagaaactccttcatcaagcagtccagagctaggccagatcaatgctacaatcatgaagttctcattgcatgcaattgtgtaggattgacaaggaactcagataaaaatttccagggtgcacttccagaaccagcttcaacatatgtctacattgcccccaagttaataaagtgccaaccctttactctctcatacagccagaaatgttagaaatccaaaatcttggtgcattattttttcataaacgctaaaacatttgaagaaacaatttaattatttaaaattcaagtattttattcacattatttgcaatatccaaatgtttaaaaattcccagataattaactagctattacagatctcacctagagggttgatgttatgaagactccagtggactgtactcacaaattgactggacaccctatgaaagtgggtagacctctcagcggaaaataagaagggcttttacctacagggcaggacagggtcccatgagagcagttctgtggagatataaaaagaatggaagaaggaatgccttatagtgatattgtgacatnnnnnnnnnnnnnnnnnnnnnnnnnnnnnnnnnnnnnnnnnnnnnnnnnnatcttacatttaaaattgtattcctacacatattagaaactcttctaataaatgaagtaaaaaaattaaaaagaatacaaatattccagccccaaatgagaaatcaaacatattaaaattgttcaagaaaatttctttgaacacttttgaaagtttttggaaacttagaaaagagggaaaaaaatccagtgttactagtaatttccatggtaatacagataaaatacattcttttaattctgggaaattagaaaaagtggggtgatctttccaggaaaaacatgtgtaacatctgcttatcactccagctccctcctcctcctcctctccacgttcccttgagtaaatgtctgggaaagcatgaagcttgatgcaagaaccctgttgtactggcgttttcctcccctgtgaaaacgtaactactgttgggagtgaattgaggatgtagaaaggtggtggaaccaaattgtggtcaatggaaataggagaatatggttctcactcttgagaaaaaaacctaagattagcccaggtagttgcctgtaacttcagtttttctgcctgggtttgatatagtttagggttggggttagattaagatctaaattacatcaggacaaagagacagactattaactccacagttaattaaggacgtatgttccatgtttatttgttaaagcagtgtgaatagccttcaagcatgtgaataatcttccatcttccccgcnnnnnnnnnnnnnnnnnnntttttgtttctttcaggtagacaccttttaaaatgcagaactaactgaggcatttcagtaactttgctttcaaatcaataaagtcaaatgtatggaaacattttgtgccctactctccacaccccgtgtactcaaattc

SEQ ID NO: 185412 - DNA, 2053 bp, Homo Sapiens
  misc_feature (1723)..(1740): n is a, c, g, or t
ccaactttgtacaaaaaagttggagttttcaaagactggctctgctgttaagaagttgtacttaaagcggaggagctaagccacctgccaaaatgtgcaaaggacttgcagctttgccccactcatgcctggaaagggccaaggagattaagatcaagttgggaattctcctccagaagccagactcagttggtgaccttgtcattccgtacaatgagaagccagagaaaccagccaagacccagaaaacctcgctggacgaggccctgcagtggcgtgattccctggacaaactcctgcagaacaactatggacttgccagtttcaaaagtttcctgaagtctgaattcagtgaggaaaaccttgagttctggattgcctgtgaggattacaagaagatcaagtcccctgccaagatggctgagaaggcaaagcaaatttatgaagaattcattcaaacggaggctcctaaagaggtgaatattgaccacttcactaaggacatcacaatgaagaacctggtggaaccttccctgagcagctttgacatggcccagaaaagaatccatgccctgatggaaaaggattctctgcctcgctttgtgcgctctgagttttatcaggagttaatcaagtagtaatttagccaggctatgaaatcatcctgtgagttatttcctccataataaccctgcatttcccattaatctacatatcttcccacagcagctttgctcagtgatacccacatgggaaaaatcccaggggatgttgcttactctttttgcccacactgctttggatacttatctactgtccgaaggccttctttccccactcaattcttcctgccctgttattaattaagatatcttcagcttgtagtcagacacaatcagaatcacagaaaaatcctgcctaaggcaaagaaatataagacaagactatgatatcaatgaatgtgggttaagtaatagatttccagctaaattggtctaaaaaagaatattaagtgtggacagacctatttcaaaggagcttaattgatctcacttgttttagttctgatccagggagatcacccctctaattatttctgaacttggttaataaaagtttataagatttttatgaagcagccactgtatgatattttaagcaaatatgttatttaaaatattgatccttcccttggaccaccttcatgttagttgggtattataaataagagatacaaccatgaatatattatgtttatacaaaatcaatctgaacacaattcataaagatttctcttttataccttcctcactggccccctccacctgcccatagtcaccaaattctgttttaaatcaatgacctaagatcaacaatgaagtattttataaatgtatttatgctgctagactgtgggtcaaatgtttccattttcaaattatttagaattcttatgagtttaaaatttgtaaatttctaaatccaatcatgtaaaatgaaactgttgctccattggagtagtctcccacctaaatatcaagatggctatatgctaaaaagagaaaatatggtcaagtctaaaatggctaattgtcctatgatgctattatcatagactaatgacatttatcttcaaaacaccaaattgtctttagaaaaattaatgtgattacaggtagaggccttctaggtgagacacttttaaggtacactgcattttgcnnnnnnnnnnnnnnnnnngtaatcttttagcaaccccagtattccttcactatttcgcttcctgcattagcaaattttacttacagtcaaaagtgcagatttatactcctgacgtgtctcattcacagctaaataataggccataggacttttggtaggtttaaacttttaattctgtatttcatgattataagtcttgctagaattttttctaatctttagtagatttgattaaataatgattcacagaatttagtaacagaatcaaactaagccatgtatgagggtaatcgagatgaggatattaactcaaaagaaataggtgattttt

SEQ ID NO: 185413 - DNA, 1906 bp, Homo Sapiens
ttggctgaaaaacatttaaagctacgaatgtctgaattcagcttcagagactctaaatcaataggagaaacttaaagcttcctagatgattctaataaccagccatgtttgaagaccagaccaccaatgcgtacaagaagtaaaggatttggagtcaacatttaaaccttggttctttcacttttaattcttatgaacttgggcaaaaggattaaaattctactttggtatcttttgaaagaaaacagaaagtggacattttaactataagtttcttatcagcctacaatcagatgaaggaaactgatctaattatcatggacctgcgacagtttcttatgtgcctgtccctgtgcacagcctttgccttgagcaaacccacagaaaagaaggaccgtgtacatcatgagcctcagctcagtgacaaggttcacaatgatgctcagagttttgattatgaccatgatgccttcttgggtgctgaagaagcaaagacctttgatcagctgacaccagaagagagcaaggaaaggcttggaatgattgtagataaaatagacgtggtaaagatgggtttgtgacggagggggagctgaaatcctggattaagcacgcccagaagaaatacatatatgacaatgttgaaaaccaatggcaggagtttgatatgaatcaagacggcttaatctcctgggatgagtacagaaacgtgacttatggcacttacctggatgatccagatcctgatgatggatttaactataaacagatgatggttagagatgagcggaggtttaaaatggcagacaaggatggagacctcattgccaccaaggaggagttcacagctttcctgcaccctgaggagtatgactacatgaaagatatagtagtacaggaaacaatggaagatatagataagaatgctgatggtttcattgatctagaagagtatattggtgacatgtacagccatgatgggaatactgatgagccagaatgggtaaagacagagcgagagcagtttgttgagtttcgggataagaaccgtgatgggaagatggacaaggaagagaccaaagactggatccttccctcagactatgatcatgcagaggcagaagccaggcacctggtctatgaatcagaccaaaacaaggatggcaagcttaccaaggaggagatcgttgacaagtatgacttatttgttggcagccaggccacagattttggggaggccttagtacggcatgatgagttctgagctacggaggaaccctcatttcctcaaaagtaatttatttttacagcttctggtttcacatgaaattgtttgcgctactgagactgttactacaaactttttaagacatgaaaaggcgtaatgaaaaccatcccgtccccattcctcctcctctctgagggactggagggaagccgtgcttctgaggaacaactctaattagtacacttgtgtttgtagatttacactttgtattatgtattaacatggcgtgtttatttttgtatttttctctggttgggagtatgatatgaaggatcaagatcctcaactcacacatgtagacaaacattagctctttactctttctcaaccccttttatgattttaataattctcacttaactaattttgtaagcctgagatcaataagaaatgttcaggagagaggaaagaaaaaaaatatatgctccacaatttatatttagagagagaacacttagtcttgcctgtcaaaaagtccaacattttcatagggtagtaggggccacatattacattcagttgctataggtccagcaactgaacctgccattacctgggcaaggaaagatccctttgctctaggaagcttggcccaaattgattttcttcttttccccc

SEQ ID NO: 185414 - DNA, 2034 bp, Homo Sapiens
  misc_feature (1599)..(1613): n is a, c, g, or t
ttggccaattcttctataacagtgtttctgaatttttaatgggaaatatgttcttcttcaattcattgctatctctactttcaggatggcaagcttaccaaggaggagatcgttgacaagtatgacttatttgttggcagccaggccacagattttggggaggccttagtacggcatgatgagttctgagctacggaggaaccctcatttcctcaaaagtaatttatttttacagcttctggtttcacatgaaattgtttgcgctactgagactgttactacaaactttttaagacatgaaaaggcgtaatgaaaaccatcccgtccccattcctcctcctctctgagggactggagggaagccgtgcttctgaggaacaactctaattagtacacttgtgtttgtagatttacactttgtattatgtattaacatggcgtgtttatttttgtatttttctctggttgggagtatgatatgaaggatcaagatcctcaactcacacatgtagacaaacattagctctttactctttctcaaccccttttatgattttaataattctcacttaactaattttgtaagcctgagatcaataagaaatgttcaggagagaggaaagaaaaaaaatatatgctccacaatttatatttagagagagaacacttagtcttgcctgtcaaaaagtccaacatttcataggtagtaggggccacatattacattcagttgctataggtccagcaactgaacctgccattacctgggcaaggaaagatccctttgctctaggaaagcttggcccaaattgattttcttctttttccccctgtaggactgactgttggctaattttgtcaagcacagctgtggtgggaagagttagggccagtgtcttgaaaatcaatcaagtagtgaatgtgatctctttgcagagctatagatagaaacagctggaaaactaaaggaaaaatacaagtgttttcggggcatacattttttttctgggtgtgcatctgttgaaatgctcaagacttaattatttgccttttgaaatcactgtaaatgcccccatccggttcctcttcttcccaggtgtgccaaggaattaatcttggtttcactacaattaaaattcactcctttccaatcatgtcattgaaagtgcctttaacgaaagaaatggtcactgaatgggaattctcttaagaaaccctgagattaaaaaaagactatttggataacttataggaaagcctagaacctcccagtagagtggggatttttttcttcttccctttctcttttggacaatagttaaattagcagtattagttatgagtttggttgcagtgttcttatcttgtgggctgatttccaaaaaccacatgctgctgaatttaccagggatcctcatacctcacaatgcaaaccacttactaccaggcctttttctgtgtccactggagagcttgagctcacactcaaagatcagaggacctacagagagggctctttggtttgaggaccatggcttacctttcctgcctttgacccatcacaccccatttcctcctctttccctctccccgctgccnnnnnnnnnnnnnnnggaaacgtttatcatgaatcaacagggtttcagtccttatcaaagagagatgtggaaagagctaaagaaaccaccctttgttcccaactccactttacccatattttatgcaacacaaacactgtccttttgggtccctttcttacagatggacctcttgagaagaattatcgtattccacgtttttagccctcaggttaccaagataaatatatgtatatataacctttattattgctatatctttgtggataatacattcaatggtgctgggtgatttattataatctgaacctaggtatatcctttggtcttccacagtcatgttgaggtgggctccctggtatggtaaaaagccaggtataatgtaacttcacccccagcctttgtactaagctcttgatagtggatatactctttt

SEQ ID NO: 185415 - DNA, 1487 bp, Homo Sapiens
ttggctcccaatgtgctgggattataggtgtgagccactgcgcgtggccactcccctttcttcttaggcagattctgccccatgtaagcaaaatgcctcagatcctggcaaagcagcgttgggggtacctcttcttcccaaagtcctggtcagttccccagaaaggaccagtcatggctgtgccagggtgactgccctcccccaggtcagccctgtcgacaaaggcaggggcttggttgtcatttccaccaagtgggaagacagtattaatagatggagaaccctctgcagtgggaagatttcagcaatgggcaagctggatagagccgtggttaggatggagttgtttgcttgttgcacttggagctctttatgaagcaagggctctgcctcccagcctgagacccagaccctggtttggacccagtagaactcttgtgggccctgggttggtgtctctgagcaaatccccaaagcaggagagtccctagcaccgtgagctctgtcagaacctcccagctggcctttcttctgccctcattgacaaccctctgaccctcttgctgagcatagacacatatgtgatgttacaggagccagtgaccttccaggatgtggctgtggacttcagccgggaggagtgggggctgctgggcccaacacagaggaccgagtaccgcgatgtgatgctggagacctttgggcacctgggtctctgtggggtgggagactacactggaaaataaagagttagctccaaattctgacattcctgaggaagaaccagccccccagcctgaaagtacaataatcctcaagggattgtgccttgtcctctacattagaagataccttgcagggtggggtccaggaagtccaagacacagtgttgaagcagatggagtctgctcaggaaaaataccttcctcataagaagcactttgacaaccgtgagtcccaggcaaacagtggtgctcttgaaacaaaccatgtttcgctccttaaaattgacaaccctgagtcccaggcaaacagtggcgctcttgacacaaaccaagttttgctccacaaaattcctcctataaaacgattgcgcaaacgtgactcacaagttaaaagtatgaaacataattcacgtgtaaaaattcatcaaaagagctgtgaaaggcaaaagggcaaggaaggcaatggttgtaggaaaaccttcattcggagtactaaacagattacgtttataagaattcacaaggggagccaagtttgccgatgcagtgaatgtggtaaaatattccggaacccaggatacttttctgtgcataagaaaatctataccggagagaggctctatgtgtgtcaagactgtgggaaaggatttgttcagagctcttctctcacacagcatcagagagttcattctggagagagaccatttgaatgtcaagagtgtgggaggaccttcaatgatcgctcagccatctcccagcacc

SEQ ID NO: 185416 - DNA, 1424 bp, Homo Sapiens
  misc_feature (188)..(234): n is a, c, g, or t
ttggcctcagccggcctactgcctctcagctggaggacgagctgcaggtggggaatgttccccttaaaaaagcaaaggagtctaaaaagcatgaaaagcttgagaaaccagagaaggagaagaaaaaaaagatgaagaatgagaacgcagacaagttacttaagagtgaaaagcaaatgaagaagtcnnnnnnnnnnnnnnnnnnnnnnnnnnnnnnnnnnnnnnnnnnnnnnngaggtaaaacagaacaggatggctatcagaaacccaccaacaaacacttcacgcagagtcccaagaagtcagtggccgacctgctggggtcctttgaaggcaaacgaagactccttctgatcactgctcccaaggctgagaacaatatgtatgtgcaacaacgtgatgaatatctggaaagtttctgcaagatggctaccaggaaaatctctgtgatcaccatcttcggccctgtcaacaacagcaccatgaaaatcgaccactttcagctagataatgagaagcccatgcgagtggtggatgatgaagacttggtagaccagcgtctcatcagcgagctgaggaaagagtacggaatgacctacaatgacttcttcatggtgctaacagatgtggctgagagtcaagcaatactatgaggtaccaataacaatgaagtctgtgtttgatctgatcgatactttccagtcccgaatcaaagatatggagaagcagaagaaggagggcattgtttgcaaagaggacaaaaagcagtccctggagaacttcctatccaggttccggtggaggaggaggttgctggtgatctctgctcctaacgatgaagactgggcctattcacagcagctctctgccctcagtggtcaggcgtgcaattttggtctgcgccacataaccattctgaagcttttaggcgttggagaggaagttgggggagtgttagaactgttcccaattaatgggagctctgttgttgagcgagaagacgtaccagcccatttggtgaaagacattcgtaactattttcaagtgagcccggagtacttctccatgcttctagtcggaaaagacggaaatgtcaaatcctggtatccttccccaatgtggtccatggtgattgtgtacgatttaattgattcgatgcaacttcggagacacgaaatggcgattcagcagtcactggggatgcgctgcccagaagatgagtatgcaggctatggttaccatagttaccaccaaggataccaggatggttaccaggatgactaccgtcatcatgagagttatcaccatggatacccttactgagcaaaaatatgtaaccttagactcagccagtttcctctgcagctgctaaaactacatgtggccagcttcattcttttttactgcgtactacatttcctgcc

SEQ ID NO: 185417 - DNA, 2775 bp, Homo Sapiens
  misc_feature (422)..(495): n is a, c, g, or t
  misc_feature (2744)..(2752): n is a, c, g, or t
tcatagtattgcttgactctcagatccacatctgttagcaccatgaagaagtcattgtaggtcattccgtactctttcctcagctcgctgatgagacgctggtctaccaagtcttcatcatccaccactcgcatgggcttctcattatctagctgaaagtggtcgattttcatggtgctgttgttgacagggccgaagatggtgatcacagagattttcctggtagccatcttgcagaaactttccagatattcatcacgttgttgcacatacatattgttctcagccttgggagcagtgatcagaaggagtcttcgtttgccttcaaaggaccccagcaggtcggccactgacttcttgggactctgcgtgaagtgtttgttggtgggtttctgatagccatcctgttctgttttacctcnnnnnnnnnnnnnnnnnnnnnnnnnnnnnnnnnnnnnnnnnnnnnnnnnnnnnnnnnnnnnnnnnnnnnnnnnnagtaacttgtctgcgttctcattcttcatcttttttttcttctccttctctggtttctcaagcttttcatgctttttagactcctttgcttttttaaggggaacattccccacctgcagctcgtcctccagctgagaggcagtaggccggctgaggtcatacttctcctcatactcattactaagaattttgtcctgggccttctttttgggaggtttctcctttgctggcttgggaggacctggcaccacatttgggtctcggtggccatgttcccgcctgtccatgcggttgtcccggaaacggcctgggccagcagcccttgtgctgggttctgagatggtggtgggaggggcatttgtgaagctctccaagctggtggccttgctgggcctcctggttgtctgtggcctctccctgtgctgatccttccgggatggagggtaaagattctctgaaactgagggtctcctggcagtgatcacctcagtggttgtagggggcctgtgggagggtgagggggtccagggcctctgcgtggtgggaaaggcagtggtggtcataggtcttgcagcaactgttaccgcccgggacgtggaccgagtcactgttgtggctggggcaggaggaagggtggtggctctgggggttgagggaggttggggcaaagctggtgcagtggcggccagttttctcaggaccttcacccgactctctctggttggtgggacttgtgctctccttgggtcctctttcttcttctcgctgcccaggcttggccttcctgctccccctccaccgtcattcccctccgccaccacctggccctctacaccagaggccttacatttctggacaaagcccttctgcctgatcttctcgatcctacggatggggccttggtcgatgacctcgtacatggcttccagcctaacgggatatggatagcgctcctccacctgcagcgtcttcttcagcagcaccatgccaaacttgcccttctccagcttcaggaagctcatcagcttagggatgaggctagggtccaggggctgctccaggatctggccctcgctggtgatccttctcaccttgcctccttcctcacctgcctggtggaagagcacaatctgttggatgtgcctctccgccagctcacagtacacatcgtccttcagcaggctcatcatgaggcggtagtagccttccgaggcatgaggggctgagatgacccatactctgttcttccctgcaaagctggcaaggatgttgggagagctggaccccgaagggaaacgcaacattcttgaccgagctgaggacccctcatctctgatcatctcacgcggagagcccctggctgctggtctttgctcaggtctcacggcggccccattgatgtccgagcgggctggcggctctgttgggcgagctagtctcaacacgggcacactcctccttctctggagaggctgaaggtttggttcctccagagtggatctctcaattccgcgagacctcccagtgtgcctcagaaaccgagctggcctactgctgtccggagaaaccaaaggcactttccgtcctccgtggctgcctctaatagtggcatgggggtggggttctgatccacacactagccacatggccaacagcatagtgaaacggggtcccattctccatgtcattgtgtaatccaatggtggctcatagagatggaatgcagagggttgcaaaagaaatcagaagtttggttcccaggacagtttcctagatgaactacttttcctcccagccctctctctctttaccgagggtgagcaatacaaaaggggtgtgctgcagctccagctttcagagtaccgccacagatccacagcctgtcctgatctgagagctgagccgatgccttttctttctggctgtgtctttttaccttctggacaagtaggatgaggtgaaaggagctgtccttctaagtctttgtatctccatttgtctgcagtttctcctcggtctcgtgtgtctgtgtgtgccagtcccttgtgctgacacaggacgtcccttaaagtccagtcctggcgatttctgaatctcactctttccctctttaaagttccaggatccttcttatctccctttcccccatagtctggcttagtctctttgtttccgggcgtaaaagcactgggattaatatgttttccaggctgagggaaaacacaggaatgtgatgtcgaaaagggacnnnnnnnnnctttcactgtgcttctctcctcc

SEQ ID NO: 185418 - DNA, 3160 bp, Homo Sapiens
ctttgtacaaaaaagttggggcttccggagctttgagcggcagctaggggaggatggcggagtcttcggataagctctatcgagtcgagtacgccaagagcgggcgcgcctcttgcaagaaatgcagcgagagcatccccaaggactcgctccggatggccatcatggtgcagtcgcccatgtttgatggaaaagtcccacactggtaccacttctcctgcttctggaaggtgggccactccatccggcaccctgacgttgaggtggatgggttctctgagcttcggtgggatgaccagcagaaagtcaagaagacagcggaagctggaggagtgacaggcaaaggccaggatggaattggtagcaaggcagagaagactctgggtgactttgcagcagagtatgccaagtccaacagaagtacgtgcaaggggtgtatggagaagatagaaaagggccaggtgcgcctgtccaagaagatggtggacccggagaagccacagctaggcatgattgaccgctggtaccatccaggctgctttgtcaagaacagggaggagctgggtttccggcccgagtacagtgcgagtcagctcaagggcttcagcctccttgctacagaggataaagaagccctgaagaagcagctcccaggagtcaagagtgaaggaaagagaaaaggcgatgaggtggatggagtggatgaagtggcgaagaagaaatctaaaaaagaaaaagacaaggatagtaagcttgaaaaagccctaaaggctcagaacgacctgatctggaacatcaaggacgagctaaagaaagtgtgttcaactaatgacctgaaggagctactcatcttcaacaagcagcaagtgccttctggggagtcggcgatcttggaccgagtagctgatggcatggtgttcggtgccctccttccctgcgaggaatgctcgggtcagctggtcttcaagagcgatgcctattactgcactggggacgtcactgcctggaccaagtgtatggtcaagacacagacacccaaccggaaggagtgggtaaccccaaaggaattccgagaaatctcttacctcaagaaattgaaggttaaaaagcaggaccgtatattccccccagaaaccagcgcctccgtggcggccacgcctccgccctccacagcctcggctcctgctgctgtgaactcctctgcttcagcagataagccattatccaacatgaagatcctgactctcgggaagctgtcccggaacaaggatgaagtgaaggccatgattgagaaactcggggggaagttgacggggacggccaacaaggcttccctgtgcatcagcaccaaaaaggaggtggaaaagatgaataagaagatggaggaagtaaaggaagccaacatccgagttgtgtctgaggacttcctccaggacgtctccgcctccaccaagagccttcaggagttgttcttagcgcacatcttgtccccttggggggcagaggtgaaggcagagcctgttgaagttgtggccccaagagggaagtcaggggctgcgctctccaaaaaaagcaagggccaggtcaaggaggaaggtatcaacaaatctgaaaagagaatgaaattaactcttaaaggaggagcagctgtggatcctgattctggactggaacactctgcgcatgtcctggagaaaggtgggaaggtcttcagtgccacccttggcctggtggacatcgttaaaggaaccaactcctactacaagctgcagcttctggaggacgacaaggaaaacaggtattggatattcaggtcctggggccgtgtgggtacggtgatcggtagcaacaaactggaacagatgccgtccaaggaggatgccattgagcacttcatgaaattatatgaagaaaaaaccgggaacgcttggcactccaaaaatttcacgaagtatcccaaaaagttctaccccctggagattgactatggccaggatgaagaggcagtgaagaagctgacagtaaatcctggcaccaagtccaagctccccaagccagttcaggacctcatcaagatgatctttgatgtggaaagtatgaagaaagccatggtggagtatgagatcgaccttcagaagatgcccttggggaagctgagcaaaaggcagatccaggccgcatactccatcctcagtgaggtccagcaggcggtgtctcagggcagcagcgactctcagatcctggatctctcaaatcgcttttacaccctgatcccccacgactttgggatgaagaagcctccgctcctgaacaatgcagacagtgtgcaggccaaggcggaaatgcttgacaacctgctggacatcgaggtggcctacagtctgctcaggggagggtctgatgatagcagcaaggatcccatcgatgtcaactatgagaagctcaaaactgacattaaggtggttgacagagattctgaagaagccgagatcatcaggaagtatgttaagaacactcatgcaaccacacacaatgcgtatgacttggaagtcatcgatatctttaagatagagcgtgaaggcgaatgccagcgttacaagccctttaagcagcttcataaccgaagattgctgtggcacgggtccaggaccaccaactttgctgggatcctgtcccagggtcttcggatagccccgcctgaagcgcccgtgacaggctacatgtttggtaaagggatctatttcgctgacatggtctccaagagtgccaactactgccatacgtctcagggagacccaataggcttaatcctgttgggagaagttgcccttggaaacatgtatgaactgaagcacgcttcacatatcagcaagttacccaaggggcaagcacagtgtcaaaggtttgggcaaaactacccctgatccttcagctaacattagtctggatggtgtagacgttcctcttgggaccgggatttcatctggtgtgaatgacacctctctactatataacaagtacattgtctatgatattgctcaggtaaatctgaactatctgctgaaactgaaattctaattttaagacctccctgtggtaattgggagaggtagccgagtcacacccggtggctctggtatgaattcacccgaagcgcttc

SEQ ID NO: 185419 - DNA, 1035 bp, Homo Sapiens
  misc_feature (201)..(209): n is a, c, g, or t
  misc_feature (760)..(771): n is a, c, g, or t
caaaacaccaaatctatatttacacttccacatataataacataactttaagctgaaatatatcataaataaaacaagtaatgtctactgttcgacaacttaagtatcaacaattaaaataaatcaaactggaatgaaataaatacataaacaaaaatccaacgaattgtacctctattatatgtactgttgtctcaaagnnnnnnnnntataaaaccagtagtataccaatagttaatactgatggacacaaaaacatattttgaagtacaaagggctgtaggaaaataattggtatttttatacattcagaaatgaggttaaaaagagaaatctgaaagcccaaaaaattccagcataatacaaatcgacttgttttcaaatagatttggtgattcttttttttaaatacaggtttaaattccagccctctattatcacataccccctttaagatttatggttctagtcacagcaagctctctgtaacactcattggattaggcaaagattgagtcaatcatcttgcaaatgtgttaatcttcaaaaataggctataaaagtgcaaaactatgaaaacaaaatctagattatgtacatatggctcagcttgtgaacaggaaaaaaggtcaatagtgtacactttcctgatacaaagcacttcattgcaatgccaacagactgatctcaaatgagttctcccttgtaacacaggagctaagacttctatcaaggaggacatcttacgttgcataatttnnnnnnnnnnnnttttttctaggattacccttgctctatggagaacagcgaggccagaaaaatgaacagtgcaaatttatttttgaaacagtttcttaataaaatattttgtggtcactaagcccatgtactaataaactcagccatggacagcatattaaagaacaaaagtttaaaatatctaggaagccagctggtggccatcttctctaaaacccaaattgcatgtgcactgagaaaaatgttactgcttcaaaacaaccaaaaatgggccaa

SEQ ID NO: 185420 - DNA, 1879 bp, Homo Sapiens
  misc_feature (232)..(244): n is a, c, g, or t
  misc_feature (1150)..(1164): n is a, c, g, or t
  misc_feature (1715)..(1723): n is a, c, g, or t
tgtacaaagaagtggaatttttgcatacttgagcgctgctgaaaagaaatcatttgggttgggtggggcgggatgggggaaaagtatataatgcttgcacctcaggtaaaaatctgtaaatatctaagttgtaaacctgcttgttcaaatactgtgtgtattccttttctctaatgcagctcatcacttggagcagtttctgctattgtgctctttcatttaaaatgtatgnnnnnnnnnnnnnaaactgtcaatgattttgtattatgttgaatccacccaaatctattgttgtcttaaaattgttaatggaagtattgaccctctatgatatgtgctgcagatatcgaggtcagccattcggaagctggcagcattttatcgcaactttgagcatctcagatggggaaggcaccttcttcctcgcctctccagattgtcctggaacctccaggatccttgactgagggcgttgggatggcttgtaggatttttaagagagtgtgtctacagacaagcattttctctgtagagcagccacacgttgtataaacataaactgtatgtgcagttatttaaatttgtttctatcaaattaatcatttttgttggacgattcagtggcgggggggttttgcctaaattagtatataaaaacaaaaatgctaaattatatctgtgaattgcaggtattggggaacagttttaagggaaattttggggggaacattttaggtttgtatttggtagtcttaatgtatctggcatttgggtgaactgtggacatactagagttgattatagacacattgattttgaataaggaactgctggccgagcccgctgggagtctagaaagagaaaatctgtttctagacctcagttattttcccatttttggttgttttgaagcagtaacatttttctcagtgcacatgcaatttgggttttagagaagatggccaccagctggcttcctagatattttaaacttttgttctttaatatgctgtccatggctgagtttattagtacatgggcttagtgaccacaaaatattttattaagaaactgtttcaaaaataaatttgcactgttcatttttctggcctcgctgttctccatagagcaagggtaatcctagaaaaannnnnnnnnnnnnnnaaattatgcaacgtaagatgtcctccttgatagaagtcttagctcctgtgttacaagggagaactcatttgagatcagtctgttggcattgcaatgaagtgctttgtatcaggaaagtgtacactattgaccttttttcctgttcacaagctgagccatatgtacataatctagattttgttttcatagttttgcacttttatagcctatttttgaagattaacacatttgcaagatgattgactcaatctttgcctaatccaatgagtgttacagagagcttgctgtgactagaaccataaatcttaaagggggtatgtgataatagagggctggaatttaaacctgtatttaaaaaaaagaatcaccaaatctatttgaaaacaagtcgatttgtattatgctggaattttttgggctttcagatttctctttttaaccacatttctgaatgtataaaaataccaattattttcctacagccctttgtacttcaaaatatgtttttgtgtccatcagtattaactattggtatactactggttttatannnnnnnnnctttgagacaacagtacatataatagaggtacaattcgttggatttttgtttatgtatttatttcattccagtttgatttattttaattgttgatacttaagttgtcgaacagtagacattacttgttttatttatgatatatttcagcttaaagt

SEQ ID NO: 185421 - DNA, 1262 bp, Homo Sapiens
  misc_feature (149)..(161): n is a, c, g, or t
  misc_feature (1068)..(1081): n is a, c, g, or t
ttggataatgcttgcacctcaggtaaaaatctgtaaatatctaagttgtaaacctgcttgttcaaatactgtgtgtattccttttctctaatgcagctcatcacttggagcagtttctgctattgtgctctttcatttaaaatgtatgnnnnnnnnnnnnnaaactgtcaatgattttgtattatgttgaatccacccaaatctattgttgtcttaaaattgttaatggaagtattgaccctctatgatatgtgctgcagatatcgaggtcagccattcggaagctggcagcattttatcgcaactttgagcatctcagatggggaaggcaccttcttcctcgcctctccagattgtcctggaacctccaggatccttgactgagggcgttgggatggcttgtaggatttttaagagagtgtgtctacagacaagcattttctctgtagagcagccacacgttgtataaacataaactgtatgtgcagttatttaaatttgtttctgtcaaattaatcatttttgttggacgattcagtggcgggggggttttgcctaaattagtatataaaaacaaaaatgctaaattatatctgtgaattgcaggtattggggaacagttttaagggaaattttggggggaacattttaggtttgtatttggtagtcttaatgtatctggcatttgggtgaactgtggacatactagagttgattatagacacattgattttgaataaggaactgctggccgagcccgctgggagtctagaaagagaaaatctgtttctagacctcagttattttcccatttttggttgttttgaagcagtaacatttttctcagtgcacatgcaatttgggttttagagaagatggccaccagctggcttcctagatattttaaacttttgttctttaatatgctgtccatggctgagtttattagtacatgggcttagtgaccacaaaatattttattaagaaactgtttcaaaaataaatttgcactgttcatttttctggcctcgctgttctccatagagcaagggtaatcctagaaaaaannnnnnnnnnnnnnaaattatgcaacgtaagatgtcctccttgatagaagtcttagctcctgtgttacaaggggagaactcatttgagatcagtctgttggcattgcaatgaagtgctttgtatcacgaaagtgtacactattgaccttttttcctgttcacaagctgagccatatgtacataatctagattttg

SEQ ID NO: 185422 - DNA, 1328 bp, Homo Sapiens
ttgggtaggtggggttagggggggcgatcagggacaggcagccttctgctgaggacataggcagaagctcactcttttccagggacagaagtggtggtagatggaaggatccctggatgttccaaccccataaatctcacggctcttaagttcttcccaatgatctgaggtcatggaacttcaaaagtggcatgggcaatagtatataaccatacttttctaacaatccctggctgtctgtgagcagcacttgacagctctccctctgtgctgggctggtcgtgcagttactctgggctcccatttgttgcttctcaaaatatacctcttgcccagctgcctcttctgaaatccacttcacccactccactttcctccacagatgcctcttctgtgccttaagcagagtcaggagaccccaaggcatgtgagcatctgcccagcaacctgtggagacaacccacactgtgtctgagggtgaaaggacaccaggagtcacttctatacctccctaacctcacccctggaaagccaccagattggaggtcaccagcatgatgataatattcatgacctgatgtgggaggagacagccaacctcaggcttagatcaatgtatagggctatattttggcagctgggtagctctttgaaggtggataagacttcagaagaggaaaggccagactttgcttaccatcagcatctgcaatgggccaaacacacctcaaattggctgagttgagaaagcagccccagtagttccattcttgcccagcactttctgcattccaaacagcatcctacctgggtttttatccacaaaggtagcggccacatggtttttaaagtatgagaaacacagtttgtcctctccttttatccaagcaggaagattctatatcctgatggtagagacagactccaggcagccctggacttgctagcccaaagaaggaggatgtggttaatctgtttcacctggtttgtcctaaggccatagttaaaaagtaccagctctggctggggtccgtgaagcccaggccaggcagccaaatcttgcctgtgctgggcatacaaccctctgctttcacatctctgagctatatcctcattagtgaaggtggcttttgctttatagtttggctggggagcacttaattcttcccatttcaaaaggtaatgttgcctggggcttaacccacctgccctttgggcaaggttgggacaaagccatctgggcagtcaggggcaaggactgttggacgacagttagcccaattataggctctgcccagatgccatcacatccctgatactgtgaatgc

SEQ ID NO: 185423 - DNA, 2148 bp, Homo Sapiens
  misc_feature (1964)..(1996): n is a, c, g, or t
ttggatggaaactgatctcaattcccaggacagaaaggacctggacaagtttattaaattttttgccctcaagactgtccaagtgattgtccaggctcggcttggtgaaaagatttgcactcgttcatcatcttctccaacgggttcagattggttcaacttagcaatcaaagacatcccagaggttacacatgaagcaaagaaggcactggcaggacagctgcctgcagtcgggaggtccatgtgtgtggagatttcacttaagacttctgagggagattccatggagctggaaatatggtgtcttgaaatgaatgaaaagtgtgataaagaaatcaaagtttcctacacggtgtacaacagactgtcattgctgctgaagtcccttcttggctataactagggtgacaccagcctataggctctccaggaaacaagggcatgaatatgtcatattatacaggatatattttggagaagttcagctgagtggcttaggagaaggcttccagacagttcgtgttgggacagtgggcacccctgtgggcaccatcactctttcttgtgcttacagaattaacttggcattcatgtctaccaggcaatttgagaggaccccacctatcatggggattattattgatcactttgtggaccgtccctatcccagctcctctcccatgcacccctgcaattacagaactgctggtgaggacactggagtaatatacccgtctgtagaagactctcaagaagtgtgtaccacctctttttccacctccccaccatcccagctgatggttcctgggaaggaaggtggggtaccccttgctcccaaccagcctgtccatggtacccaggctgaccaggagagactggcaacctgcaccccttctgacagaacccactgtgctgccacaccctccagtagtgaggatactgaaaccgtatcaaacagcagtgagggacgggcctcccctcacgatgtcttggagaccatctttgtccgaaaagtgggggcttttgtcaacaaacccattaaccaggtgaccctgacgagtttggatataccctttgccatgtttgctcccaagaatttggagctggaggataccgatccaatggtgaatcctccagattccccagagactgaatctcctctccagggcagcctgcactcagatggctccagcgggggcagcagtggcaatacccatgatgactttgttatgatagactttaaaccagctttttctaaagatgacattcttccgatggacctggggaccttctatcgggagtttcagaacctacctcagctgagcagcctctccatagatattggagcacagtctatggctgaagacttggactcattaccagagaagctggctgtgcatgagaagaatgtccgcgagtttgatgcctttgtggaaaccctgcagtaaaagtatccttgagtcccagcagcaccccctttttgtgggccccagggcataagcagcctcccatgcatcagctgctcccacccctcatcctgctctgagccaggtggaagggaggctggcttctcccatggggacccagaagtccctactcttggacctcctggagactccgtggcggcagtcaagcccagtgcccagttggagaagactcacgtgctggccttggagatgggaagaaccttcgtacgaaaaagccctcagcagggccatctgtgtgccctgcccatcaccaactgcttcccaagggtgtcatcctgttcctcctgctgccggcctcctgcctgggcctgccttgcagctggccccttccctgcctgctgtcaccatccactgtttgacattccagctggtggccaagagattggtgtggaggcagaaagaggaaggagacagtgccaggaggaagaaggaaggagtcccttagctctcttcattgtcccctttacttcctgctannnnnnnnnnnnnnnnnnnnnnnnnnnnnnnnnatgcctgtatttctggcaatatgacaggcctgcctacccaagatcagaactccaaaaccactcccacccctgaaggtcgggagggtctgagcagccctggtggctgcctgtgctcaggtcctcagctccatgggaaataaaaatggcaccct

SEQ ID NO: 185424 - DNA, 1619 bp, Homo Sapiens
ttgggatagacttcaggtatctaccctgactacccgtgccaacctttggcttcttgggcccttctttttcgcgtcctccaaagaaagtttctctacaataattggagttggtgttggagctggagcctacatcctggcgagatatgctcttaaccacccggacactgttgaaggtcttgtcctcatcaacattgatcccaatgccaagggttggatggattgggcagcccacaagctaacaggcctcacctcttccattccggagatgatccttggacatcttttcagccaggaagagctctctggaaattctgagttgatacaaaagtacagaaatatcattacacatgcacccaacctggataacattgaattgtactggaacagctacaacaaccgccgagacctgaactttgagcgtggaggtgatatcaccctcaggtgtcctgtgatgctggtggtaggagaccaagcacctcatgaagatgcagtggtggaatgtaactcaaaactggaccccacccagacctcgttcctcaagatggctgactccggaggtcagccccagctgactcagccaggcaagctgaccgaggccttcaagtacttcctgcaaggcatgggctacatggcctcatcctgcatgactcgcctgtcccggtctcgtacagcctctctgaccagtgcagcatccgttgatggcaaccggtcccgctctcgcaccctgtcccagagcagcgagtctggaactctttcttcggggcccccggggcacaccatggaggtctcctgttgaatggcccttgttgccctagagtgggacccagccctcacctcccccagagctaacctgggaggtgctgaaggggcattgggccaccgtaagcaagggaaaaagggcagatcatgcggggagatgaccttgatctttgattgctaccctaaccttgacctttaacccgtgattccccccagctcctggaagagatgtcctaatatctcttagggacccagacccctaaattctcctcctcccccattttgatgttaaggtggagagggcatatgcatcctctgtcctgatctaggtgtctatagctgaggggtaagaggttgttgtagttgtcctggtgcctccatcagactctccctacttgtcccatatttgcaaggggaggggatttggggctggggctccattcaccaaagctgaggtggcttctcattaaccctttaggactctgaagggtatggacctacgtgaatgtgtgtcagggggagacttgctggtgggttagtggtcctcaggatgtgatagaaacatccagtgtaaaaaggaagttggaatgggagttggcgggcagtgaacgagtgtggggaaggattggtgctggggcaacaggaaggggcctggggccgtttggctgcactaactttggtagctcagtgtgcatctagagtgggactggggagggagctaagcttgggctgggctgcttggggcttggcatagggtggaaagggctaccctggggctctgaccacactgtagtatgtgtggagggtgccctcccgtctcccacaacttctgctataacaataaactgtagaggaatctg

SEQ ID NO: 185425 - DNA, 2237 bp, Homo Sapiens
  misc_feature (219)..(247): n is a, c, g, or t
ttggcggaaactcaaaatggagatgtatctgaagaaacaatgggaagtagaaaggttaaaaaatcaaaacaaaagcccatgaatgtgggcttatcagaaactcaaaatggaggcatgtctcaagaagcagtgggaaatataaaagttacaaagtctccccagaaatccactgtattaaccaatggagaagcagcaatgcagtcttccaattcagaatcnnnnnnnnnnnnnnnnnnnnnnnnnnnnntggtgaatgatgctgagcctgatacgaaaaaagcaaaaactgaaaacaaagggaaatctgaagaagaaagtgccgagactactaaagaaacagaaaataatgtggagaagccagataatgatgaagatgagagtgaggtgcccagtctgcccctgggactgacaggagcttttgaggatacttcgtttgcttctctatgtaatcttgtcaatgaaaacactctgaaggcaataaaagaaatgggttttacaaacatgactgaaattcagcataaaagtatcagaccacttctggaaggcagggatcttctagcagctgcaaaaacaggcagtggtaaaaccctggcttttctcatccctgcagttgaactcattgttaagttaaggttcatgcccaggaatggaacaggagtccttattctctcacctactagagaactagccatgcaaacctttggtgttcttaaggagctgatgactcaccacgtgcatacctatggcttgataatgggtggcagtaacagatctgctgaagcacagaaacttggtaatgggatcaacatcattgtggccacaccaggccgtctgctggaccatatgcagaataccccaggatttatgtataaaaacctgcagtgtctggttattgatgaagctgatcgtatcttggatgtggggtttgaagaggaattaaagcaaattattaaacttttgccaacacgtagacagactatgctcttttctgccacccaaactcgaaaagttgaagacctggcaaggatttctctgaaaaaggagccattgtatgttggcgttgatgatgataaagcgaatgcaacagtggatggtcttgaacagggatatgttgtttgtccttctgaaaagagattccttctgctctttacattccttaagaagaaccgaaagaagaagcttatggtcttcttttcatcttgtatgtctgtgaaataccactatgagttgctgaactacattgatttgcccgtcttggccattcatggaaagcaaaagcaaaataagcgtacaaccacattcttccagttctgcaatgcagattcgggaacactattgtgtacggatgtggcagcgagaggactagacattcctgaagtcgactggattgttcagtatgaccctccggatgaccctaaggaatatattcatcgtgtgggtagaacagccagaggcctaaatgggagagggcatgccttgctcattttgcgcccagaagaattgggttttcttcgctacttgaaacaatccaaggttccattaagtgaatttgacttttcctggtctaaaatttctgacattcagtctcagcttgagaaattgattgaaaagaattactttcttcataagtcagcccaggaagcatataagtcatacatacgagcctatgattcccattctctgaaacagatctttaatgttaataacctaaatttgcctcaggttgctctgtcatttggtttcaaggtgcctcccttcgttgatctgaacgtcaacagtaatgaaggcaagcagaaaaagcgaggaggtggtggtggatttggctaccagaaaaccaagaaagttgagaaatccaaaatctttaaacacattagcaagaaatcatctgacagcaggcagttctctcactgaacacatgccttcctttcatcttgaataactttgtcctaaaatgaattttttttccccttgatttaacaggatttttgtagactttagaatttggacttacctaacaagagtataaattgacttgggttgcaagcactgagcactgttacttctatcacgtctctcttttatttctgggatataaaacagctttaagtttcttggttgcccacgggcagagcacggaatatctggtgtttcttgtgatgataatattttaattttaaatatccctccctcataccagtgtatgttaccattttaatataattctttttgtatccttt

SEQ ID NO: 185426 - DNA, 595 bp, Homo Sapiens
  misc_feature (470)..(488): n is a, c, g, or t
aaaaaagttggctcctctcgcaatctgcagccatgatggaagtttgagagttgagccgctgtgaggcgaggccgggctcaggcgagggagatgagagacggcggcggccgcggcccggagcccctctcagcgcctgtgagcagccgcgggggcagcgccctcggggagccggccggcctgcggcggcggcagcggcggcgtttctcgcctcctcttcgtcttttctaaccgtgcagcctcttcctcggcttctcctgaaagggaaggtggaagccgtgggctcgggcgggagccggctgaggcgcggcggcggcggcggcacctcccgctcctggagcgggggggagaagcggcggcggcggtggccgcggcggctgcagctccagggagggggtctgagtcgcctgtcaccatttccagggctgggaacgccggagagttggtctctccccttctactgcctccaacannnnnnnnnnnnnnnnnnnacatccagggacccgggccggttttaaacctcccgtccgccgccgccgcaccccccgtggcccggactccggaggccgccggcggaggcagccgtttcagaggatta

SEQ ID NO: 185427 - DNA, 914 bp, Homo Sapiens
  misc_feature (615)..(660): n is a, c, g, or t
ttggtcagaagtgtaaaaatattgcacattgacaaataccaagaatttttgcgtatgtttatattgtattgttctaaataatgggtagcctgtgaaataagatcttgccacccatgtaataatagtagtaatactatagttaaaatggctgtaagaatagttttataaaagtgaatacacagatctattgtatttgaaacataactttgacaattattagtgtgaccaaagtattaggcggttttcatacatttttcaccttgtacaaaattatgaattcatttttcctccaggccgacaaggagttgtagaatgaaaatgccctctaagtgttattttggttgttctaacttacaaaagtgattttgaataagaaatatttggtgttctttttataaccagtttttgattggtaattgttttctgtattgtttaaaacggatcaaaaatgtaagtctattggtagagattaagtatttattgctacatcatagttgataaattgatgttatcgtaaagccatatgttctgttcaagtcttgtttgcttgaaatgattattcctacaagtgaaacactagactatttggagtgtatatggcttgtgttttgggannnnnnnnnnnnnnnnnnnnnnnnnnnnnnnnnnnnnnnnnnnnnncgtttggtagttcatctgccttttaacccattcaccaaaatttaccttgttaacaagcatcaccaatgaacatttcagagcaatctgcatatttaacagacctaaaataaattctattaggcaagtcagttgaaaatgctccgtgctgctaatggaattagagtgcgttcattttacaggctagtattttaaaaatagaaatcaaaatctggcaccgaagcatgctaattgtttactgtaccttgtgaaggttt

SEQ ID NO: 185428 - DNA, 1929 bp, Homo Sapiens
  misc_feature (1739)..(1781): n is a, c, g, or t
ttggattttattgaccagtttggcttcaacgatgagaagtttgcagatcaagatgacattggcaatgtttcttttgatcgagtatcagacatcaactttactctcaatacaaatgaaagtggaaatattgccttgtttgaagcatgttgtaaggaaagaatacaacagtttgatgatggtggctctgatgaggaagatatatgggaggaaaagcacatcgcattcacaccagaatcccaaagacgatccagctcggggagtacagacagtgaggaaagtacagactctgaagaagaagatggagcaaagcaagacttgtttgaacccagcagtgccaacacggaggataaaatggaggtggacctgagtgaaccacccaactggtcagctaactttgatgtcccaatggaaacaacccacggtgctccattggattctgtgggatctgatgtctggagcacagaggagccgatgccaactaaagagacgggctgggcttctttttcagagttcacgtcttccctgagcacaaaagattctttaaggagtaattctccagtggaaatggaaaccagcactgaacccatggaccctctgactcccagtgcggctgccctggcagtgcagccagaagcggcaggcagtgtggccatggaagccagctctgacggagaggaggatgcagaaagtacagacaaggtaactgagacagtgatgaatggcggcatgaaggaaacgctcagcctcactgtagatgccaagacagagactgcggtcttcaaaagtgaggaagggaaactgtctacctctcaagatgctgcttgtaaagacgcagaggagtgtcccgagactgcagaggcgaagtgcgcggcgcccaggcctcccagcagcagtcccgagcagaggactggccaaccaagcgcaccaggtgacacttcagtgaatggccctgtatgacgggtgacgtctgctgctgctgactgaggactgcagaccgccaccactcaggggctctggaggggtcagctggagcccaccaagctgtcactgctgcactcactctgcaagggatcaggaccagcaacctttatattctagattctaagacattgtacagagaaattcagaagtgtaaaaatattgcacattgacaaataccaagaatttttgcgtatgtttatattgtattgttctaaataatgggtagcctgtgaaataagatcttgccacccatgtaataatagtagtaatactatagttaaaatggctgtaagaatagttttataaaagtgaatacacagatctattgtatttgaaacataactttgacaattattagtgtgaccaaagtattaggcggttttcatacatttttcaccttgtacaaaattatgaattcatttttcctccaggccgacaaggagttgtagaatgaaaatgccctctaagtgttattttggttgttctaacttacaaaagtgattttgaataagaaatatttggtgttctttttataaccagtttttgattggtaattgttttctgtattgtttaaaacggatcaaaaatgtaagtctattggtagagattaagtaaagtatttattgctacatcatagttgataaattgatgttatcgtaaagccatatgttctgttcaagtcttgtttgcttgaaatgattattcctacaagtgaaacactagactatttggagtgtatatggcttgtgttttgggannnnnnnnnnnnnnnnnnnnnnnnnnnnnnnnnnnnnnnnnnngtttcatttggtagatcatctgccttttaacccattcaccaaaatttaccttgttaacaggcatcaccaatgaacatttcagagcaatctgcatatttacagacctaaaataaatcctatttgccagtcagttgaaaaatgctcgtgc

SEQ ID NO: 185429 - DNA, 1770 bp, Homo Sapiens
  misc_feature (205)..(245): n is a, c, g, or t
ttggagcggcttctgctcaatggcggaaaagccgccggtgctctgacggcctcgttcccctagcagttgcgggggagtttcctgccggcgcggctggagtctctgattctcagggttcggtggttggaagatgctccagagagacgaggctgcggcggaggaggtggcggcggccgaatcggcaacggcgctagggtggagagannnnnnnnnnnnnnnnnnnnnnnnnnnnnnnnnnnnnnnnntgtaaacagccccggaggcggcggaggcggcggtcgagaccccgagggggaagcggcggctgagtcagggtcgcgcctccgttggaaacttgggctgagtaccgcggcgggcgcgagcgaggcgccctagacatcttctccctcccttgcctcagatttattgctaaacatgggtgcatttttggataaacccaaaactgaaaaacataatgctcatggtgctgggaatggtttacgttatggcctgagcagcatgcaaggatggagagtggaaatggaagatgcacacacagctgttgtaggtattcctcacggcttggaagactggtcattttttgcagtttatgatggtcatgctggatcccgagtggcaaattactgctcaacacatttattagaacacatcactactaacgaagactttagggcagctggaaaatcaggatctgctcttgagctttcagtggaaaatgttaagaatggtatcagaactggatttttgaaaattgatgaatacatgcgtaacttttcagacctcagaaacgggatggacaggagtggttcaactgcagtgggagttatgatttcacctaagcatatctactttatcaactgtggtgattcacgtgctgttctgtataggaatggacaagtctgcttttctacccaggatcacaaaccttgcaatccaagggaaaaggagcgaatccaaaatgcaggaggcagcgtgatgatacaacgtgttaatggttcattagcagtatctcgtgctctgggggactatgattacaagtgtgttgatggcaagggcccaacagaacaacttgtttctccagagcctgaggtttatgaaattttaagagcagaagaggatgaatttatcatcttggcttgtgatgggatctgggatgttatgagtaatgaggagctctgtgaatatgttaaatctaggcttgaggtatctgatgacctggaaaatgtgtgcaattgggtagtggacacttgtttacacaagggaagtcgagataacatgagtattgtactagtttgcttttcaaatgctcccaaggtctcagatgaagcggtgaaaaaagattcagagttggataagcacttggaatcacgggttgaagagattatggagaagtctggcgaggaaggaatgcctgatcttgcccatgtcatgcgcatcttgtctgcagaaaatatcccaaatttgcctcctgggggaggtcttgctggcaagcgtaatgttattgaagctgtttatagtagactgaatccacatagagaaagtgatgggggtgctggagatctagaagacccatggtagccttaaaaaccttctaaaatgcttttgattctgaaaattgggggaaaaaacttttaatcacaattttcttcaatacaacgggaaaatattcttgcggattcccaacgttttgtgatatgagcagaaaatcattagcatttcccatcatttgttcatatttgtgttttctgacagttgccacttgtagcattg

SEQ ID NO: 185430 - DNA, 2199 bp, Homo Sapiens
  misc_feature (186)..(226): n is a, c, g, or t
ttggcggaaaagccgccggtgctctgacggcctcgttcccctagcagttgcgggggagtttcctgccggcgcggctggagtctctgattctcagggttcggtggttggaagatgctccagagagacgaggctgcggcggaggaggtggcggcggccgaatcggcaacggcgctagggtggagagannnnnnnnnnnnnnnnnnnnnnnnnnnnnnnnnnnnnnnnntgtaaacagccccggaggcggcggaggcggcggtcgagaccccgagggggaagcggcggctgagtcagggtcgcgcctccgttggcttgggctgagtaccgcggcgggcgcgagcgaggcgccctagacatcttctccctcccttgcctcagatttattgctaaacatgggtgcatttttggataaacccaaaactgaaaaacataatgctcatggtgctgggaatggtttacgttatggcctgagcagcatgcaaggatggagagtggaaatggaagatgcacacacagctgttgtaggtattcctcacggcttggaagactggtcattttttgcagtttatgatggtcatgctggatcccgagtggcaaattactgctcaacacatttattagaacacatcactactaacgaagactttagggcagctggaaaatcaggatctgctcttgagctttcagtggaaaatgttaagaatggtatcagaactggatttttgaaaattgatgaatacatgcgtaacttttcagacctcagaaacgggatggacaggagtggttcaactgcagtgggagttatgatttcacctaagcatatctactttatcaactgtggtgattcacgtgctgttctgtataggaatggacaagtctgcttttctacccaggatcacaaaccttgcaatccaagggaaaaggagcgaatccaaaatgcaggaggcagcgtgatgatacaacgtgttaatggttcattagcagtatctcgtgctctgggggactatgattacaagtgtgttgatggcaagggcccaacagaacaacttgtttctccagagcctgaggtttatgaaattttaagagcagaagaggatgaatttatcatcttggcttgtgatgggatctgggatgttatgagtaatgaggagctctgtgaatatgttaaatctaggcttgaggtatctgatgacctggaaaatgtgtgcaattgggtagtggacacttgtttacacaagggaagtcgagataacatgagtattgtactagtttgcttttcaaatgctcccaaggtctcagatgaagcggtgaaaaaagattcagagttggataagcacttggaatcacgggttgaagagattatggagaagtctggcgaggaaggaatgcctgatcttgcccatgtcatgcgcatcttgtctgcagaaaatatcccaaatttgcctcctgggggaggtcttgctggcaagcgtaatgttattgaagctgtttatagtagactgaatccacatagagaaagtgatggggcctccgatgaagcagaggaaagtggatcacagggaaaattggtggaagctctcaggcaaatgagaattaatcataggggaaactaccgacaacttctggaggagatgctgactagttacaggctagctaaagtagagggagaagaaagccctgctgaaccagctgccacagctacttcttcgaacagtgatgctggaaacccagtgacaatgcaggaaagccatactgaatcagaaagtggtcttgctgaattagacagctctaatgaagatgcagggacaaagatgagtggtgaaaaaatatgactttcctttttggtaatacttttgtgatctttgatggtttttaacctaggaagtgtaatgtatgcatttatataactgttttgttatttgaatcttggaaaactagttttattatattcagatagccttgttttttaaaaaggcctttgcatacacctttatgagatagtgtaaaattgactatttatagtactatggatttaatgaaattatatgtcatttcacattgtatgccagaaattaagctaccaattatgaattaaagtcagtagttaaattaatactagatagaattagaaattttgattagagagattatgctatattatggaaaaccttgttaatgtagaattatactgcttcatat

SEQ ID NO: 185431 - DNA, 1105 bp, Homo Sapiens
  misc_feature (407)..(546): n is a, c, g, or t
ttggcttaaagcaagtttacaagtaattaaaatggacagtttgccattaaagatttttaatagtggttttgcagtgtactggcttgaattttctggacttgagttaactgaaggagagcctcaaactatagtaacttcatttttaaaagttactagaatttggtatcctgatttatattgcagtgtttcaaaggtgtcactgtcagacaaatagaaacactgccaacttggtgtaacttaagctttcatttaactaaaacattcttttcttgcaaaacttatttttcatgatcatttttggttatttattatacttgattccaaaatagtacagccttgaatctataaaactgtgcagtcattatgccagaaattatcttaaatatataatgggtcaccttgctgtnnnnnnnnnnnnnnnnnnnnnnnnnnnnnnnnnnnnnnnnnnnnnnnnnnnnnnnnnnnnnnnnnnnnnnnnnnnnnnnnnnnnnnnnnnnnnnnnnnnnnnnnnnnnnnnnnnnnnnnnnnnnnnnnnnnnnnnnnnnngtttaaatgaaaatggatataaggtatgtataactgggggtggggtgagggtaggaggcatttacaactcagattttatttattttgaaattatcaattgtataaatctaatttattaccaaatagggtcttttaaaaaatatttttatcgttgaaaccttgacaggtacttcatattcttctaataatttaaacagtccaataatgtggtatacactttgacatccaagaactcaccaagatgtttttcagagatttattctcgatttaactatcatagcatttaatgaatctgatttgtagttcaataaattgtgggttgaactacttatccctgtgtgaacattgaattactttctgtcactgaaactgaggtatttgggtgtggtaagtacttcgaaaattgtaatactgtttgggcattgtctaaattattaaaggttaaaatagaaaataaagtcagaatttttcttttccattccaaggtgtacttaaagatctctattagtatcctttcgagatgacatagcagctcatatcagggttgtttattggatta

SEQ ID NO: 185432 - DNA, 2188 bp, Homo Sapiens
ttggaaaatgccaccagatggcgggttaggattgcagctccgttgaaggcgcggcccccgctcccgaacccccggcgaccaccccgtaacaacccccccacatcgggaataacacaccggagacttttggggggaaactaggtcgatggtcggcggcgcccggatgggcagctgaggattgcctttgaggttattttaaaagttttgagttgtacagcacttgattattttgctgcattgtgaaaggacctctccagcaatgattacttcagaattaccagtgttacaggattcaactaatgaaactactgcccattccgatgctggcagcgagcttgaagaaacagaggtcaaaggaaaaagaaaaaggggtcgtcctggccggcctccatctacaaataagaaacctcgaaaatctccaggtgagaagagcagaattgaagctggaattagaggagcaggccgtggaagagctaatggacaccctcaacagaatggggaaggggagcctgtcacattatttgaggtggtgaaactggggaaaagtgcaatgcagtccgtggtggatgactggattgaatcatataaacaagacagggacatcgcacttctggatttaatcaacttttttatccagtgttcaggatgtcgaggtactgtgagaatagagatgtttcgaaatatgcagaatgcagaaatcatcagaaaaatgactgaagaatttgatgaggacagtggtgattatcctcttaccatgcctggacctcagtggaaaaaatttcgttcaaacttttgtgaatttattggagtcctgattcgacagtgtcagtatagcataatttatgatgagtatatgatggacacagtaatctcccttttgacgggtttgtcagactcccaggtcagagcttttaggcatacaagtaccctggctgccatgaagctcatgactgctctggtgaatgttgccttaaacctcagtattcatcaggataatacccagagacaatatgaagccgagagaaataaaatgattgggaagagagccaatgaaaggttggagttactacttcagaaacgcaaagagctgcaagaaaatcaggatgaaatcgaaaatatgatgaactctatttttaagggtatatttgttcatagataccgtgatgctattgctgagattagagccatttgtattgaagaaattggagtatggatgaaaatgtatagtgatgccttcctaaatgacagttacctaaaatatgttggctggactcttcatgacaggcaaggggaagtcaggctgaagtgtttgaaagctctgcagagtctatataccaatagagaattattccccaaattggaactattcactaaccgattcaaggatcgcattgtatcaatgacacttgataaagaatatgatgttgctgtggaagctattcgattggttactctgatacttcatggaagtgaagaagctctttccaatgaagactgtgaaaatgtttaccacttggtgtactcggcacatcgccctgttgctgtggcagctggagagttccttcacaaaaagctatttagcagacatgacccacaagcagaagaagcattagcaaagaggaggggaagaaacagcccgaatggaaacctcattaggatgctggttcttttctttcttgaaagtgagttacatgaacatgcagcctacttggtggacagtttatgggagagctctcaagaactgttgaaagactgggaatgtatgacagagttgctattagaagaacctgttcaaggagaggaagcaatgtctgatcgtcaagagagtgctcttatagagctaatggtttgtacaattcgtcaagctgctgaggcacatcctccagtgggaaggggtaccggcaagagagtgctaactgccaaagaaaggaaaactcaaattgatgatagaaacaaattgactgaacattttattattacacttcctatgttactgtcaaagtattctgcagatgcagagaaggtagcaaacttgctacaaatcccacagtattttgatttagaaatctacagcacaggtagaatgggaaaagcatctggatgctttattaaacagattaaggtttgttgtggagaaacacgtagaatcagatgttctaggaagcctgcagtaaaacctatagtatct

SEQ ID NO: 185433 - DNA, 986 bp, Homo Sapiens
actttgtacaaaaaagttggcgcccagcgtgcgcgggtatctctgaagttggggtttaagattcttgcccgtgagagcgaacgagcctgccgtacttctgattttgaaacacctgggtctgggcttcccgggcgagcggtggaacctgtgagaagtttctacaatggtgggctcagctctcaggagaggtgcccatgcatatgtctacctggtgagtaaggccagtcacatctccagaggccatcagcaccaggcctggggatcgaggcctcctgcagcagagtgtgccacccaaagagctccaggcagtgtggtggagctgctgggcaaatcctaccctcaggacgaccacagcaacctcacccggaaggtcctcaccagagttggcaggaacctgcacaaccagcagcatcaccctctgtggctgatcaaggagagggtgaaggagcacttctacaagcagtatgtgggccgctttgggaccccgttgttctcggtctacgacaacctttctccagtggtcacgacctggcagaactttgacagcctgctcatcccagctgatcaccccagcaggaagaagggggacaactattacctgaatcggactcacatgctgagagcgcacacgtctgcacaccagtgggacttgctgcacgcgggactggatgccttcctggtggtgggtgatgtctacaggcgtgaccagatcgactcccagcactaccctattttccaccagctggaggccgtgcggctcttctccaagcatgagagctggagataagatgggtagactgctacttcccttttacacatccttcctttgagatggagatcaactttcatggagaatggctggaagttcttggctgcggggtgatggaacaacaactggtcaattcagctggtgctcaagaccgaatcggctgggcttttggcctaggattagaaaggctagccatgatcctctacgacatccctga

SEQ ID NO: 185434 - DNA, 1456 bp, Homo Sapiens
  misc_feature (166)..(216): n is a, c, g, or t
gggcagccaggtacaagggctcctctgctgagtgcatgggcctggcaagcattcggctcacacacctggtttccaaataagcacgcactgcgacctgtccacgggccctctagaagaggccagggaaaacaggaccctgaggcctaagaaagctgttcccgtgctnnnnnnnnnnnnnnnnnnnnnnnnnnnnnnnnnnnnnnnnnnnnnnnnnnngaatgtgtgacttgtagggtaggggacgctacttctctcccatccagttcatttttaaataaaagtagtaaagttttaaagctgtatgagaaagagagaggcagggcagggccaggtggccgcactgcaagtctgaaatcttcatgggggtcagtagaaaccaagcgcgacccctcttccctcatggacaccgggctcccgtctcctgctgaattcaactcttctgatgctgagggacaggacagcaggcaggaggcggcgcctcgccctaaagggtgctcaggcgtgtatcagtagtaaggtggactatgcatccaagttctggtacaaaggtctccggaatgtgtctcagacaagccttcagagcctcagaatcaggaaaattagtaataggacctggttcttcctggggtaatcctgatttcaaaaaccatcagcccacgcctcagattttagctttggaaaatatggtgaccagaattgtatatggaaacagtcagcaaaagatgtggataacctaccaagcgtttcttactggttgtgatgtgaccaacacattacaccctttaaacctctagcactgtgtctttgactaaatgaccttttttaaatgggggaaagaaaatcagtgacacctgtcagaagtcaaaatagtcaggtagccctgtacacacagccacaaccagaagcggagaaacaaggccacactattgctcagatcacatcttcctgttgggtggcacccctgcccagctgagatcctgaatgggtcccgagggagtgccgggaccctgtgcagtccatcttagcacctgcttctggcaagaaagaggctggtcttctggacacaccgggtggggagacagaacacttgaggtcaagtcctgaggcagagtggccagccctctctgcccatccccacctctgaatcacccctcactggtctgagctgtgttcagggtgctgcaaggactgggatcgccagtgcctcagatgtttgtacccggaggctgcaccatggcgaatcctgcacctgcctcggtgtggggcctgggaataaagtcagggttaggagtgaggcgatcttgcactcgagtgtcgtgggtgggggtgcagcaggatgcaggtagggcacctccaggaccatgttcccatccaggacatctctgcccattcctatgcagcatcctgcaggacaggaccccagggctctttaaggaaagggctgtgtccgtcccaa

SEQ ID NO: 185435 - DNA, 1615 bp, Homo Sapiens
  misc_feature (1135)..(1155): n is a, c, g, or t
ttggctcgcctgcagctccgccatggctcctaaaggcagctccaaacagcagtctgaggaggacctgctcctgcaggatttcagccgcaatctctcggccaagtcctccgcgctcttcttcggaaacgcgttcatcgtgtctgccatccccatctggttatactggcgaatatggcatatggatcttattcagtctgctgttttgtatagtgtgatgaccctagtaagcacatatttggtagcctttgcatacaagaatgtgaaatttgttctcaagcacaaagtagcacagaagagggaggatgctgtttccaaagaagtgactcgaaaactttctgaagctgataatagaaagatgtctcggaaggagaaagatgaaagaatcttgtggaagaagaatgaagttgctgattatgaagctacaacattttccatcttctataacaacactctgttcctggtcgtggtcattgttgcttccttcttcatattgaagaacttcaaccccacagtgaactacatattgtccataagtgcttcatcaggactcatcgccctcctgtctactggctccaaatagaccatgtcagcttcaccccctggctttgtgtctatgggtggcctgtggtatatggaaaagtagcagggtggtcagggtgggagacacaagatgtttttatagtctagagcctttaaaaaacccagcagaatgtaattcagtatttgtttattggctgttttttgacagattgttgaaattaaatgaattgaaagggaaactcagagtactaggacgtttattaaaaggaaaaaatgtcttgcaatgtgctgtaatcacaagaggagaaaataacttgtttccttgatctgtcagaggtcacagtaacctgggccgagctgttattatttattatataatagtagtaggaagttaataactggttctctgtgttccaagcacaatattacaacttcttttgaaccgtaaatatcagaatgaatcctcttcccaggggattgaacagaagcttaatgtttacaagtgtttgaatttgtgatctgaaataacacaaaattaaaaacatgatttctctaattttccaactagaggaagagaaacttgtggaaaagttcnnnnnnnnnnnnnnnnnnnnncttaaagaagggcagccaaggtagtaacctaaaaatagtgcccaggcatatgagagttgtcctacgaggttaaagaacacactgttccactgtatggctttggccctgagtggccagggaggtcaacttgaccctgccatgttggtttgacttactaagacacaggaatcactgttttccttgaccagggtctcacaccctggaggaatgttaagtaagagaaagaacctctttcctgaatattgacatgtaaaagaccaaagtaatttttctgaacttctgcaattctgagaactctccaaggaatttacagtgattttagtgcttgtcagcatttttccatgaggactttcatacatttgactctttagttcacaggttcccattgattgtgagaagatatttatctctttagcccttggggatccagctgagagcaatctcttgcatttttttaccc

SEQ ID NO: 185436 - DNA, 927 bp, Homo Sapiens
ttggcacaaagttggcaacattattgatacaatgattacagatgctttcctcaaagcagatgactacatagagattacaggtgctggaggaaaaaagtatcgcatttctacagcaattgacgacatggaagcctatactaagctgacagataacatttttctggagattttatactctactgatcccaaattgaaagacgcacgagagattttaaaacaaattgaataccgtaatctattcaagtatgtgggtgagacgcagccaacaggacaaataaagattaaaagggaggactatgaatctcttccaaaagaggttgccagtgctaaacccaaagtattgctagacgtgaaactgaaggctgaagattttatagtggatgttatcaacatggattatggaatgcaagaaaagaatccaattgatcatgttagcttctattgtaagactgcccccaacagagcaatcaggattactaaaaaccaggtttcacaacttctgccagagaaatttgcagagcagctgattcgagtatattgtaagaaggtggacagaaagagtttgtatgccgcaagacaatattttgttcagtggtgtgcagacagaaatttcaccaagccgcaggatggcgatgttatagccccactcataacacctcaaaaaaaggaatggaacgacagtacttcagtccaaaatccaactcgcctccgaaaagcatccaaaagcagagtccagctttttaaagatgacccaatgtgaatgtctgtagtcagttgtttacaaactccctctcctgcacaattcatttagaggcttcaatcatagaattctgcaaattaatgacaactcatgctttaattttgtattttgaatgtacacgcatgctgaagctaagtaacttttaatcaaagaaataagatggtatt

SEQ ID NO: 185437 - DNA, 1782 bp, Homo Sapiens
aaaatgtttctatagcccaaatgacattgataaaacagtgatcttacacaaagttaagcctgtttctttattattagacgttttcagatactttcccagtgcatagtgtgaatctccacaaagcaaagtgaaacatgaatagctcccctaaacttacttgaccacagaatgcttcattctatctccatggaaaccacttgtgaaagtctctactccaactttcttctccaacaaaactcacctgtttgtgatcatctgaactcattttgtgctcttgcctttatataaaagagaagttctgtgaaatgttgaagaagcagggttatggcactagtaatgatccaggcactatacaaattgttaaaattttccattattttagttcagaagccctaaccataggtattctaacagtggattgtggaacccagtatgagtgtttgagacatgttacaaaatataggagctatttttaaaatgaatccatttaataatactgctagatgctgtgagagacagggactccccggcccagcacacacgcttgagcaggaatggagacatgggcatgggtaggcaggctggtggtcagcagataccctttctgtccctcctctgtgacaatcacccccaagtaatttttgggattcagaataaggcagctgctctcccatcctggttactatgagtcgctcttggcagaaaggaccacagatggagagcttggcactcgctccaactttgccgaaaagaggacaaccaccaaagtagtaggtaaaaacacaattttagcagcagtgaaataaaaagaggaagtgaggatggggccaggccgcaactataattaaactgtctgtttaggagaagctgaatccagaagaaacacaagctgtaaagtgagagaggacagggagcagggcctttggagagcaggagaggacaggctgtcaccaagcgctgctcggactctgccctgaaagatttgaattggacactgtccagtcacgtgtgtggcaaaccgtactccaagcacttttctcacggcagaggaaggagctgccatggctgtacccctgaacgtttgtggggccagcgatgtgcgctgggcctctgtaatggaggacctccagtgtgcagacaaggcgccggcagtgcccacggagggctgcgtcctgggtcctgggtgaaagtcacagctgctgaggaagcgagagctccatctggataccagagacccctgggccatcagtgcagcaggaaccaccatgtgagagccgcggccaggcagccccacgtcacgcggcctgctccaggcagccccatgtcagggggtcgagtccccccaccgcacaaggcctgctatgggctgccccatgtcagggggtcgagtccccccacatcatgaggcctgctccaggcagctgtgctcttcttcttccgtctgtaaccagctccagtctagggcctgaaagtcaacagacatgttaaaaaaacaacagccaccaacacatttcaggttatttttcctcttcaggaggaaatcaggacaattgagaaatatactaaaacccagccaggcacagtggctcatgcctataatcccaacactttgaacttaatttgtcctatatcttcagtccatttatatcctatcaagcacaatgaaatcttcaaactggagtaatggctaactattatcatttctggtacagtgagcaatgctgttttgttctgctgctcttcattctcatttctcctttgtaatttttctcttaaatgtaa

SEQ ID NO: 185438 - DNA, 1242 bp, Homo Sapiens
atatttgacctcaagtctagacagaacttctttgtatattttagagaggagcaagcaagggagctgtacaggagactaagggaaaaacctcgagaccagcgaactgagggtgacagtcaggaaatggtacggctgctgcttcaggcaattcagagcttcgagaagaaagtgcgagtgatctatacgcagctcagtaaaactgtggtttgcaagcagaaggcgctggaactgttgcccaaggtggaagaggtggtgagcttaatgaatgaggatgagaagactgttgtccggctgcaggagaagcggcagaaggagctctggaatctcctgaagattgcttgtagcaaggtccgtggtcctgtcagtggaagcccggatagcatgaatgcctctcgacttagccagcctgggcagctgatgtctcagccctccacggcctccaacagcttacctgagccagccaagaagagtgaagaactggtggctgaagcacataacctctgcaccctgctagaaaatgccatacaggacactgtgagggaacaagaccagagtttcacggccctagactggagctggttacagacggaagaagaagagcacagctgcctggagcaggcctcatgatgtggggggactcgaccccctgacatggggcagcccatagcaggccttgtgcggtggggggactcgaccccctgacatggggctgcctggagcaggccgcgtgacgtggggctgcctggccgcggctctcacatggtggttcctgctgcactgatggcccaggggtctctggtatccagatggagctctcgcttcctcagcagctgtgactttcacccaggacccaggacgcagccctccgtgggcactgccggcgccttgtctgcacactggaggtcctccattacagaggcccagcgcacatcgctggccccacaaacgttcaggggtacagccatggcagctccttcctctgccgtgagaaaagtgcttggagtacggtttgccacacacgtgactggacagtgtccaattcaaatctttcagggcagagtccgagcagcgcttggtgacagcctgtcctctcttgctctccaaaggccctgctccctgtcctctctcactttacagcttgtgtttcttctggattcagcttctcctaaacagacagtttaattatagttgcggcctggccccatcctcactttctcttttttatttcactgctgctaaaat

SEQ ID NO: 185439 - DNA, 1338 bp, Homo Sapiens
  misc_feature (407)..(427): n is a, c, g, or t
ttggatcagacaatacaagaactggaagagacactgaaactgaaggaagaggaaatagaaaggttaaaacaagaaattgataatgccagagaactacaagaacagagggattctttgactcagaaactacaggaagtagaaattcggaacaaagacctggagggacaactgtctgacttagagcaacgtctggagaaaagtcagaatgaacaagaagcttttcgcaataacctgaagacactcttagaaattctggatggaaagatatttgaactaacagaattacgagataacttggccaagctactagaatgcagctaaggaaagtgaaatttcagtgccaattaattaaaagatacactgtctctcttcataggactgtttaggctctgcatcaagattgcacnnnnnnnnnnnnnnnnnnnnnttgaatatcactcctccaggaggaggatcttttgaaattggaattgtatatttcactgtaaattttagaatccagcttgtagctagttggggaaaaaagatgaaaaacttgaactacaaattacctccatgtatattattggccatagttaactagaaagttataaatagacacttaatgcaatcttttttcctgatattagccaatgggagaattaacaatgtctaggtcacatcccctttttgtgttcaacacagtgaagattatctgctttttaaattaatttatttacgatatctagagctgtgttttgtgcaaaaacttagtgatgaaagcctgtcttttgttgtaatctgaataatttctcaggatatttttgcactgctgagaagcagtgccattaccaattaattcttgccaggagtgagagagagctgtatctttaattgaaatatactataactgggtgtatagagttcttcccttttttgtgctggaagatatttcactctggtgactactctggtacactctggtgttctctaatcttgtctgttgtatagtttacttttccatattgattccatgtatttatgagaagatattgtctcccattttattacacattttaaagccaactaacgaaggcagctgagtccctcagaaatttttctttttaagtttctaataaatttgacacacagtactgaaatacagcagcccgtcattgacaggctggtctagcaatgttaagtatatttacagaatatgcagttacatttatttatatattttgcaagaaatcttttctgaatgatcaatgcatttcaatttacgaataataatggttattggggaactgtttattatagataaattttacggtgtatagctattttaaaagggggtcc

SEQ ID NO: 185440 - DNA, 1351 bp, Homo Sapiens
ttggggtcccggccgccgggaggaagtggccgggcggtcgcagggactccggggcgaccgccgcgagtccgcagtagttcgggccatggaggcggagccgccgctctacccgatggcgggggctgcggggccgcagggcgacgaggacctgctcggggtcccggacgggcccgaggccccgctggacgagctggtgggcgcgtaccccaactacaacgaggaggaggaggagcgccgctactaccgccgcaagcgcctgggcgtgctcaagaacgtgctggctgccagcgccgggggcatgctcacctacggcgtctacctgggcctcctgcagatgcagctgatcctgcactacgacgagacctaccgcgaggtgaagtatggcaacatggggctgcccgacatcgacagcaaaatgctgatgggcatcaacgtgactcccatcgccgccctgctctacacacctgtgctcatcaggttttttggaacgaagtggatgatgttcctcgctgtgggcatctacgccctctttgtctccaccaactactgggagcgctactacacgcttgtgccctcggctgtggccctgggcatggccatcgtgcctctttgggcttccatgggcaactacatcaccaggatggcgcagaagtaccatgagtactcccactacaaggagcaggatgggcaggggatgaagcagcggcctccgcggggctcccacgcgccctatctcctggtcttccaagccatcttctacagcttcttccatctgagcttcgcctgcgcccagctgcccatgatttatttcctgaaccactacctgtatgacctgaaccacacgctgtacaatgtgcagagctgcggcaccaacagccacgggatcctcagcggcttcaacaagacggttctgcggacgctcccgcggagcggaaacctcattgtggtggagagcgtgctcatggcagtggccttcctggccatgctgctggtgctgggtttgtgcggagccgcttaccggcccacggaggagatcgatctgcgcagcgtgggctggggcaacatcttccagctgcccttcaagcacgtgcgtgactaccgcctgcgccacctcgtgcctttctttatctacagcggcttcgaggtgctctttgcctgcactggtatcgccttgggctatggcgtgtgctcggtggggctggagcggctggcttacctcctcgtggcttacagcctgggcgcctcagccgcctcactcctgggcctgctgggcctgtggctgccacgcccggtgcccctggtggctggagcagggtgcacctgctgctcaccttcatcctctttttctggg

SEQ ID NO: 185441 - DNA, 860 bp, Homo Sapiens
gcacagttgccccgtgcctcaagggatggagggaaaggcccctcacttctgggagaacccccttggatgaacacagcagccaatgagcaaacagaaccagaggagatacaggaaaatgaggcagaggggcaggcttgggggaaggcagcattctctggtacccaccacccctgcccagggctcagaagcctttgcctgggtccaaaggccagggacaagggaggcttggctcacagatggggggtgggggtcacccatatcttcctccccactctgggactgactgacagccaagaaaccggcaggagctcacacagagctaatgctaaatgtcctcttacctctgggtggccctgggccccagggttctgaaggaaaggtgggcatggtaccctgtcctcattatggggactgaggctctccatgacctagggccctcagacccagggggaccaagggcttctaggacttccctcccaccaagcctgtacccaaagacctggggcaggcagagagcagcagggaggaacgggaacagggcagggcgtgtggcatcgtacccacgctcacccacactggcccagcagcctcccgaggcctggcccaaggtcactcctcagtgaagtccctgtctatgtccatgtagggctcctcaatgtagctaacgagagcagagggtgactgccggtccgggttcaacaggatggacactgtctccttccagtatgagaagctgatgcaggagctgttctctaggcaggtgctgtccttgtccttgtgcaggtagtgctgctgccagaagcgcagcaggttgtggaagttgttgagcaggaagccggccaacttttttgtacaaagtt

SEQ ID NO: 185442 - DNA, 2387 bp, Homo Sapiens
ttggcggccgcccccccgtagaaatctccgcggccccgaggccgcttgcttcctgtttgtccgacgaggagacatggcggcggcgccggtagcggctgggtctggagccggccgagggagacggtcggcagccacagtggcggcttggggcggatggggcggccggccgcggcctggtaacattctgctgcagctgcggcagggccagctgaccggccggggcctggtccgggcggtgcagttcactgagacttttttgacggagagggacaaacaatccaagtggagtggaattcctcagctgctcctcaagctgcacaccaccagccacctccacagtgactttgttgagtgtcaaaacatcctcaaggaaatttctcctcttctctccatggaggctatggcatttgttactgaagagaggaaacttacccaagaaaccacttatccaaatacttatatttttgacttgtttggaggtgttgatcttcttgtagaaattcttatgaggcctacgatctctatccggggacagaaactgaaaataagtgatgaaatgtccaaggactgcttgagtatcctgtataatacctgtgtctgtacagagggagttacaaagcgtttggcagaaaagaatgactttgtgatcttcctgtttacattgatgacaagtaagaagacattcttacaaacagcaaccctcattgaagatattttgggtgttaaaaaggaaatgatccgactagatgaagtccccaatctgagttccttagtatccaatttcgatcagcagcagctcgctaatttctgccggattctggctgtcaccatttcagagatggatacagggaatgatgacaagcacacgcttcttgccaaaaatgctcaacagaagaagagcttgagtttggggccttctgcagctgaaatcaatcaagcggcccttctcagcattcctggctttgttgagcggctttgcaaactggcgactcgaaaggtgtcagagtcaacgggcacagccagcttccttcaggagttggaagagtggtacacatggctagacaatgctttggtgctagatgccctgatgcgagtggccaatgaggagtcagagcacaatcaaggggcttctgaggagaatggcctgcctcacacgtcagccagaacccagctgccccagtcaatgaagattatgcatgagatcatgtacaaactggaagtgctctatgtcctctgcgtgctgctgatggggcgtcagcgaaaccaggttcacagaatgattgcagagttcaagctgatccctggacttaataatttgtttgacaaactgatttggaggaagcattcagcatctgcccttgtcctccatggtcacaaccagaactgtgactgtagcccggacatcaccttgaagatacagtttttgaggcttcttcagagcttcagtgaccaccacgagaacaagtacttgttactcaacaaccaggagctgaatgaactcagtgccatctctctcaaggccaacatccctgaggtggaagctgtcctcaacaccgacaggagtttggtgtgtgatgggaagaggggcttattaactcgtctgctgcaggtcatgaagaaggagccagcagagtcgtctttcaggttttggcaagctcgggctgtggagagtttcctccgagggaccacctcctatgcagaccagatgttcctgctgaagcgaggcctcttggagcacatcctttactgcattgtggacagcgagtgtaagtcaagggatgtgctccagagttactttgacctcctgggggagctgatgaagttcaacgttgatgcattcaagagattcaataaatatatcaacaccgatgcaaagttccaggtattcctgaagcagatcaacagctccctggtggactccaacatgctggtgcgctgtgtcactctgtccctggaccgatttgaaaaccaggtggatatgaaagttgccgaggtactgtctgaatgccgcctgctcgcctacatatcccaggtgcccacgcagatgtccttcctcttccgcctcatcaacatcatccacgtgcagacgctgacccaggagaacgtcagctgcctcaacaccagcctggtgatcctgatgctggcccgacggaaagagcggctgcccctgtacctgcggctgctgcagcggatggagcacagcaagaagtaccccggcttcctgctcaacaacttccacaacctgctgcgcttctggcagcagcactacctgcacaaggacaaggacagcacctgcctagagaacagctcctgcatcagcttctcatactgggaaggagacagtgtccatcctgttgaatccggaccggcagtcaccctctgctctc

SEQ ID NO: 185443 - DNA, 1289 bp, Homo Sapiens
ttggcacgccggccctgcgccgttgtcccgggaaactttgcgtcccagggccgcaccggaccgtggtgaccccacgcgccgcgccgccaccgggctcggaaaacccagcgcccccgggctctttggcagttgcgactccgaacgaaggcggctccgtgcgggccatcccctatctccccgggcggttcacctgtggcagatgatatcatccagcccgctgcccccgcagacctggaaagcccaaccttagctgcctcttcctaccacggtgatgttgttggccaggtctctacggatctgatagcccagaggagttccgattctgaagaggcatttgagaccccggagtcaacgacccctgtcaaagctccgccagctccacccccaccaccccccgaagtcatcccagaacccgaggtcagcacacagccacccccggaagaaccaggatgtggttctgagacagtccctgtccctgatggcccacggagcgactcggtggaaggaagtcccttccgtcccccgtcacactccttctctgccgtcttcgatgaagacaagccgatagccagcagtgggacttacaacttggactttgacaacattgagcttgtggatacctttcagaccttggagcctcgtgcctcagacgctaagaatcaggagggcaaagtgaacacacggaggaagtccacggattccgtccccatctctaagtctacactgtcccggtcgctcagcctgcaagccagtgactttgatggtgcttcttcctcaggcaatcccgaggccgtggcccttgccccagatgcatatagcacgggttccagcagtgcttctagtacccttaagcgaactaaaaaaccgaggccgccttccttaaaaaagaaacagaccaccaagaaacccacagagacccccccagtgaaggagacgcaacaggagccagatgaagagagccttgtccccagtggggagaatctagcatctgagacgaaaacggaatctgccaagacggaaggtcctagcccagccttattggaggagacgccccttgagcccgctgcggggcccaaagctgcctgccctctggactcagagagtgtagaaggggttgtccccccggcttctggaggtggcagagtgcagaactcaccccctgtcgggaggaaaacgctgcctcttaccacggccccggaggcaggggaggtaactctatcggatagcggggggcaagaggactctccagccaaacgggcactccgtaacgctggagtttgactattctg

SEQ ID NO: 185444 - DNA, 2151 bp, Homo Sapiens
  misc_feature (677)..(686): n is a, c, g, or t
ttgggattcctagtggtgattatagattatattgcagaattaggagtattcattagtaggcagatattacagggatgtgattaagataattcactcttaatgtagtttttcagctgaccaaagcaaatgacatactggcattaagtagtacagagagcttttgtggtcttactgctctaataaaggcagaaactgtcttaatttaacagccttctgttaaatgtagcttataaacttcccaattagttattattctatatactctgtaaaaacataaatttataatgtacagtatgtcatgtgtcacacaacctacataataaatgcacatttaagtaaagtatgttttgttccccaaatcatatactttatatatctctagggtattgttctaaatgaaagacattttaagttaatttatagtaatctttaatatttgcatgtctaattttctttcaggagtatattttgaaaaagttttaaagagttcagatacttctctttgggtgagaaacattcaaatgtatctatcagggattattgtgacattagctggcgtctacttgtcagatggagctgaaattaaagaaaaaggatttttctatggttacacatattatgtctggtttgtcatctgtaagtatccaggaattaaaggttcttagtagatcctttannnnnnnnnnaagttagatgtccattttaagctgttataacattttgaaattaatcctttgatactgtaccagtttgaatataattttcattttgttgacttagttttgattgtgaaggcaaaattgctttgggatagcaatgccccaaaatatctaacattagcaaaaaatgtgtaaaatttaatagaccacatagccctctgggcattgttttggaaaaacagtgttatataggaactaccactcaattttagtacaaactctcagatggctccttctaaggaaaacagtattttccttttcctaggtaaagtatggcatctctggggatgaaaattgcctcaccattatgtaatgtttcatttatttgagtgataagattttatttctctctgtatacaagttcttgcaagtgttggtggcctctacacttctgttgtggttaagtacacagacaacatcatgaaaggcttttctgcagcagcggccattgtcctttccaccattgcttcagtaatgctgtttggattacagataacactcacctttgccctgggtactcttcttgtatgtgtttccatatatctctatggattacccagacaagacactacatccatccaacaaggagaaacagcttcaaaggagagagttattggtgtgtgattttagcctcacgtgagactccttttaagactaaaccatttgcattaaactagagccttaagtcaatctcagaaggtagcataaacaaataaaaattaactgtatggcatgatcagtgcggttatgtggaaacaacaacaaacaaacgaagctatctgagtgaactgctaatacagaaacttaatgtagacctgtttggggtctactattgttttagaatgaaggaattgtattattgtgtgtatatataatttgtaaataaaaagtatggagatgatacggtgttaaaaaaaatcatggtgaggctacaatactcaagtaacaaggtttgggacaatgtctaagggttaaagtgccaaagccatttctgtactaactgttctcttgttccggtaccggggagaaggatgacccctccttattctccaattcatgtacagtattttgtcctagcagcataaagacctagctcttttcttacaagaggcagaaacaagacaggctagttcataaacaaactgatgtaacttctcaaaatgaatctatttcataactcggacaatttctgggtggtgactgagtacccctttagtgagtacccctttagtgctatatttgtgccattcattatctggttcatatttctttgctgttagatgatacacatttcttcaaaaaaatttctaatgtcacttttgtacttttttaaataaagtatgtttaactgttgggctctcaataatttgtgaaatttcagtgttttctataatgttaatggggaaattcagcaataaactttatttgtaag

SEQ ID NO: 185445 - DNA, 1634 bp, Homo Sapiens
ctttgtacaaaaaagttggataaatataactttatcgcggacgtggtggagaagatcgcccctgccgtggttcatatcgaattgtttcgcaagcttccgttttctaaacgagaggtgccggtggctagtgggtctgggtttattgtgtcggaagatggactgatcgtgacaaatgcccacgtggtgaccaacaagcaccgggtcaaagttgagctgaagaacggtgccacttacgaagccaaaatcaaggatgtggatgagaaagcagacatcgcactcatcaaaattgaccaccagggcaagctgcctgtcctgctgcttggccgctcctcagagctgcggccgggagagttcgtggtcgccatcggaagcccgttttcccttcaaaacacagtcaccaccgggatcgtgagcaccacccagcgaggcggcaaagagctggggctccgcaactcagacatggactacatccagaccgacgccatcatcaactatggaaactcgggaggcccgttagtaaacctggacggtgaagtgattggaattaacactttgaaagtgacagctggaatctcctttgcaatcccatctgataagattaaaaagttcctcacggagtcccatgaccgacaggccaaaggaaaagccatcaccaagaagaagtatattggtatccgaatgatgtcactcacgtccagcaaagccaaagagctgaaggaccggcaccgggacttcccagacgtgatctcaggagcgtatataattgaagtaattcctgataccccagcagaagctggtggtctcaaggaaaacgacgtcataatcagcatcaatggacagtccgtggtctccgccaatgatgtcagcgacgtcattaaaagggaaagcaccctgaacatggtggtccgcaggggtaatgaagatatcatgatcacagtgattcccgaagaaattgacccataggcagaggcatgagctggacttcatgtttccctcaaagactctcccgtggatgacggatgaggactctgggctgctggaataggacactcaagacttttgactgccattttgtttgttcagtggagactccctggccaacagaatccttcttgatagtttgcaggcaaaacaaatgtaatgttgcagatccgcaggcagaagctctgcccttctgtatcctatgtatgcagtgtgctttttcttgccagcttgggccattcttgcttagacagtcagcatttgtctcctcctttaactgagtcatcatcttagtccaactaatgcagtcgatacaatgcgtagatagaagaagccccacgggagccaggatgggactggtcgtgtttgtgcttttctccaagtcagcacccaaaggtcaatgcacagagaccccgggtgggtgagcgctggcttctcaaacggccgaagttgcctcttttaggaatctctttggaattgggagcacgatgactctgagtttgagctattaaagtacttcttaggagtatctgcacagataaacagctacaattgccaaacggaagtctttcattggcacaccataattggatggctccaaaagttgcaagctgttgagaggaaacgggggttactatcactctgtgatctct

SEQ ID NO: 185446 - DNA, 1165 bp, Homo Sapiens
  misc_feature (1012)..(1025): n is a, c, g, or t
ttggcaggctgctacggagcgcgcgcccggctttgaatgagcggggctgggagtgagcgggcggagcgcgagctcgaggaagagacaggcagcgcgcgtgagcgcgccttgtgtgcgcgcgcggcccgcggcagctcggagcctccgccgggcgggcggggagggggaggggcaggttttgattcccaccatggccatcacccagtttcggttatttaaattttgtacctgcctagcaacagtattctcattcctaaagagattaatatgcagatctggcagaggacggaaattaagtggagaccaaataactttgccaactacagttgattattcatcagttcctaagcagacagatgttgaagagtggacttcctgggatgaagatgcacccaccagtgtaaagatcgaaggagggaatgggaatgtggcaacacaacaaaattctttggaacaactggaacctgactattttaaggacatgacaccaactattaggaaaactcagaaaattgttattaagaagagagaaccattgaattttggcatcccagatgggagcacaggtttctctagtagattagcagctacacaagatctgccttttattcatcagtcttctgaattaggtgacttagatacctggcaggaaaataccaatgcatgggaagaagaagaagatgcagcctggcaagcagaagaagttctgagacagcagaaactagcagacagagaaaagagagcagccgaacaacaaaggaagaaaatggaaaaggaagcacaacggctaatgaagaaggaacaaaacaaaattggtgtgaaactttcataacacatgttcaaattttatcatgccagtaggagaaatctcagctccacaacccaagcaacatttgtatggatttaagagtattttaagaagacatactgcttgattttaatacattgatcaggccatccaggacaccacgattctcccaaagtaccttgaactcttagtgattgagactcnnnnnnnnnnnnnngacttgagacaatgttttcttcaacatgctccaaatataagacatttgtttgctgtacagaaagtatcacaaatggaatatatcagtacctctcaagctagtgtttctagctaaataaatgggtgtatataattttatgg

SEQ ID NO: 185447 - DNA, 1636 bp, Homo Sapiens
  misc_feature (426)..(437): n is a, c, g, or t
  misc_feature (446)..(552): n is a, c, g, or t
  misc_feature (614)..(692): n is a, c, g, or t
ttgggttcttttcatgcaaatggaagggatcttagggcaactttaagtttgaaaaatataaaatgaatggaaagatttctaccaatttatctgttgcagggaagcaaaatacaaacaagagttggattattaatgttgctttgtacctggctaagcaattgtcccattgcagtaacgcattttcttcacaattcagccaatgttccatttgtatcctttatgttttagtaacgtacatgtaagtatttatatcttttttagtttttctcctcaattagaagtagttctatgcccaaaatatttgaattctccactatcttatctgtgttgcaactttttaaactgttaaagttgttatgatgcttgtttaagttgtgtgtgtgtggtttgttttatgccgggttggaatatatatatgaaatttcnnnnnnnnnnnngaaatgaannnnnnnnnnnnnnnnnnnnnnnnnnnnnnnnnnnnnnnnnnnnnnnnnnnnnnnnnnnnnnnnnnnnnnnnnnnnnnnnnnnnnnnnnnnnnnnnnnnnnnnnnnnagctaggattacaggtgtgcgcaaccacaacccggctaattttgtatttttagtagagacannnnnnnnnnnnnnnnnnnnnnnnnnnnnnnnnnnnnnnnnnnnnnnnnnnnnnnnnnnnnnnnnnnnnnnnnnnnnnnatgagccaccacacctagcctatatatggaatttcttatgggaagtcttatgtgaagtattaatgtatgtcaaattcaaattgcaaaatatactagatattttcaatccttagcctccttaacaaagatttcagcttacaggacaaattgcagaaaatcttggagaagaagagcagttggtccaaggcttatgtgcccttttgttgggcatttcgatttatttcaatgataactcacttgagagctacatgaaagagaagctaaaacaactgattgagaagaggattggcaaagagaatttcatagagaaactaggatttattagcaaacatgagttgtattccagagcatctcagaaaccccagccaaactttcccagtccagaatacatgatatttgatcatgagtttacgaagctggtaaaagaacttgaaggtgttataactaaggctatttataagtccagtgaagaagataaaaaagaagaagaggtgaaaaaaacattagaacagcatgacaatattgtgactcactacaaaaatatgattcgagagcaagatctccaacttgaggaattaaggcagcaggtttctacattaaaatgtcaaaatgaacagctccagacggcagtcacacagcaagtatcacagatccagcagcacaaagaccagtataatcttcttaaaatacagctaggaaaagacaatcagcatcaaggttcttacagtgagggggctcagatgaatggcattcagccagaagaaattggtagattgcgagaagagatagaagaattaaaacgtaatcaggaacttttacaaagccagctgactgaaaaggactctatgattgaaaatatgaaatcttcccaaacatctggcacaaatgaacagtcttcagcaatagtttcagctagagattctgaacaagttgcagaattaaaa

SEQ ID NO: 185448 - DNA, 1249 bp, Homo Sapiens
actttgtacaaaaaagttggataaaaaccaaaaaggacaaggagaaatcgtgtcaacacttttaccttctaccattgatgcaacaggtaattcagtttcagctggccagttattatgtggaggtttgttttctactgattcactttcaaactggtgtgctgctgtggcccttgcccatgcgttgcaagaaaatgccacccagaaagaacagttgctcagggttcaacttgctacaagtattggcaaccctccagtttctttacttcaacagtgcaccaatattctttcacagggaagcaaaatacaaacaagagttggattattaatgttgctttgtacctggctaagcaattgtcccattgcagtaacgcattttcttcacaattcagccaatgttccatttcttacaggacaaattgcagaaaatcttggagaagaagagcagttggtccaaggcttatgtgcccttttgttgggcatttcgatttatttcaatgataactcacttgagagctacatgaaagagaagctaaaacaactgattgagaagaggattggcaaagagaatttcatagagaaactaggatttattagcaaacatgagttgtattccagagcatctcagaaaccccagccaaactttcccagtccagaatacatgatatttgatcatgagtttacgaagctggtaaaagaacttgaaggtgttataactaaggctatttataagtccagtgaagaagataaaaaagaagaagaggtgaaaaaaacattagaacagcatgacaatattgtgactcactacaaaaatatgattcgagagcaagatctccaacttgaggaattaaggcagcaggtttctacattaaaatgtcaaaatgaacagctccagacggcagtcacacagcaagtatcacagatccagcagcacaaagaccagtataatcttcttaaaatacagctaggaaaagacaatcagcatcaaggttcttacagtgagggggctcagatgaatggcattcagccagaagaaattggtagattgcgagaagagatagaagaattaaaacgtaatcaggaacttttacaaagccagctgactgaaaaggactctatgattgaaaatatgaaatcttcccaaacatctggcacaaatgaacagtcttcagcaatagtttcagctagagattctgaacaagttgcagaatttaaaacaggaactggcaactttaaagtctcagttaaactc

SEQ ID NO: 185449 - DNA, 978 bp, Homo Sapiens
ttggcccagtgcagcccacttccggttctaccagattgagggggatcgatatgactacaacacagtccccttcaacgaagatgaccctatgagctggactgaagactatctggcatggtggccaaagccgatggaattcagggcctgctatatcaaggtgaagattgtggggccactggaagtgaatgtgcgatcccgcaacatggggggcactcatcggcggacagtggggaagctgtatggaatccgagatgtgaggagcactcgggacagggaccagcccaatgtctcagctgcctgtctggagttcaagtgcagtgggatgctctatgatcaggaccgtgtggaccgcaccctggtgaaggtcatcccccagggcagctgccgtcgagccagtgtgaaccccatgctgcatgagtacctggtcaaccacttgccacttgcagtcaacaacgacaccagtgagtacaccatgctggcacccttggacccactgggccacaactatggcatctacactgtcactgaccaggaccctcgcacggccaaggagatcgcgctcggccggtgctttgatggcacatccgatggctcctccagaatcatgaagagcaatgtgggagtagccctcaccttcaactgtgtagagaggcaagtaggccgccagagtgccttccagtacctccaaagcaccccagcccagtcccctgctgcaggcactgtccaaggaagagtgccctcgaggaggcagcagcgagcgagcagggtggccagcgccagagtggagtggtggcctctctgagatttcctaaagttgctcaacagcccctgatcaactaagttttgtggtacttcaccctcttctgccctcatttcatgtgacagccattgtgagactgatgcacaaactgtcacttggttaatttaagcacttctgttttcgtgaatttacttgattgtttcttcatgcctttactt

SEQ ID NO: 185450 - DNA, 1152 bp, Homo Sapiens
ttggggaagtgtttctaggagacggcgctcaccggctgcacctgcgccgttgacgccaccggggccggcagacagacccgcggcgctggctggtggagggagttcccgcttgctctctgtcgctgtcaccgccctgtttctgtagccgtatggtacgcctgtgagaccggctgccggctgacgtctccttgcgatggagcatatccggacgaccaaggtcgaacaagtaaaattacttgaccgattcagtaccagcaacaagtcattaacaggaacactgtatcttacggctacacatctattatttatcgactctcatcaaaaagaaacctggatattacaccaccatattgcctcagtagagaaacttgctttgactacttctggatgcccccttgtgatacagtgcaagaacttcagaactgtgcatttcattgttcccagagaaagagattgccatgatatttacaactctttgctacaactgtcaaaacaagcaaaatatgaagatctctatgcattttcttataatcccaaacaaaatgattcagaacgactacaaggctggcagctcattgatctcgctgaggaatataagaggatgggagtgccaaactcacactggcagttgtctgatgccaaccgggactacaagatttgtgaaacttaccccagagaactttatgttccccggatagcaagcaaaccaataattgttggtagttccaagttccggagcaagggaagattcccagttctttcctactatcatcaagataaggaggctgccatttgtcgatgtagtcagccactctctggattcagtgccaggtgcctggaggatgaacatttgcttcaagccattagtaaagccaatccagtcaatcgctatatgtacgtcatggataccaggccaaaactgaatgcaatggccaacagagcagctggaaaaggttatgaaaatgaagacaactattccaatattagatttcagtttgttggaattgaaaatattcatgtcatgaggtccagccttcagaaattattggaagtcaatggcactaaagggctttctgtcaatgatttctactccggtttggagagctcgggatggcttcgccatatcaaagctgttatagatgctgcagtctt

SEQ ID NO: 185451 - DNA, 2316 bp, Homo Sapiens
  misc_feature (115)..(124): n is a, c, g, or t
  misc_feature (1067)..(1089): n is a, c, g, or t
atgcgggcctttgggaaaaacaatagttatggcaaaagtctatcaaacagcaagcactgacaagcagcacattctcaagagcacacaggattaagttgtcatcattctgggaagnnnnnnnnnncattaatgaagagggcaataatatgaagggaatcatggatcagttttctttcgctccctgtggtggatttcacttacaagaaaattgaagctggcaagaccctgttttctctgcaatttatttaaaaccttgcacgcatttggataccttgtgatttccaagaactacgtgaagattaagctttgcttactgatacatggcatgtattcttttcagtcttttgtgtttgattttgtttgatttccctctgcagcacagcgtctctgtaaaggtttttatgctttcaccagccatgtcttaaatacattaagacaacacatttggtgttcacacttcttcagtaatgtctgaacttgaaagccacagagtggcataaaacaatgtgtgttttctttgagagcagtgcacattttgcaaccactaggaaggaaattttctgctaaagcaaacccctgttctctgacttgacaacttggccccggactgtggggccccacctgttgcttaccttttgaggtaattttgcaaatgtggtttttttacttggaaataactgcacatttatatataggatattggactctgcttagcattttcaagccacatagcatgactgttttttgaataggttggaattgaaaaaacaattatcaaacgttaagaacaaagacagggataaattgcttacatttcaacctctggagattgaggtaactttttgtgtctgggtcttgtcaacatctaatttttttccatccattctgttacactttgtattttctaactggagaaaagagtgaggaacagaatgttttaaatctggtgcaaaagaactatatctgctggatgagccttgaaagcagtcttggcctgttagggcttacaaagtaaattacaaagtgatccagttcaaagtttgcttagttacaacaaagcacctttnnnnnnnnnnnnnnnnnnnnnnncattccaagccaattggaagacatcattgggttcttactttaagacatctcctggaataactgttcaaatgcaggttttagaaacaatgcaggaatcttgctttaaagatgaaaaagggaatgggccagcttcccttactcaaggagttgagggaccttggaggatgaaggcgagtatgtgacactggagaaaagtggaccaggcatgtcttttgctttgatctggagggagggctgcctgatgcaggccggctcccagtggggcaggcctcgctgcagaatgcccagtagtactgcggccaaggggacagttaggagacttcatctaaagcatgaaacctagctcctctacacacaaattcctatggaaatacctttgtgtacagtgtcctacattttcctattagtcagaaagaaggagagaatgagtgagtgcttgaaatgtgtcatactgttttaggatcaagactaggaattaggagccaggttgacaaggactttttctgagagttgggtgagggtaaagcttttctataatcaagctcaatacaccaaggaaactggatccagaattcctaaactttaaaatggtactgtctgcggagtggagtatggatggttatgtcaaagtcatagttcatcctatccagatgtagcattcatggtaaacttttaagtgctaagcaaggaattatttactgattggttttaaagagagcagaaaacacccaagtgtagaatgtctactgtttgctacctagaaatcttttccattcctctttcatacattccaacccactggaagtctttagaggtattttgatttaaagtatacttaaattaggatttcttaaagaaaacatagggagaaaactttacatgcaattaaaaatggactttcctgtgatttgtttttaatcattcatttggagaagaggcatgacctttgtatttcactaagtttaaagcaagagcaactgatgattaaatgttgctttttaataaggtttttaacttgaaaatttgaaaatatttaatgttgaaagacttcaattagggctattagagttatatctccctgtcgtagcagcttcttcggagaagtgaaatataacattactcagtggacggagaagtctgttttgttacagagacatgcctctcagaaggtcaggaggttttgagtacctatccttgccacccatacaggaaatccaaagtttggtg

SEQ ID NO: 185452 - DNA, 1901 bp, Homo Sapiens
  misc_feature (592)..(615): n is a, c, g, or t
gtttcatcttgaaagatcgatgaattttttaatatcagaagaaaaaggggaaaataaaatttccccccaaaacacataagaacccactactggcactttgtattttaaagtacctgggaaaaaaacggaacagatttttaaaggcaataacgacttgtaagacggcttgtttcatttgatttggcacgaagtaaagtaagagtaaatatgccatggaagacataatcaagttttttcctccatctctcatatttccccacttctaccagaccacacagtacatcagcaaccatcctttagattccaatttttaaatggctgctcagacgacaccaatagagttctttctccttaaaatatggtggcagtgaatgctaacaggtatcaatttctttgatcaggaacaaagaactccttcaggaaactcactttcctggtccttgttaacctatcatgtaaattctttttattggtacacctgtttactaattataattgattgctatttatgccaagggagcatttcccaggcatgcctcatctatttactaacaacaaagtatgcttactttatttacatagtgccacgggnnnnnnnnnnnnnnnnnnnnnnnnattggcgggggagatggtactataacttgttatttatcagggcagatcacacatttggatcaaaaagaaaaaccagcaagtagatcctaaaacacatttcttaacctgagtcataactgaaaacatagactttaattacattttgttgaaaattcattcaactttggtgcttgtaaaagcacttatgtcaatttttgacacaaatcataaccctcagtacacaggtattttcaaaggaaacaagtcatcttaaagtaatatttttctatatgctaattgatacatctttatagcaaattgaaaattctgagtaaactgaaagtatgcttaacgacaaaataaatacagcatatatggttaacatatacatttcttagtataaaggcagcagtgaatttgtgtctcacaataaatctgtaaatccagttgctttctttctggaattttatatagtgtctcaccatgttccacaatgctggaaatgtcttttttggcatcaatctatgcacaaatttctgattacgtattttctccaaatgacatgtaactttttttaacttttccagaaaaatatggaaactttatcaaccacttattaactgaacaaaaagttagattactaccaaatgctcttttaattttgctctaacagatgttttaaaggttcagacatcgctgatgtttttgaggataactgcatacaacacactagatgatttcaaacgatgcatcttagtatccgaatcatttggcacatccttagtatccaaaataaaatcagtagaaataaaagtaatataattttcaaagaattcatacatactagaagtcttaggaaaagcagcttctaaatgcaaggactaggaggtttgcccatcttactattaatagttacacacatttctcctcatggagtaactgaagctttctggcttctttgtggaactttagtttgtaggaaagcatatacatagggccaaatcttgttggtttctgttccggagaatgtttccagcaccccttttttctggtaatattccaggactggctttgtttggtcttcataagcctttagtctcttgataaccgtctctggtttatcatcctcacgctgaatgagaggctccccagtcaggtcatcaatgcccacagttttgggagggttgaattcaatgttatagactcggccactggcgggatgaatccagcgagcagtaaggcgttgtttaatgacctccaagggcactattctaagaggtaatcactgccaacttttttgtacaaag

SEQ ID NO: 185453 - DNA, 2491 bp, Homo Sapiens
ttggctggcctccttagcgtcgactgctcggaagcgggaccgggggccctgggcctggaagctgtctcggactcgggaacaaaagccgaagtcagtattcagaacaacaaagatggcacctacgcggtgacctacgtgcccctgacggccggcatgtacacgttgaccatgaagtatggtggcgaactcgtgccacacttccccgcccgggtcaaggtggagcccgccgtggacaccagcaggatcaaagtctttggaccaggaatagaagggaaagatgtgttccgggaagctaccaccgactttacagttgactctcggccgctgacccaggttgggggtgaccacatcaaggcccacattgccaacccctcaggggcctccaccgagtgctttgtcacagacaatgcggatgggacctaccaggtggaatacacaccctttgagaaaggtctccatgtagtggaggtgacatatgatgacgtgcctatcccaaacagtcccttcaaggtggctgtcactgaaggctgccagccatctagggtgcaagcccaaggacctggattgaaagaggcctttaccaacaagcccaatgtcttcaccgtggttaccagaggcgcaggaattggtgggcttggcataactgttgagggaccatcagagtcgaagataaattgcagagacaacaaggatggcagctgcagtgctgagtacattcctttcgcgccgggggattacgatgttaatatcacatatggaggagcccacatccccggcagccccttcagggttcctgtgaaggatgttgtggaccccagcaaggtcaagattgccggccccgggctgggctcaggcgtccgagcccgtgtcctgcagtccttcacggtggacagcagcaaggctggcctggctccgctggaagtgagggttctgggcccacgaggcttggtggagccagtgaacgtggtggacaatggagatggcacacacacagtaacctacaccccatctcaggagggaccttacatggtctcagttaaatatgctgatgaagagattcctcgcagtcccttcaaggtcaaggtccttcccacatatgatgccagcaaagtgactgccagtggccccggccttagttcctatggtgtgcctgccagtctacctgtggactttgcaattgatgcccgagatgccggggaaggcctgcttgctgttcaaataacggaccaagaaggaaaacccaaaagagccattgtccatgacaataaagatggcacgtatgctgtcacctacatccccgacaagactgggcgctatatgattggagtcacctacgggggtgacgacatcccactttctccttatcgcatccgagccacacagacgggtgatgccagcaagtgcctggccacgggtcctggaatcgcctccactgtgaaaactggcgaagaagtaggctttgtggttgatgccaagactgccgggaagggtaaagtgacctgcacggttctgaccccagatggcactgaggccgaggccgatgtcattgagaatgaagatggaacctatgacatcttctacacagctgccaagccgggcacatatgtgatctatgtgcgcttcggtggtgttgatattcctaacagccccttcactgtcatggccacagatggggaagtcacagccgtggaggaggcaccggtgaccgaagaggcctatgtcccagtgagtgacatgaacggcctgggatttaagccttttgacctggtcattccgtttgctgtcaggaaaggagaaatcactggagaggtccacatgccttctgggaagacagccacacctgagattgtggacaacaaggacggcacggtcactgttagatatgcccccactgaggtcgggctccatgagatgcacatcaaatacatgggcagccacatccctgagagcccactccagttctacgtgaactaccccaacagtggaagtgtttctgcatacggtccaggcctcgtgtatggagtggccaacaaaactgccaccttcaccatcgtcacagaggatgcaggagaaggtggtctggacttggctattgagggcccctcaaaagcagaaatcagctgcattgacaataaagatgggacatgcacagtgacctacctgccgactctgccaggcgactacagcattctggtcaagtacaatgacaagcacatccctggcagccccttcacagccaagatcacagatgacagcaggcggtgctcccaggtgaagttgggctcagccgctgacttcctgctcgacatcagtgagactgacctcagcagcctgacggccagcattaaggccccatctggccgagacgagctctgtctcctgaagaggctgcccaacaaccacattggcatctccttcatcccccgggaagtgggcgaacatctggtcagcatcaagaaaaatggcaaccatgtggccaacagccccgtgt

SEQ ID NO: 185454 - DNA, 1189 bp, Homo Sapiens
ctttgtacaaaaaagttggcacggtcagcgtcaagtaccgtgggcagcacgtcaccggcagccccttccagttcaccgtggggccacttggtgaaggaggcgcccacaaggtgcgggcaggaggccctggcctggagagaggagaagcgggagtcccagctgagttcagcatttggacccggggagcaggcgctggaggcctctccatcgctgttgagggccccagtaaggccgagattacattcgatgaccataaaaatgggtcgtgcggtgtatcttatattgcccaagagcctggtaactacgaggtgtccatcaagttcaatgatgagcacatcccggaaagcccctacctggtgccggtcatcgcaccctccgacgacgcccgccgcctcactgttatgagccttcaggaatcgggattaaaagttaaccagccagcatcctttgctataaggttgaatggcgcaaaaggcaagattgatgcaaaggtgcacagcccctctggagccgtggaggagtgccacgtgtctgagctggagccagataagtatgctgttcgcttcatccctcatgagaatggtgtccacaccatcgatgtcaagttcaatgggagccacgtggttggaagccccttcaaagtgcgcgttggggagcctggacaagcggggaaccctgccctggtgtccgcctatggcacgggactcgaagggggcaccacaggtatccagtcggaattctttattaacaccacccgagcaggtccagggacattatccgtcaccatcgaaggcccatccaaggttaaaatggattgccaggaaacacctgaagggtacaaagtcatgtacacccccatggctcctggtaactacctgatcagcgtcaaatacggtgggcccaaccacatcgtgggcagtcccttcaaggccaaggtgacaggccagcgtctagttagccctggctcagccaacgagacctcatccatcctggtggagtcagtgaccaggtcgtctacagagacctgctatagcgccattcccaagcatcctcggacgccagcaaggtgacctctaaaggggcagggctctcaaaggcctttgtgggccagaagagttccttcctggtggactgcagcaaagctggctccaacatgctgctgatcggggtccatggggcccaccacccc

SEQ ID NO: 185455 - DNA, 1726 bp, Homo Sapiens
ttggctgggctcaggcgtccgagcccgtgtcctgcagtccttcacggtggacagcagcaaggctggcctggctccgctggaagtgagggttctgggcccacgagctgacgacacggattcccagtcatggcgcagccccttgaaagccctttcagagttctttaaaggtgacccgaagggtgactttaataagacaggcttggtggagccagtgaacatggtggacaatggagatggcacacacacagtaacctacaccccatctcaggagggaccttacatggtctcagttaaatatgctgatgaagagattcctcgcagtcccttcaaggtcaaggtccttcccacatatgatgccagcaaagtgactgccagtggccccggccttagttcctatggtgtgcctgccagtctacctgtggactttgcaattgatgcccgagatgccggggaaggcctgcttgctgttcaaataacggaccaagaaggaaaacccaaaagagccattgtccatgacaataaagatggcacgtatgctgtcacctacatccccgacaagactgggcgctatatgattggagtcacctacgggggtgacgacatcccactttctccttatcgcatccgagccacacagacgggtgatgccagcaagtgcctggccacgggtcctggaatcgcctccactgtgaaaactggcgaagaagtaggctttgtggttgatgccaagactgccgggaagggtaaagtgacctgcacggttctgaccccagatggcactgaggccgaggccgatgtcattgagaatgaagatggaacctatgacatcttctacacagctgccaagccgggcacatatgtgatctatgtgcgcttcggtggtgttgatattcctaacagccccttcactgtcatggtgaccgaagaggcctatgtcccagtgagtgacatgaacggcctgggatttaagccttttgacctggtcattccgtttgctgtcaggaaaggagaaatcactggagaggtccacatgccttctgggaagacagccacacctgagattgtggacaacaaggacggcacggtcactgttagatatgcccccactgaggtcgggctccatgagatgcacatcaaatacatgggcagccacatccctgagagcccactccagttctacgtgaactaccccaacagtggaagtgtttctgcatacggtccaggcctcgtgtatggagtggccaacaaaactgccaccttcaccatcgtcacagaggatgcaggagaaggtggtctggacttggctattgagggcccctcaaaagcagaaatcagctgcattgacaataaagatgggacatgcacagtgacctacctgccgactctgccaggcgactacagcattctggtcaagtacaatgacaagcacatccctggcagccccttcacagccaagatcacagatgacagcaggcggtgctcccaggtgaagttgggctcagccgctgacttcctgctcgacatcagtgagactgacctcagcagcctgacggccagcattaaggccccatctggccgagacgagctctgtctcctgaagaggctgctcaacaaccacattggcatctccttcatctctcgggaagtgggcgaacatctggtcagcatcaagaaaaatggcaaccatgtgggccaacagcttcgtgtctatcatggtggtccagtc

SEQ ID NO: 185456 - DNA, 1823 bp, Homo Sapiens
ttggccctggattcaggccctgggtgaccgaagaggcctatgtcccagtgagtgacatgaacggcctgggatttaagccttttgacctggtcattccgtttgctgtcaggaaaggagaaatcactggagaggtccacatgccttctgggaagacagccacacctgagattgtggacaacaaggacggcacggtcactgttagatatgcccccactgaggtcgggctccatgagatgcacatcaaatacatgggcagccacatccctgagagcccactccagttctacgtgaactaccccaacagtggaagtgtttctgcatacggtccaggcctcgtgtatggagtggccaacaaaactgccaccttcaccatcgtcacagaggatgcaggagaaggtggtctggacttggctattgagggcccctcaaaagcagaaatcagctgcattgacaataaagatgggacatgcacagtgacctacctgccgactctgccaggcgactacagcattctggtcaagtacaatgacaagcacatccctggcagccccttcacagccaagatcacagatgacagcaggcggtgctcccaggtgaagttgggctcagccgctgacttcctgctcgacatcagtgagactgacctcagcagcctgacggccagcattaaggccccatctggccgagacgagccctgtctcctgaagaggctgcccaacaaccacattggcatctccttcatcccccgggaagtgggcgaacatctggtcagcatcaagaaaaatggcaaccatgtggccaacagccccgtgtctatcatggtggtccagtcggagattggtgacgcccgccgagccaaagtctatggccgcggcctgtcagaaggccggactttcgagatgtctgacttcatcgtggacacaagggatgcaggttatggtggcatatccttggcggtggaaggccccagcaaagtggacatccagacggaggacctggaagatggcacctgcaaagtctcctacttccctaccgtgcctggggtttatatcgtctccaccaaattcgctgacgagcacgtgcctgggagcccatttaccgtgaagatcagtggggagggaagagtcaaagagagcatcacccgcaccagtcgggccccgtccgtggccactgtcgggagcatttgtgacctgaacctgaaaatcccagaaatcaacagcagtgatatgtcggcccacgtcaccagcccctctggccgtgtgactgaggcagagattgtgcccatggggaagaactcacactgcgtccggtttgtgccccaggagatgggcgtgcacacggtcagcgtcaagtaccgtgggcagcacgtcaccggcagccccttccagttcaccgtggggccacttggtgaaggaggcgcccacaaggtgcgggcaggaggccctggcctggagagaggagaagcgggagtcccagctgagttcagcatttggacccgggaagcaggcgctggaggcctctccatcgctgttgagggccccagtaaggccgagattacattcgatgaccataaaaatgggtcgtgcggtgtatcttatattgcccaagagcctggtaactacgagtgtccatcaagttcaatgatgagcacatcccggaaagcccctacctggtgccggtcatcgcaccctccgacgacgcccgccgcctcactgttatgagccttcagaatcgggattaaaagttaaccagccagcatcctttgctataaggttgaatggcgcaaaagcaagattgatgcaaaggtgcacagcccctctgga

SEQ ID NO: 185457 - DNA, 1496 bp, Homo Sapiens
gccctctccagcttctccaaagtttcactatcctcacaggactatgaagattcatgaagctcatcgtgtagcacatgatattccacatcataggcatgcaactgcatagaaatatccatctcaaaaaccttgtgtaataatcttttccatttcagaggtattcatatcaggtagcgtgttctaaagaaactcaacaatattttcaaagctctcacattccattataagtgtctcttggctgctcagtaggtcgagtgcaaccttgaatataacttcagttccctgatgaaaaataatatcaaaaactctggctacaaatcctaatgaaaactgagaggcaaacaatgtgaggaaccagggggcagcataaagactggggatgatttcattttcttcaaggtgattgtagagatctctgtgatagtcatgaaggagcttggacagctggtacatttgaatttgcagcgacatcatgtcaggtctgtactgcttgcggaagccgaggtcatacatgaggaatttcagcatttcaaaggcttgctcttcactcatgtgcagaagcaggactccagccacaaagctgatcccctgacagtatcccacttctttgtccagcaaagaataggctttcaggaggttaaacagtgacagctgtcctggcccaagctgtactgaaaagtaagggtgagtaggaaacgtccttcctaaatccacaagaatcgcatgctgctgagcagtgagctgcttcaaaagttccttataggatatgtcaggaggctgttgtttattaggcaatctgtgtctgagtcggtactgtaaagccagaaactgccaaatttctcctcgtcgacttttgggaactccttctttaagaagagtatgaatatcttccatatcacatctgattttagctctgcagtttaacaacttcttatcccaagttattaagacctctttctgacatgcaccaacttcttcatagtctaatttaacttttctggactggagttcatctctgcttgcttcaagtttctggttttctttttccattcgaagtaacaagatttgttggtgtatagcttttctccacaagctcctcagttcttttgatttctttctttcttcaatcttttctgggtcatcctccccagacaggaatataaccagcggttcctcctccatggttggagagaggggggacagtggcagcagctcgttcctgtccaatccatcttgctgttgcattgctgagggagatttgttcatgggagaagcaaccctgaggaaaatgcgctgccgccaggagatccggcgaggagtgacagaggttcctcccacacttagggactcattgctgcaggtagatgaggtcctttttctcccttctccatcaataacaaaccattgaccctttatcttgtactaaaaatcgacatcttgaaaaagtagttggttgctgagatatggcaaaagcagctctgcttttaataagccaa

SEQ ID NO: 185458 - DNA, 2310 bp, Homo Sapiens
tgtacaaaaaagttggatttctaagcacttgcatgcctatgaggtggaatatcatgtgctacaggatgagcttcaggaatcttcatattcctgtgaggatagtgaaactttggagaagctggagagggccaatagccaactgaaaagacaaaacatggacctcctagaaaaattacaggtagctcatactaaaatccaggccttggaatcaaacctggaaaatcttttgacgagagagaccaaaatgaagtctttaatccggaccctggaacaagaaaaaatggcttatcaaaagacagtggagcaactccggaagctgctgcccgcggatgctctagtcaattgtgacctgttgctgagagacctaaactgcaaccctaacaacaaagccaagataggaaataagccataattgaagaggcacggcctcagcagaaagtgctccttagaatactacagagaggaagagcctgcatgtcgctggcccaaggctggaccctgaagctgatggaaccacctaatactggtgctgagctcctagtcacagcaggtggacctcgtgctcatcagagcatgccaatcctaagccattggacatatgtagactggtttttgttgttgctatgtacatataaatatatatataaaatgaacatagttcatgctttcagataaaatgagtagatgtatatttagattaatttttttagtcagaacttcatgaaatccacaccaaaggaaaggtaaactgaaatttcccttggacatatgtgaaatctttttgtctttatagtgaaacaaagccagagcatctttgtatattgcaatatacttgaaaaaaatgaatgtatttttttctccaaagaacagcatgtttcactcaatggtgaaaaggtggaaacatttatgtaactttatgtgtatctgtcttgatatctactgacattgtctatatgaggaaaatgattactggtcatgctcctgtgagttttttgggaaggtagggtcatttctccctgcctgctttgtgccaactagcatgttgcatctacatgcattatgagtctggttaggcattactttaaacatacataaagagacagtaggacattgtggctgagtctacccagctcaaggtaaaggagaatgttgctaattttttagcaaactagaccagcattattactcaaactaaaaatatcacacctgaaaaatttaatttaggacctaaaatgtctagattagctttctgctttttttatttgaataactcattcagttgtgaatgaattcctctttatttggtgccacagtcaccaaatgacaaggatttgccactttcccaccaaattgtgagtgcttgtaatttaggtctctctaccttaaattcagtataaggaaacgtaattatgattgattttttccaaagatgacaagctgtgttgaaatacattttttcttttgaccaattgacagaatctaataagctttaataatcttccccttttatgtgaaaagttttgagaactgtgaaatgtttaggaacaaactgttgaaatccattggaagggaaaaaagaaagtggtaccagtgttaccagctcaactaaaacctgcaattctgcatttcaactcttcacttcctcagcctacaaatagctcattagatgacattcacgcatgctgggtataggcaaggaaagtaattttcaaagtacatttgcagttctctttttcagagatgattctatgatagtgcctctgaaagttgatgcagcatttttgcctttccaaaaagtatttatcctcactgctttttgcagtacttgtattttcacagatggattatctggggtaattttcttcaaagggagtttgttatacacagtgaaaatgtattatagagtagaatagtaaagctctaggggtttcagaaagctttgatgaacagatgacaaacatctgaaaccccctccgcactgttacccagtgtgtatataatgacttgttatagctcagtgtgcccttgaatccatacagtttcttaaaagacaataaaatcttattaataaagttaatgtaacttctaagttctagaaaatgctgattctgtctgccccattcaattgggggctactaattgatttgttgcttggatttcctgagaatttctctatttgtaggaggggttttttctttttacggtctgttgatgacaattactttatgggtgtgatgcaccgatggtagccaaggaatctgttggggaagttcggaaagaaaccttttctttcttttattcagtttaaag

SEQ ID NO: 185459 - DNA, 1547 bp, Homo Sapiens
tccctctcccgcgccagcaccaagttgcgcttgcagctgttctggatctcggccagcagcgcattctgcgtctcgatgaagctcttcaccgcctctttcttgggttcacggtcgaggtccaggcgcagcagtgagtggttcaccttgagggccaacgacagtgccatgagcccgcctgtcttgatctcgttctcccgaaggtccagtctcaggaggcgggggctctcagcgatgaactccgccaccgccaccgcgccctcgcacgtgagcttggtggaggccagcccgaggcgcagcacgctgcggttgctgatgagcccgttcttgaggtgccgcacaccctcgttcccgatggggttgtggcccaggttcagcgtctccaggctctgagtgtgcggcagtgtcatgcccaggaaggccatgcctgtgtgcgtgagctggttgttccacagcaccagggtcaccagccccttcctctgctccttgaggccctcgcagatgtaggccagacccgagtctagcacgtggttgttccggaggtccaggatctgcagggagcagttgaacttgagcaggttacccagctgggccgagtcctgcaggccgttgagcttgttgtccgccaggtacagctcccgcaggttcatgttcatcttcagggccgtggcgagcagcatgaggggccgccccgacaggctggcgttctccaagtgcagcactgccaggctgctgcggatgcgcagggcacgggccacgaagggcgccgagtggtccagcaggggcgtgttgcgggcgtccagatactgcaggcagctcgtcttgcgcatcatgtgggcggccgcctgccagccccgggtgccgatgtgcttgttgaaggagatgttgaggtgggtggccgactcgtagtactcgatcatgtcgaagagggccgaggcaccatcttcatccaggtttgtctgctccaggtccacgaccttgaactgcagcctcttgaagacctcttccagggcctcacaggtcttgtagtcaagcttctcacctttcaggtccagacagtcgaggcggtgcccgaggtctgtgaattcctgcagctgcctgaggagcttggggatctgcctgcagttcagcttctggcaggcctgcttgtaggcgccgatgacctcgtccacggtcacattctgggcatgtctccaggggtctttgggctccactgctccagacacgatatcctcgtcggacgggaatgtgacgcgcttggctgcagccttgaggcgcccatcggcggggggcgacgcggggctgggagacccggcctcagctggggcctcttcaatgtcgccgtccgcgcccggcacgggcggcgcctcctgcggcgcgatctccatagccgccgccgcctcctcacgggggccccggggacatgccccgggccccgaatttgtctctccgggtccgcccgccgtcccggggcatgggctccgccgccgcttcaggcgccgcctccgtccgctctcctagtggtcgtagtcgtcgccgccgggagccaa

SEQ ID NO: 185460 - DNA, 1017 bp, Homo Sapiens
ttggctcagttggcgtccaaggtccagggagtcggtagtaagggatggcgggacgtcaccacctttttttcggggaaagcagagggccccttggacagcccctcggagggccacagttatcagaacagcggtctggaccacttccaaaacagcaacatagaccagagcttctgggagacctttggaagtgctgagcccaccaagacccgcaagtccccgagcagcgacagctggacgtgcgcggacacctccaccgagaggaggagctcggacagctgggaggtgtggggctcggcctccaccaacaggaacagcaacagcgacggcggggagggcggggagggcaccaagaaggcagtgccgccggccgtgcccactgatgatggctgggacaaccagaactggtagggcccactgcgcccccgtccccagcgcccccgggcgacttcgtgtttgcactctgccctcgtcgttcctcctccttccatttgacccaagaatcagcaactgcagtgtgaggacagcgtctcgggaggcaggaccctagggagacccgggtgtgcgccgcctgcgcgtggggagtcttcggtgcgtgggggcggcttgctgtccagcctgtgtgggggccgtcccgtcccacactcccctgggcattcttggactcaaggccggggctctgcgtggcttgctgggaggtgggctgcagcacagaggcctgtgactgcgttccagcggccagttcactacgcagtatctctggggcctgggaccagccacgtgccgagctgtcagcgacgtgaggtgtcccttctcgttgagatatttaactttggttttgctctagttctttctttttgaagagagtgactggagtggtaaagatggaaatgctggaaatgatactggcgctcacgctgccatccgaccaccctcggctcccgagtccacgcctgcctgggcctgtgctgtcagacccgcgtcggtcgtaactctctgtggctctcctgcatcagcacc

SEQ ID NO: 185461 - DNA, 1307 bp, Homo Sapiens
ttgggtgggaaccgcctcctcttattgttcttttggtgatcctacttcttgctattggtgatttcgtcataggaacatttatcccactggagagcaagaagccaaaagggttttttggttataaatctgaaatatttaatgagaactttgggcccgattttcgagaggaagagactttcttttctgtatttgccatcttttttcctgctgcaactggtattctggctggagcaaatatctcaggtgatcttgcagatcctcagtcagccatacccaaaggaacactcctagccattttaattactacattggtttacgtaggaattgcagtatctgtaggttcttgtgttgttcgagatgccactggaaacgttaatgacactatcgtaacagagctaacaaactgtacttctgcagcctgcaaattaaactttgatttttcatcttgtgaaagcagtccttgttcctatggcctaatgaacaacttccaggtaatgagtatggtgtcaggatttacaccactaatttctgcaggtatattttcagccactctttcttcagcattagcatccctagtgagtgctcccaaaatatttcaggctctatgtaaggacaacatctacccagctttccagatgtttgctaaaggttatgggaaaaataatgaacctcttcgtggctacatcttaacattcttaattgcacttggattcatcttaattgctgaactgaatgttattgcaccaattatctcaaacttcttccttgcatcatatgcattgatcaatttttcagtattccatgcatcacttgcaaaatctccaggatggcgtcctgcattcaaatactacaacatgtggatatcacttcttggagcaattctttgttgcatagtaatgttcgtcattaactggtgggctgcattgctaacatatgtgatagtccttgggctgtatatttatgttacctacaaaaaaccagatgtgaattggggatcctctacacaagccctgacttacctgaatgcactgcagcattcaattcgtctttctggagtggaagaccacgtgaaaaactttaggccacagtgtcttgttatgacaggtgctccaaactcacgtccagctttacttcatcttgttcatgatttcacaaaaaatgttggtttgatgatctgtggccatgtacatatgggtcctcgaagacaagccatgaaagagatgtccatcgatcaagccaaatatcagcgatggcttattaagaacaaaatgaagcattttatgctccagtacatgcagatgacttga

SEQ ID NO: 185462 - DNA, 1353 bp, Homo Sapiens
actttgtacaaaaaagttggatcttaattgctgaactgaatgttattgcaccaattatctcaaacttcttccttgcatcatatgcattgatcaatttttcagtattccatgcatcacttgcaaaatctccaggatggcgtcctgcattcaaatactacaacatgtggatatcacttcttggagcaattctttgttgcatagtaatgttcgtcattaactggtgggctgcattgctaacatatgtgatagtccttgggctgtatatttatgttacctacaaaaaaccagatgtgaattggggatcctctacacaagccctgacttacctgaatgcactgcagcattcaattcgtctttctggagtggaagaccacgtgaaaaactttaggccacagtgtcttgttatgacaggtgctccaaactcacgtccagctttacttcatcttgttcatgatttcacaaaaaatgttggtttgatgatctgtggccatgtacatatgggtcctcgaagacaagccatgaaagagatgtccatcgatcaagccaaatatcagcgatggcttattaagaacaaaatgaaggcattttatgctccagtacatgcagatgacttgagagaaggtgcacagtatttgatgcaggctgctggtcttggtcgtatgaagccaaacacacttgtccttggatttaagaaagattggttgcaagcagatatgagggatgtggatatgtatataaacttatttcatgatgcttttgacatacaatatggagtagtggttattcgcctaaaagaaggtctggatatatctcatcttcaaggacaagaagaattattgtcatcacaagagaaatctcctggcaccaaggatgtggtagtaagtgtggaatatagtaaaaagtccgatttagatacttccaaaccactcagtgaaaaaccaattacacacaaagttgaggaagaggatggcaagactgcaactcaaccactgttgaaaaaagaatccaaaggccctattgtgcctttaaatgtagctgaccaaaagcttcttgaagctagtacacagtttcagaaaaaacaaggaaagaatactattgatgtctggtggctttttgatgatggaggtttgaccttattgataccttaccttctgacgaccaagaaaaaatggaaagactgtaagatcagagtattcattggtggaaagataaacagaatagaccatgaccggagagcgatggctactttgcttagcaagttccggatagacttttctgatatcatggttctaggagatatcataccaaaccaagaaagaaaatattatagcttttgagaaatcattgagccat

SEQ ID NO: 185463 - DNA, 2063 bp, Homo Sapiens
  misc_feature (1926)..(1937): n is a, c, g, or t
ttggcgccccttccggcgcggggagggcgctgaagatcggggccgctcggccgcaggccgcctccagcgccgcgggatgtagcgcgggggaccgcggcccccagcagagcccgcctgcccggcttgtctaccatcagagggagatctctgccccctggggctgagagaccccaacctttccccaagctgaagctgcagggtattgaggtaccagccagatgtcttcccacaaaggatctgtggtggcacaggggaatggggctcctgccagtaacagggaagctgacacggtggaactggctgaactgggacccctgctagaagagaagggcaaacgggtaatcgccaacccacccaaagctgaagaagagcaaacatgcccagtgccccaggaagaagaggaggaggtgcgggtactgacacttcccctgcaagcccaccacgccatggagaagatggaagagtttgtgtacaaggtctgggagggacgttggagggtcatcccatatgatgtgctccctgactggctaaaggacaacgactatctgctacatggtcatagacctcccatgccctcctttcgggcttgcttcaagagcatcttccgcattcatacagaaactggcaacatctggacccatctgcttggtttcgtgctgtttctctttttgggaatcttgaccatgctcagaccaaatatgtacttcatggcccctctacaggagaaggtggtttttgggatgttctttttgggtgcagtgctctgcctcagcttctcctggctctttcacaccgtctattgtcattcagagaaagtctctcggactttttccaaactggactattcagggattgctcttctaattatggggagctttgtcccctggctctattattccttctactgctccccacagccacggctcatctacctctccatcgtctgtgtcctgggcatttctgccatcattgtggcgcagtgggaccggtttgccactcctaagcaccggcagacaagagcaggcgtgttcctgggacttggcttgagtggcgtcgtgcccaccatgcactttactatcgctgagggctttgtcaaggccaccacagtgggccagatgggctggttcttcctcatggctgtgatgtacatcactggagctggcctttatgctgctcgaattcctgagcgcttctttcctggaaaatttgacatatggttccagtctcatcagattttccatgtcctggtggtggcagcagcctttgtccacttctatggagtctccaaccttcaggaattccgttacggcctagaaggcggctgtactgatgacacccttctctgagccttcccacctgcggggtggaggaggaacttcccaagtgcttttaaaaataacttctttgctgaagtgagaggaagagtctgagttgtctgtttctagaagaaacctcttagagaattcagtaccaaccaagcttcagcccactttcacacccactgggcaataaactttccatttccattctcctagctggggatggggcatggtcaaacttagccatcccctcctcagcaaggcatctaccggcccctcacagagacagtactttgaaactcatgttgagattttaccctctcctccaaccattttgggaaaattatggactgggactcttcagaaattctgtcttttcttctggaagaaaatgtccctcccttacccccatccttaactttgtatcctggcttataacaggccatccatttttgtagcacacttttcaaaaacaattatataccctggtcccatctttctagggcctggatctgcttatagagcaggaagaataaagccaccaacttttacctagcccggctaatcatggaagtgtgtccaggcttcaagtaacttgagttttaannnnnnnnnnnncttggcagagtaatgtaaaatttaaatggggaaagatatttaatatttaatactaagctttaaaaagaaacctgctatcattgctatgtatcttgatgcaaagactatgaagttaataaaagaaag

SEQ ID NO: 185464 - DNA, 1325 bp, Homo Sapiens
ttggcgcccagcccagaagctaattttttaatattgtatatggtcttatttatacttgaagttttgtgaacgtcgctaaacaggataggactaaaatttccaattctcctacactctgtcagaagcctagaactcactaaactgggctgcctttcccaaatgggaaaggtgctgacagagttggagaaaaaagaatagactcatttttccccattattggtatgtaggcattggtacagccccttctggggcagtctttgcaggataacatgctatacctgctaagattcaagctgttttcctcacactggactttaggccaaacccagtaccacgcaatgtgcaagcaagggcaggaggtaggtccaatctgacccctccctgtctcattttaatgactggacagcgctcggtgaaggctgtgttcactgtagtgggccatcatttgtttccttcttcttgtaaaagaccaagcaaatgcactctgctttttgctgctgtaagaccaccaaaaatgagtcagaaacacagaagactatttcaggcatgtgggcctggatatgctccttgagacttctggcaaacttctgctgggaattagtttgagggtgagggtacatatgtgacatttgccctagcctaagagtagcaggtaaaaaaaagtttctttcatcttttgccttactgataataccataatccccctcaattcagaccttctgattgagtgcagaggagactagacagtctcctctagacaggttgtagacacaccctcccctaacaaaaacaaaacgaaagagttcatactctgattttccaacatctaggaaactgagttttatttcctagctctaaggcagccttactatatgtcagtaaagtgctgaaaactgtatatttagcagtagcacccaaaaccaagcctttaaccccaacaatgtgtgtatcttttgcacagcaaaaactgcgaggccagaactagtttatctgaacacctcagctgctgtaagcttctcctctctcaccccgtaaactgacaagcatgatgaaaaaagaagcagatccaagtttctgcctcttttaaatgtacttgactttgcaaggcaagtagttttacagccatttctgttcacacttttcaccccacaacttggggatctagctgagacatttctacctcgaacaagtcacatgtaccacaggttcctgaataattcctgcagggctggtgacagacataacagctctggttttatatatcttgggtatctctaaagccaataaggataacattatctacccagagagtttagaagaaaagt

SEQ ID NO: 185465 - DNA, 1698 bp, Homo Sapiens
tacaaaaaagttggctaaggcgtcggttggcgcgcaacgggttctaggctgcaggcagctcgaggacccgcggccccgccccggctcggcctggcagatagcagaggcagcaggccgtgccgggggggcatgttgctgtaaccagtggcccaggggatgttacggtggacagtgcacctggagggcgggccccgcagggtgaaccatgctgcagtggctgtcgggcatcgggtatactccttcgggggttactgctctggtgaagactatgagacactgcgtcagatagatgtgcacattttcaatgcagtgtccttgcgttggacaaagctgcccccggtgaagtctgccatccgtgggcaagctcctgtggtaccctacatgcgctatggacactcaaccgtcctcatcgacgacacagtcctcctttggggcgggcggaatgacaccgaaggggcctgcaatgtgctctatgcctttgacgtcaatacgcacaagtggttcacaccccgagtgtcagggacagttcctggggcccgggatggacattcagcctgtgtcctaggcaagatcatgtacatttttgggggctacgagcagcaggcggactgtttttccaatgacattcacaagctagataccagcaccatgacatggactcttatctgtacaaagggcagccctgcacgctggagggacttccactcagccacaatgctgggaagtcacatgtatgtctttgggggccgtgccgaccgctttgggccattccattccaacaatgagatttactgcaaccgcattcgagtctttgacaccagaactgaggcttggctggactgtcccccgactccagtgctgcctgaggggcgccggagccactcggcctttggctacaatggggagctgtacatctttggtggttataatgcaaggctgaaccggcacttccatgacctctggaagtttaatcctgtgtcctttacctggaaaaagattgaaccgaaggggaaggggccatgtccccgccggcgccagtgctgctgtattgttggtgacaagattgtcctctttgggggtaccagtccatctcctgaggaaggcctgggagatgaatttgaccttatagatcattctgacttacacattttggactttagccctagtctgaagactctgtgcaaactggccgtgattcagtataacctagaccagtcctgtttgcctcatgatatcaggtgggagctgaatgccatgaccaccaacagcaatatcagtcgccccatcgtctcctcccatgggtaggaggaagtttctgccacctcccctcctgagcctgctgtcatcttcactgcccctgcccatctgtcacccacctgctcctttgacccctggacttggtatacctccatgtggagttgttgggcgagaggtgttctctgtgctgtgaattcagtggggagctgtagcggggtgggggctaggttcctccccccttgggccgagggccccttccccttggtgctctgtccccatccacctcctttcagctgctcctgggcctcagctctgcccagggccagccaggttctgctgggaagggaagggaatggggagaaggagaagcaagcagtgtctgagcctcaggagcttccccctccccctttgcctatcccctcccctctgcttgagccttga

SEQ ID NO: 185466 - DNA, 1292 bp, Homo Sapiens
ttggcaaagagtcagctgggaacagccagtggcacctgctccagagggaacagtccgacctggacttcttcagccccaggccggggaccgctgcctgtggcgcctccgatgctcctctgctccagccctcagccccctcctcaagcagctcccaagctccactgccgcctcccttcccagctcctgtggtcccagccagtgttcctgcccccagtgcgggctcctccttgttttctactggagtggccccagccttggccccaaaagttgagcccgcagtccctgggcaccatggcttggcgttgggcaacagcgcgctgcaccacctggatgccctcgatcagcttctagaagaggccaaagtgacctcgggcttggtgaaacccactacctcccctctcatccccaccaccaccccagccaggcccctcctgcccttctccacggggcccggcagcccgctcttccagccactgagtttccagtcccagggcagccccccgaaggggcctgagctctccctggccagcatccacgtgcccctggaatcgatcaagcctagcagtgcccttcctgtgacagcctacgataaaaacggcttccgcatcctcttccactttgccaaggagtgtcccccaggacgacctgacgtgctggtggtggtggtgtccatgctgaacacggctcccttacctgtcaagagcatcgtgctgcaggctgcagtgcccaagtcaatgaaagtgaagttgcagccaccttctgggacagaactctctccatttagccccatccagccacctgcagccatcacccaggtcatgttgctggccaatccactgaaggagaaggtgcggcttcggtataagctgaccttcgccctgggggagcagctgagcacagaggtgggcgaggtggaccagttccctcctgtggaacagtgggggaacctatgaccccagaggacgctgtgatctccaccttgaagccaggcaggctgccctgagacgaggagggctctggtcccgtcactctccatgccctgacaacagtgcttgtagctttgatgtggaacaggggccctgggcatttctgctgagaaccaaactgctgctgtgataacctctcctttggcccctaaaaggacctgtttttatctacctgtgtgacttgaagtggccatatgctgtcaggggtgcggagtggcccctgacttcactgctgtcccgggaacatggacccccaggcttggcgtaggtgtttgcttccttctactggcattcactgaagccact

SEQ ID NO: 185467 - DNA, 1765 bp, Homo Sapiens
ttggatggctgcagtgaatgtgggaaagcctacagttggaaatcacagcttcttttacaccagagaagtcacacaggagtgaaaccgtatgaatgcagcgaatgtgggaaagcctttagtttgaagtctccattcgttgtacaccagagaactcatacaggagtgaaaccccataaatgcagtgaatgtgggaaagcctttaggagtaagtcctatctccttgttcacatccgaatgcatacaggagaaaaaccctatcaatgcagtgattgtgggaaagccttcaatatgaagacacaactcattgtacatcagggagttcacacaggaaataatccttatcaatgcggtgaatgtgggaaagcctttggtaggaaggaacagctcactgcacatctgagagctcatgcaggagagaagccctatggatgcagtgaatgtgggaaggctttcagcagcaagtcataccttgttatacataggagaacacacaccggagagagaccctatgaatgtagtttgtgtgagagagccttttgtggaaaatcacagctgattatacatcagagaactcattcaactgagaagccctatgaatgcaatgaatgtgaaaaagcctaccctaggaaggcatcacttcagatacaccagaaaactcattcgggagagaaaccttttaaatgcagtgaatgtggaaaagccttcactcagaagtcatctctcagtgaacatcagagagttcacactggagagaaaccatggaaatgctctgaatgtgggaaatccttctgttggaattcagggcttcgtatacatcggaagactcataaatgagaaatcagaatgatgcaatgtgagaaactgatgttcaggagacttcggataatatagacaggatttacaagcaggaggccctaaaattacactcatgtcaaaaatcagagaggagagagaccaaccatatttgggatgagtgtaaaagctttcagaaataagttacaaatctttgtagatgaaaataatggaaggaatgtggagcaataaatgtatcaaatgttgtagtatcatcatgaagattcagagaatttacactaggaacaccttataagttgaataaattaaggaagcattttcccattgaaagtgtgttccatggaaagtcacattccagatttgaagctgtgtttttgtaaaataaaatcttggtatgaacagttgacttcatggtggagtataaagttgtttttttaaaaatatgtaaataatgttcaggaaaaacgcagggaacagagtcttaaagttaatggatatttaatgtgactttcctgagttaacactgaatagtatttctaaaattttttgtactttattttttaatgtaacttgttctatctatctatatatatatttgatagtttgtggaataatatcccccagtattttccatattaaatgctaattatcttttgatttctttttcataagcagatctggcatttattacagggctgccgcttaagagaactcattataatgaacgtttattatattttgcagttccatgcctgttgtccattgattgacatgagcacccctgttttctctggagaaatacctcccctctctggggtgcttcctgtggtagtgtctttcaggtatccgttccactagctacaggtgagcattttacccattgtttggataatggtaatctctttttcagaaattttgagtctgtaaatcatttggtacatgaaccagaaaa

SEQ ID NO: 185468 - DNA, 1843 bp, Homo Sapiens
  misc_feature (150)..(163): n is a, c, g, or t
ttgggaaataatgggattagaaacaaacaaaactcttaagtcctaaaagttctcaatgtagaggcataaacctgtgctgaacataacttctcatgtatattacccaatggaaaatataatgatcagcaaaaagactggatttgcagaagnnnnnnnnnnnnnncttcatgcctgatgaaagctttggcgaccccaatatatgtattttttgaatctatgaacctgaaaagggtcagaaggatgcccagacatcagcctccttctttcaccccttaccccaaagagaaagagtttgaaactcgagaccataaagatattctttagtggaggctggatgtgcattagcctggatcctcagttctcaaatgtgtgtggcagccaggatgactagatcctgggtttccatccttgagattctgaagtatgaagtctgagggaaaccagagtctgtatttttctaaactccctggctgttctgatcggccagttttcggaaacactgacttaggtttcaggaagttgccatgggaaacaaataatttgaactttggaacagggttggaattcaaccacgcaggaagcctactatttaaatccttggcttcaggttagtgacatttaatgccatctagctagcaattgcgaccttaatttaactttccagtcttagctgaggctgagaaagctaaagtttggttttgacaggttttccaaaagtaaagatgctacttcccactgtatgggggagattgaactttccccgtctcccgtcttctgcctcccactccataccccgccaaggaaaggcatgtacaaaaattatgcaattcagtgttccaagtctctgtgtaaccagctcagtgttttggtggaaaaaacattttaagttttactgataatttgaggttagatgggaggatgaattgtcacatctatccacactgtcaaacaggttggtgtgggttcattggcattctttgcaatactgcttaattgctgataccatatgaatgaaacatgggctgtgattactgcaatcactgtgctatcggcagatgatgctttggaagatgcagaagcaataataaagtacttgactacctactggtgtaatctcaatgcaagccccaactttcttatccaactttttcatagtaagtgcgaagactgagccagattggccaattaaaaacgaaaacctgactaggttctgtagagccaattagacttgaaatacgtttgtgtttctagaatcacagctcaagcattctgtttatcgctcactctcccttgtacagccttattttgttggtgctttgcattttgatattgctgtgagccttgcatgacatcatgaggccggatgaaacttctcagtccagcagtttccagtcctaacaaatgctcccacctgaatttgtatatgactgcatttgtgggtgtgtgtgtgttttcagcaaattccagatttgtttccttttggcctcctgcaaagtctccagaagaaaatttgccaatctttcctactttctatttttatgatgacaatcaaagccggcctgagaaacactatttgtgactttttaaacgattagtgatgtccttaaaatgtggtctgccaatctgtacaaaatggtcctatttttgtgaagagggacataagataaaatgatgttatacatcaatatgtatatatgtatttctatatagacttggagaatactgccaaaacatttatgacaagctgtatcactgccttcgtttatatttttttaactgtgatattccccacaggcacattaactgttgcacttttgaatgtcaaaatttatatttttagaaa

SEQ ID NO: 185469 - DNA, 1372 bp, Homo Sapiens
ctttgtacaaaaaagttggcacagattcccctgtacctggacacgatgcaggtcatgaagtggttccagacggccctcaccagagcctggaagggcatcgcccacaagtacgagttcgacctggcctttggccagctggacagcccggggtccctgaagatcaagttccgttcagggaagttcatgcccttcaacctgattcctgtgatccagtgtgatgactcggacctgtactttgtctcccaccttcccagggagccctctgagggcaccccagcctccagcacagactggctcctgtcctttgctgtctatgagcgacacttcctcaggacgacactaaaggcactgcccgagggcgcctgccacctcagctgcctgcagatagcatccttcctgctctccaagcagagccgcctgaccggtcccagcgggctcagcagctaccacctgaagacggccctactgcacctcctactcctccggcaggccgccgactggaaggcggggcagctggacgctcgtctgcacgagttgctgtgcttcctggagaagagcttgctccagaagaagctccaccacttcttcatcggcaaccgcaaggtgcctgaggccatgggactccctgaggccgtgctcagggccgagcccctcaacctcttccggcccttcgtcctgcagcgaagcctttaccgtaagacactggactccttctatgagatgctcaagaatgccccagcgctcattagcgagtattccctacatgtcccctcagaccagcctaccccaaaaagctgacgtcttttacagaatgtgggatcctcgagctaagatgagggcatccctcacgttcacacccctggtggcatctgccagccctgttctggggacaaggcgggctttcgtgggagccgtgctcagcctgccaggaagccaagccctacagtgcagaggaaacagaatttcaacgggaagctggtttgcttcataccattgggatctgctggtaaagctgttatttgggtttagggactgatcccttgcagtttacttctggatcaccatgaatggccaagatggtggcagaacacgctgtggaccctgagttagagacaatgcaaatgttggattgggtgtaattctttttgaatcccagatccagtctgtacttgaatatgagcagaggatctacaagaatgctgacagggaaccgtgttaagacccagcacccctattcccaggagcttctggcctgaccatctgcagccaaagcactaacagggacagatatgggaatgtccacctttgatccgcatcctgcacaatagtggtcccaccatggctgccacttttttatactatttggagaaaa

SEQ ID NO: 185470 - DNA, 1603 bp, Homo Sapiens
  misc_feature (1447)..(1461): n is a, c, g, or t
ttgggcatgggacaaaccgtagattaatgtaaaaatgagattctgctctcctccttgtctctgttttctctaaatactaggataaagacagttgatacttacaactagattataaatttgaaagcaaaagccttcatgtctttgttctctccctacgttttagaatatctagtacaattttgcctgtgtagtacatgcttaataaatatctgttaaataaagtctctaatgcataaggacaaaagagtagctacttaccttcaccaagagctttttgaagtggagcaggctgggatatagaaaaggagagagcactgtgctgttctagtttacttactctgggtaaaaattgcttcagaaccataatcacaactcctttccctccatctacctttattgccacctttttttcacttcctccctttctcctaattagaagggttgggctctgagttaatgaaagtaaagaagagaaccatttttattatttatcttttatcatttcaagtccaagccaaagggtttatagatggaataacttgtgctggactagattattctaggcccgtgtgggcccattccatatccctcatctactgtagaactcagctagtcattagtgaccgtagtttatttctataattcagattctaggcttagtaccatacatttgctaatgcattcattttccccaggtgcaggagtagccctgctgaatgaccatatttatgtggtgggggggatttgatggtacagcccacctttcttccgttgaagcatacaacattcgcactgattcctggacaactgtcaccagtatgaccactccacgatgctatgtaggggccacagtgcttcgggggagactctatgcaattgcaggatatgatggtaattccctgctaagtagcattgaatgttatgaccctatcatcgacagctgggaagtcgtgacatccatgggaacccagcgctgtgatgctggtgtttgtgttctccgcgagaagtgaccattgttggagcaccatccagagctagtgaccagtccagtggacagttagtgggagaatcaaaaatcctttccagaatgtctgtttctcactatgtgcaccgggtgattacaggcaccagtgcagtgatgattgtacttatttgacacatactccccgtcgtcctggttcttgttcctgagaagggtgggtaacagatattccaggaaaaagaatgcacattgaatggatgtgagagaccacattgcctctcccactgctttggggagcactttcctgtcatttctaacttaccacatgcttggtgtactatatgtacgttgtgcctcatatgttgcaaagaactaaggtgagtatagcctactagatatgggcaatatccagcctagatgattggaaagataccagtttaagtaaacttggtaaaatccaagtcnnnnnnnnnnnnnnnccaggaacaactacattttctcatatacaggtagctaggggcaacacagtttccattctagagggaaacaaaagggagagccccacaaaaactttggggacaaggggagagagagactcatctgacacttcttttggaggtc

SEQ ID NO: 185471 - DNA, 2685 bp, Homo Sapiens
  misc_feature (63)..(88): n is a, c, g, or t
ttggagcgcctgcacgtcgcgcgcggtgttcgattgtcgctgcctggggaggaggagccggannnnnnnnnnnnnnnnnnnnnnnnnngggcttcgttcgtaaggaagggggcctaggcccgggcctgcggtggtgggggttgctgcgcgccgggggtcgctcctgctgtgtcttccgctccagcttcgcccacttccccttgccagcggggtgggcgcggagaagacctgccggagccatggaggacgaagtggtccgctttgccaagaagatggacaagatggtgcagaagaagaacgcggctggagcattggatttgctaaaggagcttaagaatattcctatgaccctggaattactgcagtccacaagaatcggaatgtcagttaatgctattcgcaagcagagtacagatgaggaagttacatctttggcaaagtctctcatcaaatcctggaaaaaattattagatgggccatcaactgagaaagaccttgacgaaaagaagaaagaacctgcaattacatcgcagaacagccctgaggcaagagaagaaagtacttccagcggcaatgtaagcaacagaaaggatgagacaaatgctcgagatacttatgtttcatcctttcctcgggcaccaagcacttctgattctgtgcggttgaagtgtagggagatgcttgctgcagctcttcgaacaggggatgactacattgcaattggagctgatgaggaagaattaggatctcaaattgaagaagctatatatcaagaaataaggaatacagacatgaaatacaaaaatagagtacgaagtaggatatcaaatcttaaagatgcaaaaaatccaaatttaaggaaaaatgtcctctgtgggaatattcctcctgacttatttgctagaatgacagcagaggaaatggctagtgatgagctgaaagagatgcggaaaaacttgaccaaagaagccatcagagagcatcagatggccaagactggtgggacccagactgacttgttcacatgtggcaaatgtaaaaagaagaattgcacttacacacaggtacaaacccgtagtgctgatgaaccaatgacaacatttgttgtctgtaatgaatgtggaaatcgatggaagttctgttgagttggaagaattggcaaaatatctggaccattaagaaaacggattttgtaactagctttaaactaggccaagcaactagttttcctgcaaatcaaatttttaaagcaacttgggttagactttgtttttgacctaacatcccttccttaaatgccttctgtagtttcagatcagtagggagaccatataataattttatggtacctgtttcaaaacatattttttctgtttttataagtaagttgatattaattaaactcttggcaatatttcttctttcttaaaggaaaatataccttaactttttttcttttacactgtgaaacatacacagtagaaattctgttactctctgttattaatacataaatgaaaatacatttttttccatattggcatgtagctacaaatattaaaggaggagaaaaggtaatataattttaggtttaccaaatatggtgtgtattcaaataatacttgaccagcttatctaaaatgtacataattttgaggtagcttatgaatttgattttaattattatgttcacaagcttggaatattagatattattttgcatctgtaactaaccgtgatcatcatttcttgtaatttcttgtacatgtatattacttgttcttaatagatttttggaaacaagactttattgagatcagtttggttttcctgttaatttacctgtttgactttataatgtgttttagttttgcagaagaacactgttgtagtttagaaggcttttcataaatcccctcataggcaaagatgaaaacttcccactatttttttcccctcttaggaagacatactggaaagaaaatgtttagcatcttagtgtagtatagctattgtaaacagttcatgactagattttgattcggaaatctatactgaccaaggattaatcttaaggattgtataattcattaaagctgtggtctttccatgtggagactgatagaaaataattttgtcccaagtcttatttgctgactttttctgtcatgagtgagattgttgaacaaactgaatatatgggctatagcaagtagctttacagtacagatcttacaattaagttttgcttttgttaaagtgtgtaccattttttctgtttggagtaagacaaaaattgttttgacataggttccctagggtacacttgctctagcatactttaaaggccactgttgcaaagtctacattttatgctgaatctgcattctgtcaggcacccgtagaaagacctcagtacatgctttgcactctcctttgctccctttttccaatttcttattgcatatcattttgttgtaatacagaaagcagcatttttaaatgtccgtgttaagaattggcccactggtaccaactcacctctattttgtcagttcatagttgaagattttgttttatttcaaaaacaaagtacatttttgaaataatgtttcagaataaaataatctcacttttaagtgatccattttaaaatttgtaattcaataaagttttttttgttgt

SEQ ID NO: 185472 - DNA, 969 bp, Homo Sapiens
  misc_feature (124)..(140): n is a, c, g, or t
ttggggcataaccaaaaagaagatgagtggagagaggcaacatttatagagctcaggtttctagggctggagagggatctggagggacacacaggagacacctggcataaccaaaaaatgattnnnnnnnnnnnnnnnnngaaacatctatggagcatgggacacggggagtggaggcagctaaaagccatctcatctttcaccgtattcaacaagcccattataacaagtctttcacgctcaaccattcaaacaatcccaacaatcccagcctaagaatttcctggcatttgatgaaaatggctgtgggttttgctatctttaagctccctgggaagcaggatataagcccagggctggcaggctctttctagctacctgctcttgcacatagagtttgcctcatggttgcaagaaggctgccatagctccagatggcacatagacattccaggcagcaggaaaaaggaaggagcacttaaccgaaggaggtcagggagttggttagtctccacctgaagaagagagccatgaaccagcttcagttgactaacgggctcctgtgagtgcatctttggacttttctggaggttgaaatctagatgtggtatgtgtcttaaagcagccaccaactcctcccattaccttccaagtgagcccaactacacgatggagcctcttccctgcccttggatctgggctgagcctctgacttgcgttgaccaacagaatgcagtgaaagtgatgccgatactaccctccctgccctagacttgggatacctggcagctatattcttccattcctcaggacttgcaaaaacgggtctcagcatgccttcccagagccatgaggtgtttctttgcccattcattgatctgagaagtgagtgtaaggagtttaaatcaacctctgttctgtgctagttaagtaataaagttgcatgcaatccacgggggtaggtacctg

SEQ ID NO: 185473 - DNA, 3698 bp, Homo Sapiens
ttggaattgttcctcgtctgataagacaacagtggagaaaggacgcatgctgtttcttagggacacggctgacttccagatatgaccatgtatttgtggcttaaactcttggcatttggctttgcctttctggacacagaagtatttgtgacagggcaaagcccaacaccttcccccactgatgcctaccttaatgcctctgaaacaaccactctgagcccttctggaagcgctgtcatttcaaccacaacaatagctactactccatctaagccaacatgtgatgaaaaatatgcaaacatcactgtggattacttatataacaaggaaactaaattatttacagcaaagctaaatgttaatgagaatgtggaatgtggaaacaatacttgcacaaacaatgaggtgcataaccttacagaatgtaaaaatgcgtctgtttccatatctcataattcatgtactgctcctgataagacattaatattagatgtgccaccaggggttgaaaagtttcagttacatgattgtacacaagttgaaaaagcagatactactatttgtttaaaatggaaaaatattgaaacctttacttgtgatacacagaatattacctacagatttcagtgtggtaatatgatatttgataataaagaaattaaattagaaaaccttgaacccgaacatgagtataagtgtgactcagaaatactctataataaccacaagtttactaacgcaagtaaaattattaaaacagattttgggagtccaggagagcctcagattattttttgtagaagtgaagctgcacatcaaggagtaattacctggaatccccctcaaagatcatttcataattttaccctctgttatataaaagagacagaaaaagattgcctcaatctggataaaaacctgatcaaatatgatttgcaaaatttaaaaccttatacgaaatatgttttatcattacatgcctacatcattgcaaaagtgcaacgtaatggaagtgctgcaatgtgtcatttcacaactaaaagtgctcctccaagccaggtctggaacatgactgtctccatgacatcagataatagtatgcatgtcaagtgtaggcctcccagggaccgtaatggcccccatgaacgttaccatttggaagttgaagctggaaatactctggttagaaatgagtcgcataagaattgcgatttccgtgtaaaagatcttcaatattcaacagactacacttttaaggcctattttcacaatggagactatcctggagaaccctttattttacatcattcaacatcttataattctaaggcactgatagcatttctggcatttctgattattgtgacatcaatagccctgcttgttgttctctacaaaatctatgatctacataagaaaagatcctgcaatttagatgaacagcaggagcttgttgaaagggatgatgaaaaacaactgatgaatgtggagccaatccatgcagatattttgttggaaacttataagaggaagattgctgatgaaggaagactttttctggctgaatttcagagcatcccgcgggtgttcagcaagtttcctataaaggaagctcgaaagccctttaaccagaataaaaaccgttatgttgacattcttccttatgattataaccgtgttgaactctctgagataaacggagatgcagggtcaaactacataaatgccagctatattgatggtttcaaagaacccaggaaatacattgctgcacaaggtcccagggatgaaactgttgatgatttctggaggatgatttgggaacagaaagccacagttattgtcatggtcactcgatgtgaagaaggaaacaggaacaagtgtgcagaatactggccgtcaatggaagagggcactcgggcttttggagatgttgttgtaaagatcaaccagcacaaaagatgtccagattacatcattcagaaattgaacattgtaaataaaaaagaaaaagcaactggaagagaggtgactcacattcagttcaccagctggccagaccacggggtgcctgaggatcctcacttgctcctcaaactgagaaggagagtgaatgccttcagcaatttcttcagtggtcccattgtggtgcactgcagtgctggtgttgggcgcacaggaacctatatcggaattgatgccatgctagaaggcctggaagccgagaacaaagtggatgtttatggttatgttgtcaagctaaggcgacagagatgcctgatggttcaagtagaggcccagtacatcttgatccatcaggctttggtggaatacaatcagtttggagaaacagaagtgaatttgtctgaattacatccatatctacataacatgaagaaaagggatccacccagtgagccgtctccactagaggctgaattccagagacttccttcatatatgagctggaggacacagcacattggaaatcaagaagaaaataaaagtaaaaacaggaattctaatgtcatcccatatgactataacagagtgccacttaaacatgagctggaaatgagtaaagagagtgagcatgattcagatgaatcctctgatgatgacagtgattcagaggaaccaagcaaatacatcaatgcatcttttataatgagctactggaaacctgaagtgatgattgctgctcagggaccactgaaggagaccattggtgacttttggcagatgatcttccaaagaaaagtcaaagttattgttatgctgacagaactgaaacatggagaccaggaaatctgtgctcagtactggggagaaggaaagcaaacatatggagatattgaagttgacctgaaagacacagacaaatcttcaacttatacccttcgtgtctttgaactgagacattccaagaggaaagactctcgaactgtgtaccagtaccaatatacaaactggagtgtggagcagcttcctgcagaacccaaggaattaatctctatgattcaggtcgtcaaacaaaaacttccccagaagaattcctctgaagggaacaagcatcacaagagtacacctctactcattcactgcagggatggatctcagcaaacgggaatattttgtgctttgttaaatctcttagaaagtgcggaaacagaagaggtagtggatatttttcaagtggtaaaagctctacgcaaagctaggccaggcatggtttccacattcgagcaatatcaattcctatatgacgtcattgccagcacctaccctgctcagaatggacaagtaaagaaaaacaaccatcaagaagataaaattgaatttgataatgaagtggacaaagtaaagcaggatgctaattgtgttaatccacttggtgccccagaaaagctctctgaagcaaaggaacaggctgaaggttctgaacccacgagtggcactgaggggccagaacattctgtcaatggtcctgcaagtccagctttaaatcaaggttcataggaaaagacataaatgaggaaactccaaacctcctgttagctgttatttctatttttgtagaagtaggaagtgaaaataaggtatacagtggattaattaaatgcagcgaaccaatatttgtagaagggttatattttactactgtggaaaaatatttagatagttttggcagaacagtt

SEQ ID NO: 185474 - DNA, 1114 bp, Homo Sapiens
  misc_feature (343)..(384): n is a, c, g, or t
actttgtacaaaaaagttggcccacgagtggccctgaggggccagaacattctgtcaatggtcctgcaagtccagctttaaatcaaggttcataggaaaagacataaatgaggaaactccaaacctcctgttagctgttatttctatttttgtagaagtaggaagtgaaaataggtatacagtggattaattaaatgcagcgaaccaatatttgtagaagggttatattttactactgtggaaaaatatttaagatagttttgccagaacagtttgtacagacgtatgcttattttaaaattttatctcttattcagtaaaaaacaacttctttgtaatcgtnnnnnnnnnnnnnnnnnnnnnnnnnnnnnnnnnnnnnnnnnnagagacagagaaagagagagaattctttcaagtgaatctaaaagcttttgcttttcctttgtttttatgaagaaaaaatacattttatattagaagtgttaacttagcttgaaggatctgtttttaaaaatcataaactgtgtgcagactcaataaaatcatgtacatttctgaaatgacctcaagatgtcctccttgttctactcatatatatctatcttatatagtttactattttacttctagagatagtacataaaggtggtatgtgtgtgtatgctactacaaaaaagttgttaactaaattaacattgggaaatcttatattccatatattagcatttagtccaatgtctttttaagcttatttaattaaaaaatttccagtgagcttatcatgctgtctttacatggggttttcaattttgcatgctcgattattccctgtacaatatttaaaatttattgcttgatacttttgacaacaaattaggttttgtacaattgaacttaaataaatgtcattaaaataaataaatgcaatatgtattaatattcattgtataaaaatagaagaatacaaacatatttgttaaatatttacatatgaaatttaatatagctatttttatggaatttttcattgatatgaaaaatatgatattgcatatgcatagttcccatgttaaatcccattcataactttcattaaagcatttactttgaattt

SEQ ID NO: 185475 - DNA, 1922 bp, Homo Sapiens
  misc_feature (137)..(159): n is a, c, g, or t
ttacaggaataatttaaaccaactcaatctatctttaaaaatctcctgccttcaaatgcccagcaacccttataaggtaggggcagccctttgacagcaacattcatcattcaccaggaatgtagaaccacaagtgnnnnnnnnnnnnnnnnnnnnnnngattaaatcattcccaacaattcctatttgcttttccaaagcatgctatgtctaattctgcctttctatgcagacaggtgggagagggagcccatagagtatattaatgttaattaaattaacttcctttaaaagctaacaggatggcttagtgtggatgaggatgaactgctgtggatgacactagcagataatgaagtaaactttaaacccagattagtaacatgtactccagtaactgaccagctcagatagagacttctcatttactctggatcacatgtacaatattttaccttccaattaaatatagtgccaaaatctttcaaaatagatagagaataggcttcttagaaattcaaataaaaatgttaaataataaaaactggtggcctattatagagtttctgacagactccaatatactgggtaccagaaagtaactctatctcagatgctagtaaaaaggtaaattttgtatatacataaaagacaatattacgagactgtagtgtcatttgtcaaaacaagaatatctagaatggaattttcagtaaacacttgggatgaagggcaatcagaatacaagaggaagcaaaatccacataagttaattcctaatttgagaaatcaatagaatcaataaattgataattactgtctccataggtcacgaattccaaagactagttagtagttagtttctaactaaatgattacaggacgttctgatatatgctgtcttcttgtgatcagtttgttctggcaagacttcaacaagcacttgcccttgaaaacagctcagcgggagaacgatcggaggcaatcacttcgttttataaactagccagataataagtcccaagattagaataatcactgacaggacaagcaccaggatacacatcttcttgcgagattttttctgatagtaagcagctcgctgtaactgttcagtggctctttcgacgtgcacctctgagctttccacattggcttctatgctatcaatcagatcaccctggtcatggatcatcatggccaaatctttaaatatctgattgacatccaaaatgtcagcctccagctgccgaattgccgtttctctttctttaataagttccaaatcctgctcagtgatggccacctcatcctcctggctctgcatctggttccactcctcatggctgtcaaatgagaccagctgctcctctctttgcctctcttctgcagaaagacgagatccagctcttgctctggcaatactctccttttccttttcagatacccttctctgcacagcctggaaattgtttaaggctgcagagaagtcattcatgaggcgttccttctgaagtctctgctggcgctgttctgaagtagataagggaaggggcaaggaccctaattctttcagcaattcatttgtttccttggcgagctgatttgtggagtgttgtaactgttgcagattttcctgtagcttgcttgagtcctgcttagttcctagctggctcatcaaattctttatctgagcagtggcttggctgatccgctggatgttgccgctgcacgtctggatgatgctgctgaagtcccggagctggggccccgagggccccgggttccggtacatgtctaagggaccgtatgacatgacgaggagctgagacctgctcgctctacaccgctctcctaccggaagcagccgccagccgggacccgcaggctgacggagaaactgggaagagcaagggcgccaa

SEQ ID NO: 185476 - DNA, 1535 bp, Homo Sapiens
ttggaactcttcctcctctgaaatctaaaccactgagctactcccacacataccctccacctccatgagatcctagcctctagagccctgttttcacacccgattgggagcttatgctaatggctctggttataagggttgccgttgccctgtggaaagccatcattagtgttcatttctacagatttggcatcaggggaaggaattcctgaaagtctctccattcttagaactagtgggttctctttgcttatgataactcatagcatttctcttagaactaaagctaaagctgtcagaagaacaagggagtgctcccaaaggtccacctagaaacctgttgtgtgagcaacccacagtccccagagaaaatgggaaaccggaagctgcgggcccggagccaagctcctctggagaagagactccagatgctgccttgacatgcctgaaggagagaagagagcaacttcctccccaggaggattctaaggtaactaagcaagacaagaacctcataaagccgctttatgaccgatacagaattatcaagcaaatcttgtcaacaccttcccttattccaacaattcaggaggaagaggactctgatgaagaccgtccacagggaagccaacaaccttctttggcagatccagcatctcaccttcctgttggtgaccacctcacctactctaatgagactgagcctgttagggcccttttaccagatgaaaagaaagaagtaaaaccaccagctctctccatgtctaatttacatgaggctaccatgcctgtacttcttgaccatctccgagaaactagggctgacaagaagagactgcggaaagccttaagagaatttgaagaacagttttttaaacaaacaggaagaagtccacaaaaggaagataggataccaatggcagatgagtattatgaatataagcacataaaagccaaactgagactattagaggtcctcatcagcaagcaagatgtggccaaaactatttgaggttcaggaaatgttatgatcactttcacccatgatataaagtaaagtttattttcctctgccatccttgctaagtagttttgacacaatgaaaatggaagcactttagtggtagtattagctgtttttaagaaggaatagcaagtttaattatatacaaggagaagggatttaaacggggggaagaatacaacaggtagccatataattgggaaaaaattcagtgtcctccatgccaagcagaaaactcatagtcaatacaagtatttttaaaaatgtctaatattttatcaaatctaaataacatagctaggacacttgttagggaaagtttatttagtatccaaagactgtttatgttgatgtatggaaaagagcatgattttaaaaaatcaatcataggaggaaaagaaattcgcttttcaagtaggaaggaatacagctagcaagaagcaatttatttgaaacttctaatggatttttgagtgataaaacatttactaccttgtcctttaagtctgct

SEQ ID NO: 185477 - DNA, 978 bp, Homo Sapiens
ctttgtacaaaaaagttggctcagaacagcctaatgatgggcctcagtaacctgagccccggtcctggccccagccaggccgtgcctctcccagaggggctgctccgccagcggtacagagaggagaagaccctggaagagcggcggtgggagaggctggagttccttcagaggaagaaagcattcctgcggcatgtgaggaggagacaccgcgatcacatggccccctatgctgttgggagggaagccagaatctccccattaggtgacagaagtcagaatcgattccgatgtgaatgtcgatactgccagagccacaggccgaatctttctgggatccctggggagagtaacagggccccacatccctcctcctgggagacgctggtgcagggcctcagtggcttgactctcagcctaggcaccaaccagcccgggcctctgcctgaagcggcactccagccacaggagacagaggagaagcgccagcgagagaggcagcaggagagcaaaataatgtttcagaggctgctcaagcagtggttagaggaaaactgagacgtgcacccccatgggatggagacccgaagggactcagacggagccgccgtgttggcagcgcctgggtgtgggcccattttggggaccaaacagcaagctgtggtcggatgagtgccaggacctgtgtaccgggacacgtgggagtcctcccagcatgatgcttgactgacccgaggaaggtcctcatgtttcgtgcctgtcattctcggatggctgtgagggcattcctttggcaagggacgctgcgtaccagcggtcctcaccgcatctcacatggctcctgtgatgcatgttgtcgctttcccaccctggatctccatctctcttcccttcctgctgtcagtaagagatcacatgtctgtgtagtgtgaatgccttgtcgctgtcctgtgcttttgcaccattgagttgactgcc

SEQ ID NO: 185478 - DNA, 1118 bp, Homo Sapiens
actttgtacaaaaaagttggggaggaacctgtctttaaagctgtccctgaagtgacagcggagagaaccaggcagcccagaaaccccaggcgtggagattgatcctgcgagagaagggggttcatcatggcggatgacctaaagcgattcttgtataaaaagttaccaagtgttgaagggctccatgccattgttgtgtcagatagagatggagtacctgttattaaagtggcaaatgacaatgctccagagcatgctttgcgacctggtttcttatccacttttgcccttgcaacagaccaaggaagcaaacttggactttccaaaaataaaagtatcatctgttactataacacctaccaggtggttcaatttaatcgtttacctttggtggtgagtttcatagccagcagcagtgccaatacaggactaattgtcagcctagaaaaggaacttgctccattgtttgaagaactgagacaagttgtggaagtttcttaatctgacagtggtttcagtgtgtaccttatcttcattataacaacacaatatcaatccagcaatctttagactacaataatacttttatccatgtgctcaagaaagggcccctttttccaacttatactaaagagctagcatatagatgtaatttatagatagatcagttgctatattttctggtgtagggtctttcttatttagtgagatctagggataccacagaaatggttcagtctatcacagctcccatggagttagtctggtcaccagatatggatgagagattctattcagtggatcagaatcaaactggtacattgatccacttgagccgttaagtgctgccaattgtacaatatgcccaggcttgcagaataaagccaactttttattgtgaataataataagacatatttttcttcagattatgttttatttctttgcattgagtgaggaacataaaatggcttggtaaaagtaataaaatcagtacaatcactaactttcctttgtacatattattttgcagtatagatgaatattactaatcagtttgattattctcagagggtgctgctctttaatgaaaatgaaaatatagctaatgttttttc

SEQ ID NO: 185479 - DNA, 2810 bp, Homo Sapiens
gccaactttgtacaaaaaagttggcatagtctcagagtcagatgtttcatcatttgaaatccaacatagtggatttgtgaagcagctgttgctttatttgacatctaaaagtgaaaaggatgctgtgagcagagagatcagattaaagcgatttcttcatgtatttttttcttctccacttcctggagaagagcccattggaagagtggaaccagtgggtaatgcacctttgttggcattagttcacaagatgaacaactgcctcagccagatggaacaatttccagtcaaagtacatgatttccctagtggaaatgggacaggaggcagcttttctctcaacagaggatcacaggctttaaaatttttcaacacacatcaattaaaatgccagttacaaaggcatccagactgtgcaaatgtgaagcagtggaagggtggacctgtcaagattgaccctctggctttggtacaagccatcgagagataccttgtagttagagggtatggaagagtaagagaagatgatgaagacagcgatgacgatggatcagatgaggaaatagatgagtctctggctgctcagttcctaaattcaggaaatgtaagacacaggctgcagttttatattggagaacatttgctgccgtataacatgactgtgtatcaggcagtacggcagtttagtatacaggctgaagatgaaagagaatccacagatgatgagagcaatcctctaggcagagctggtatttggacaaagactcatacaatatggtataaacctgtgagagaggatgaagaaagtaataaagattgtgttggtggtaaaagaggaagagcccaaacagctccaacgaaaacttcccctagaaatgcaaaaaagcatgatgagttatggcacgatggagtgtgcccatcagtatcaaatcctttagaagtttacctcattcccacaccacctgaaaatataacatttgaagacccgtcattagatgtgatccttcttttaagagttttacatgctatcagtcgatactggtattacttgtatgataatgcaatgtgcaaggaaattattccaactagtgaatttattaacagtaagttaacagcaaaagcaaataggcaacttcaagatcctttagtaatcatgacaggaaacatcccaacatggcttactgagctaggaaaaacctgcccatttttctttccttttgatacccggcaaatgcttttttatgtaactgcatttgatcgggaccgagcaatgcaaagattacttgataccaacccagaaatcaaccagtctgattctcaagatagcagagttgcacctagattggatagaaaaaaacgtactgtgaaccgagaggagctgctgaaacaggcggagtctgtgatgcaggacctcggcagctcacgggccatgttagaaatccagtatgaaaatgaggttggtacaggtcttgggcctacactggagttttatgcgcttgtatctcaggaactacagagagctgacttgggtctttggagaggtgaagaagtaactcttagcaatccaaaagggagccaagaagggaccaagtatattcaaaacctccagggcctgtttgcgcttccctttggtaggacagcaaagccagctcatatcgcaaaggttaagatgaagtttcgcttcttaggaaaattaatggccaaggctatcatggatttcagattggtggaccttccccttggcttacccttttataaatggatgctacggcaagaaacttcactgacatcacacgatttgtttgacatcgacccagttgtagccagatcagtttatcacctagaagacattgtcagacagaagaaaagacttgaacaagataaatcccagaccaaagagagtctacagtatgcattagaaaccttgactatgaatggctgctcagttgaagatctaggactggatttcactctgccagggtttcccaatatcgaactgaagaaaggagggaaggatataccagtcactatccacaatttagaggagtatctaagactggttatattctgggcactaaatgaaggcgtttctaggcaatttgattcgttcagagatggatttgaatcagtcttcccactcagtcatcttcagtacttctacccggaggaactggatcagctcctttgtggcagtaaagcagacacttgggatgcaaagacactgatggaatgctgtaggcctgatcatggttatactcatgacagtcgggctgtgaagtttttgtttgagattctcagtagttttgataatgagcagcagaggttatttctccagtttgtgactggtagcccaagattgcctgttggaggattccggagtttgaatccacctttgacaattgtccgaaagacgtttgaatcaacagaaaacccagatgacttcttgccctctgtaatgacttgtgtgaactatcttaagttgccggactattcaagcattgagataatgcgtgaaaaactgttgatagcagcaagagaagggcagcagtcgttccatctttcctgatcatagcaagaaatgcagtgtctgcctgttacagcaaaagaaacaaatcatgatttcttttctaatgttatcacctgagtcaaggaaacatgttacgcctttcttgttgtaagaaaaacggcttgcagattataaagagacatttggttgatatttcatttaatgggccccatggacttaaagtgatcaaggccttaaaacgttgttgtgatgaggtttctttagcaagttcttgtttaaatta

SEQ ID NO: 185480 - DNA, 2876 bp, Homo Sapiens
ttggggacagatgaagctccccaaggagctgcagcctctagttctgttgcaggggctgttggcatgaccacctctggggagagtgaatcagatgattccgagatgggacgtttgcaagctttgttagaggcaaggggtcttccccctcacctatttggtcctcttggtcctcggatgtcacagcttttccatagaacaattggaagtggagctagttctaaggcccagcagctactacaaggattgcaagccagtgatgaaagtcaacagcttcaggcagttattgagatgtgtcagttactggtcatgggaaatgaggagacactgggagggtttcctgtcaagagtgttgttccagctttgattacgttacttcagatggagcacaattttgatattatgaaccatgcttgtcgagccttaacatacatgatggaagcacttcctcgatcttctgctgttgtagtagatgctattcctgtctttttagaaaagctgcaagttattcagtgtattgatgtggcagagcaggccttgactgccttggagatgttgtcacggagacatagtaaagccattctacaggcgggtggtttggcagactgcttgctgtacctagaattcttcagcataaatgcccaaagaaatgcattagcaattgcagctaattgctgccagagtatcacgccagatgaatttcattttgtggcagattcactcccattgctaacccaaaggctaacacatcaggataaaaagtcagtagaaagcacttgcctttgttttgcacgcctagtggacaacttccagcatgaggagaatttactccagcaggttgcttccaaagatctgcttacaaatgttcaacagctgttggtagtgactccacccattttaagttctgggatgtttataatggtggttcgcatgttttctctgatgtgttccaactgtccaactttagctgttcaacttatgaaacaaaacattgcagaaacgcttcactttctcctgtgtggtgcctccaatggaagttgtcaggaacagattgatcttgttccacgaagccctcaagagttgtatgaactgacatctctgatttgtgaacttatgccatgtttaccaaaagaaggcatttttgcagttgataccatgttgaagaagggaaatgcacagaacacagatggtgcgatatggcagtggcgtgatgatcggggcctctggcatccatataacaggattgacagccggatcattgaggcagcccatcaggtcggtgaggatgagataagcttgtccactctgggacgagtttatactattgattttaattctatgcagcaaatcaatgaggacacgggaacagcacgtgccattcagagaaaacctaacccgttagccaatagtaacactagtggatattcagagtcaaagaaggatgatgctcgagcacagcttatgaaagaggatccggaactggctaagtcttttattaagacgttatttggtgttctttatgaagtgtatagttcctcagcaggacctgcggtcagacataagtgccttagagcaattcttaggataatttattttgcggatgctgaacttctgaaggatgttctgaaaaatcatgctgtttcaagtcacattgcttccatgctgtcaagccaagacctgaagatagtagtgggagcacttcagatggcagaaattttaatgcagaagttacctgatatttttagtgtttacttcagaagagaaggtgtaatgcatcaagtaaaacacttagcagaatcagagtctttgttgacaagtccaccaaaggcatgtacgaatggatcgggatccatgggatccacaacttcagtcagcagtgggacagccacagctgccactcatgctgcagctgacttgggatcacccagcttgcagcacagcagggatgattctttagatctcagccctcaaggtcgattaagtgatgttctaaagagaaaacgactgccaaaacgagggccaagaaggccaaagtactcacctccaagagatgatgacaaagtagacaatcaagctaaaagccccaccactactcagtcacctaaatcttctttcctggcaagcttgaatccaaaaacatggggaaggttaagtacacagtccaacagcaacaacattgagccagcacggactgcgggaggtagtggccttgccagggctgcctcaaaggataccatctccaataatagagaaaaaattaaaggttggattaaggagcaggcacataaatttgtagaacgttatttcagttctgagaatatggatggaagcaaccctgcattgaatgtccttcagagactttgtgctgcaaccgaacaactcaacctccaggtggatggtggagctgagtgccttgtagaaatccgtagcatactctcagagtcagatgtttcatcatttgaaatccaacatagtggatttgtgaagcagctgttgctttatttgacatctaaaagtgaaaaggatgctgtgagcagagagatcagattaaagcgatttcttcatgtattttttttcttctccacttcctggaaaagagcccattgaaagaatggaaccagtgggtaatgcacctttgttggcattagttcaaaaaatgaacgcctgcctcagccggatggaactatttccagtctaagtacttgatttccctaatggaaatgggacaggaggcttcttttctctcaacgaacgatcgcttgctttaaaatttttcaacacccatcaattagaatgccacttacgcaggcatccagactgtgcgaatgtgaatcaatggaagggtggacctgtcaagattgaccctctggctttggtac

SEQ ID NO: 185481 - DNA, 1121 bp, Homo Sapiens
ccctggatagctttaacatagatgggcttgtctcttacagtttggctagcttaaatcagtaaatcagtgatggtttgctcctgatttgcccactatttcagttttcaattcatggccgtaaggaatgtgtgccaaattcaagtttattatatcataacatgatagattaatagtcgtgcttgtttagtgcacatattaactggtctggtaaggcaaagaagttttcatgataaaatgataaatttcaagcttactttattaagcagcatataacaaacagcttttaaagttaaatattgttatggccgtggagtttcattaaacagtatttctattcacacccaaccactggtaagtttgtagaacatctcttcatctaaactctcgttttggtcttttgcacgtgttgagagaaatatgtagccaccaatgaattcatgaaccactttgcaatctacttcagtacaaatgaaggacaatcgtacttcatctgcaaactctacggtgaccattttgatttcccagttgacattccactgtttcatgttgctgaaacgccatgttttaattgcatctccagtgctggcatccatccgaatcagtctgttgtatgcaattccaataagttcttcttttttgcccccttggaaccttgcaatgaagtgagtgatgccaaattcaggtagtgactgccaagcttgaataaatctcatcttggcttcaattagactcatctgagctacattctgatgggcctccaagattctcgctgttatctgcttgttcttatacttttttagatagcggggagacaccaaacattcaggagttatatcagtcgtgatctgctctggtattaactgaggatctgggtttaaatgctgcatcttcagaaaggaaagaatattctgaacttctaagttgtaagaactgtccgccatggtcttgcctttggaggctaatctgcaggctgccatccagtgtgcatactgtttttcattgtcacaacgaagccagatttcattcatgccttctgcaactggaatcaggagtttaatgttaaatttttggcctgaaaactttaatgtagtcagcaagttcaggaatggaagtaatgccaa

SEQ ID NO: 185482 - DNA, 1121 bp, Homo Sapiens
ttgggtactttttgttgatatatgaaaactgaaattaagacttattttgaaaaatccttatacattacattattacagtgtccaaatgtagcttcagatattttgatttcaactcttacaatatgattttggggtacggggtgcgtaattcaatcttttgatcttttgtctcagttctcccatgagagaataatgttcaatggtaaaggtgatgtttactcatgtttagataacagcgagaatcttggaggcccatcagaatgtagctcagatgagtctaattgaagccaagatgagatttattcaagcttggcagtcactacctgaatttggcatcactcacttcattgcaaggttccaagggggcaaaaaagaagaacttattggaattgcatacaacagactgattcggatggatgccagcactggagatgcaattaaaacatggcgtttcagcaacatgaaacagtggaatgtcaactgggaaatcaaaatggtcaccgtagagtttgcagatgaagtacgattgtccttcatttgtactgaagtagattgcaaagtggttcatgaattcattggtggctacatatttctctcaacacgtgcaaaagaccaaaacgagagtttagatgaagagatgttctacaaacttaccagtggttgggtgtgaatagaaatactgtttaatgaaactccacggccataacaatatttaactttaaaagctgtttgttatatgctgcttaataaagtaagcttgaaatttatcattttatcatgaaaacttctttgccttaccagaccagttaatatgtgcactaaacaagcacgactattaatctatcatgttatgatataataaacttgaatttggcacacattccttagggccatgaattgaaaactgaaatagtgggcaaatcaggaacaaaccatcactgatttactgatttaagctagcctaactgtaagaaacaagccatctattttaaaagctatccaggggcttaccctatatgaactctatttatcatgtcaaatgcatgtgatttaatgtatgtctaatttgatatcatgttttaaatattcctacttctggtagcccatttaattcctccccc

SEQ ID NO: 185483 - DNA, 1228 bp, Homo Sapiens
gcacccttttgggttattgagctaggaattttctgactagcaccaatacagattgtaacagcgcaacagactagaacatggccagtccaggcattagagttaaggacattgtggcaaatcatgatcataatgaagtcattcttaatttagtagatattaaaactgcacgttaattatatctcttaaaggcatttaattaacgcagagattgctacatttaagccatctgctagttgtgagtagtttttaaaaaactgtacaattttataaaatttgtgtttttacattagttacacaaaatgcatacttcatagaactttacttcatattgtaatgcaaagagttgcatattttaggcagacagtgattatgctggtgaatactaaaagtgtaatacaatatggtgtaaaaataaaaacacgagacaatatacataacatgcttattcaaggacaaaaacaaatcaagcacgacggactaatagcattttccttcaaggtcaaacacaatgacattactaaatatcaggcctcctgcatgcctgatttatttgggggtagggggaggaattaaatggctaccagaagtaggatattttaaaacatgatatcaaattaaacatacattaaatcacatgcattagacatgataaatagagttcatataggttaagccctggatagctttaaaatagatggcttgtttcttacagtttggctagcttaaatcagtaaatcagtgatggtttgttcctgatttgcccactatttcagttttcaattcatggccctaaggaatgtgtgccaaattcaagtttattatatcataacatgatagattaatagtcgtgcttgtttagtgcacatattaactggtctggtaaggcaaagaagttttcatgataaaatgataaatttcaagcttactttattaagcagcatataacaaacagcttttaaagttaaatattgttatggccgtggagtttcattaaacagtatttctattcacacccaaccactggtaagtttgtagaacatctcttcatctaaactctcgttttggtcttttgcacgtgttgagagaaatatgtagccaccaatgaattcatgaaccactttgcaatctacttcagtacaaatgaaggacaatcgtacttcatctgcaaactctacggtgacctggaacaaagacaagagccatcagtgctgtcccaaatgctagccaa

SEQ ID NO: 185484 - DNA, 1464 bp, Homo Sapiens
ttgggtcatggcgaccgagcagaggcctttccacctggtggtgttcggcgcgtctggcttcaccggccagttcgtgaccgaggaggtggcccgggagcaggtggacccggagcggagctcccgcctgccctgggccgtggcgggccgctcccgggagaagctgcagcgggtgctggagaaggcggccctgaagctgggaagaccaacactgtcatctgaagttggaatcatcatctgtgatattgctaatccagcctcgcttgatgaaatggctaaacaggcaacagttgtcctcaattgcgtaggaccatatcggttttatggagaacctgtaataaaagcatgtattgaaaatggagccagttgtatcgacatcagtggagaacctcagtttctggaactaatgcaactgaagtatcatgagaaagctgcagacaaaggggtttatatcattggaagcagcggctttgactccattccagcagatctgggagtaatatataccagaaataaaatgaatggtactttgactgctgtggaaagtttcctgactatacattcaggacctgaggggttgagcattcatgatggtacctggaagtcagcaatttatggttttggagatcagagtaatttgagaaaactaagaaatgtatcaaatctgaaacctgtcccgctcattggtccaaaattgaagagaaggtggccaatttcttattgtcgggaactcaaaggttattccattccttttatgggatctgatgtgtctgttgtaaggaggactcaacgttacttgtatgaaaatttagaggaatcaccagttcagtatgctgcgtatgtaactgtgggaggcatcacctctgttattaagctgatgtttgcaggacttttctttttgttctttgtgaggtttggaattggaaggcaacttctcataaaattcccatggttcttctcctttggctatttttcaaaacaaggcccaacacaaaaacagattgatgctgcctcattcacgctgacattctttggtcaaggatacagccaaggcactggtacagataagaacaaaccaaatatcaaaatttgtactcaggtgaaaggaccagaggctggctatgtggctacccccatagctatggttcaggcagccatgactcttctaagtgatgcttctcatctgcctaaggcgggcggggtcttcacacctggagcagctttttccaaaacaaagttgattgacagactcaacaaacacggtattgagtttagtgttattagcagctctgaagtctaaacactggaagaattaactgaagtcataacgtgcgtgaattaacagcttctctatttgatatttgaaattcttctgtaagcctgtctgagtgtatgtggaaacgattgtcaaatctaaaatatctatatattaaaaagtaggaaattgtcctagcttaccctaaattt

SEQ ID NO: 185485 - DNA, 2411 bp, Homo Sapiens
ccaactttgtacaaaaaagttggactgtggcagcaaccggagtcgcagccgccgccacctgcacctggcgcctagcccacgtccagcgcctgcccggccgccgcttcccgccaccctgccctgcccacccgccaggtactaccattaaagataccttcttctcagcaaatctatgataaaaaatataagtaacagaagaagaaataactgttatttgtcaagtgacaagcttttaatgtcagaatggctcacctaaagcgactagtaaaattacacattaaaagacattaccataaaaagttctggaagcttggtgcagtaatttttttctttataatagttttggttttaatgcaaagagaagtaagtgttcaatattccaaagaggaatcaaggatggaaaggaacatgaaaaacaaaaacaagatgttggatttaatgctagaagctgtaaacaatattaaggatgccatgccaaaaatgcaaataggagcacctgtcaggcaaaacattgatgctggtgagagaccttgtttgcaaggatattatacagcagcagaattgaagcctgtccttgaccgtccacctcaggattcaaatgcacctggtgcttctggtaaagcattcaagacaaccaatttaagtgttgaagagcaaaaggaaaaggaacgtggggaagctaaacactgctttaatgctttcgcaagtgacaggatttctttgcaccgagatcttggaccagacactcgacctcctgaatgtattgaacaaaaatttaagcgctgccctcccctgcccaccaccagtgtcataatagtttttcataatgaagcgtggtccacgttgcttagaactgtccacagtgtgctctattcttcacctgcaatactgctgaaggaaatcattttggtggatgatgctagtgtagatgagtacttacatgataaactagatgaatatgtaaaacaattttctatagtaaaaatagtcagacaaagagaaagaaaaggtctgatcactgctcggttgctaggagcaacagtcgcaacagctgaaacgctcacatttttagatgctcactgtgagtgtttctatggttggctagaacctctgttggccagaatagctgagaactacacggctgtcgtaagtccagatattgcatccatagatctgaacacgtttgaattcaacaaaccttctccttatggaagtaaccataaccgtggaaattttgactggagtctttcatttggctgggagtcgcttcctgatcatgagaagcaaagaaggaaagatgaaacctacccaattaaaacacccacttttgcaggaggacttttttccatatcaaaagaatattttgagtatattggaagctatgatgaagaaatggaaatctggggaggtgaaaatatagaaatgtctttcagagtatggcaatgtggtgggcagttggagattatgccttgctctgttgttggacatgtttttcgcagcaaaagccctcatagctttccaaaaggcactcaggtgattgctagaaaccaagttcgccttgcagaagtctggatggatgaatacaaggaaatattttataggagaaatacagatgcagcaaaaattgttaaacaaaaagcatttggtgatctttcaaaaagatttgaaataaaacaccgccttcagtgtaaaaattttacatggtatctgaacaacatttatccagaggtgtatgtgccagaccttaatcctgttatatctggatacattaaaagcgttggtcagcctctatgtctggatgttggagaaaacaatcaaggaggcaaaccattaattatgtatacatgtcatggacttgggggaaaccagtactttgaatactctgctcaacatgaaattcggcacaacatccagaaggaattatgtcttcatgctgctcaaggtctcgttcagctgaaggcatgtacctacaaaggtcacaagacagttgtcactggagagcagatatgggagatccagaaggatcaacttctatacaatccattcttaaaaatgtgcctttcagcaaatggagagcatccaagtttagtgtcatgcaacccatcagatccactccaaaaatggatacttagccaaaatgattaagtgttccttaaaattaagttgaaaaaggaaatattctttctcataaaactgtgactaggcatacactgtagtttttgaaaattatgcaaaagcagctaaatgtaacttattccaagtgcatttttcttatttatatctttatgtagcactactacagaaattctgcaagtttctgtttcaaagcacaataactagtaataccaaagactatttcaaatgtccagatgtaggggaggagatgtttacagtatgatgaaaataatttt

SEQ ID NO: 185486 - DNA, 933 bp, Homo Sapiens
actttgtacaaaaaagttggcactgtagtttttgaaaattatgcaaaagcagctaaatgtaacttattccaagtgcatttttcttatttatatctttatgtagcactactacagaaattctgcaagtttctgtttcaaagcacaataactagtaataccaaagactatttcaaaatgtccagatgtaggggaagagatgtttacagtatgatgaaaataattttccaagtaaagtgaagtttgtgtgttttgtacacttagggatatatatatatagctacattcacacactcacaatttaaaatatttcccctagttttttggggggataggaagaaagatttgttactgtatttttttaactacataaaaatagatcaataaatgtcagcattggcctctgtgtacaaaccaagagcttttacagatccagaatttattagtttaaaatgcaggtgaacttttttttgcgtttggtttacttgtctgtcaaatgtttccttaaacatgaaactgaataaggagaagagtatttttaacacttaaatttcttggcaaattttaaaacattttttagtctgtaatacactccacttgaagcacttaagtcttccttaaatgacttttcttaagtaatgatactgtgtgttttcccaaagcacttttaaaaaaatttttataaattactatctgttgaaaaggtgtccttttcctttcttctagtatttttttcttaccaaaattcactaatcttgaatgtttgtgatattaaatttcaaatgcagaatacttgactcatttaaagctaaattttgttactgattcaattataattgtaatggatttttgactttgtaatggattcttttcatcaaaaagccttatttttttatctatgtggaaaacacaataaaaaatcctcaacactattgt

SEQ ID NO: 185487 - DNA, 2126 bp, Homo Sapiens
ttggagaagatccaaatgaaactcagcaaaataaagctcccctactttatgaatgagctcactctgacggaacttgacatgggcgtggctgtgccaaaaatcctccaggccttcaagccttacgttgatcaccaaggactctggattgatttggaaatgtcctacaatgggtcctttctgatgactctcgagaccaaaatgaatttgaccaaactaggtaaagagcctcttgttgaagccctgaaggttggagaaattggcaaagaaggttgcaggccccgggcattctgtctggcggacagcgatgaggaatcctccagcgctggctcctccgaggaagacgatgccccagagcccagcgggggagacaaacagctcctcccaggggctgaagggtacgttggaggtcatcgaacaagtaagattatgaggtttgttgataaaattaccaagtcaaaatatttccaaaaagcaacagagacagagtttattaaaaagaagatcgaagaagtctccaacacacccctgctgctcactgttgaagtacaagaatgtagaggaaccttggcggtcaacattccaccacccccgactgaccgagtatggtatggtttccgaaagccaccacatgtggagctgaaagctcggccaaaacttggagagagagaagtgactttagttcatgtgacagactggatagagaagaaactggagcaagagtttcagaaagtttttgtcatgccaaacatggatgatgtttatatcactataatgcactcagccatggaccctcgctctacttcctgcctcctgaaagacccacctgtggaggctgctgatcagccatgatgggtgatgtcagatgttccccatattgtgacatcgagctggatgtgtggggttcttggccgccatctgtactgtagcactggcctctgtgccacagctactgtttcttaaaggactgcttctgccctctgcctgccagtgcccattccactgtgaggtgtcattccctgcatctagtgacaactgtctggattgcctgctgcaaagctttgatttggcaaaggagaccatggaagaatcatggtggatccagaagttatacgtgacccacaccatggcttttaaaagtctacccatgtttgtggcagcaaatgagcacagtaagagcaaagctgaacaacttgcctcctctactcctccaaagcttttcttcaggcagccggtgcacagtggactttttcacttctatactttgtatgcggccttccacacttccagagaatgtcagtgtgcaatgtgtctggagggtggggagaggaattctgtgagccttttcatttcggtgacagaagagatgggcagagcaacttattttccacattaaattgtgcatttgggaagcaagtagccatagtacacacacaacacgctatcagcttgggtaaggacagtgggatttatgtgaacatcaggcaaagccatgagatcaaaccatcccaagcctttcaccaatgaggtacaaccacctgggggctagctaatcttgaatgttttcctgagacaggagcgtatgtgaaaacatcaaacactgcacatgacaggatgggtcctctcatacagatgggatggggttagaaagccagagccagtttttccatctggcgtttcctgtgtcctccaggtttatatgggaatcgaaacagtttgttaatctgattgggagagttccatgggcagatttcccttcctgaaggccaaaacggagaactgctctctttaattatttcaagagtcaagaccaaaagtttgctcagcatcacactacatctcaaaattaatgttgccaacttaattttgtgcatttgtgtcagaatgtttagtttacaaggttgggggctctctttgcttcgagaagtaaacctaataccatttttttattgtttaaagctgcattcaacgtcaaaattaccttgggtaacttttgataacttacatgtgtggacaaagctaatagtggttttttaaacagcaccttgcctgacatgactttaaagaaattaatatattgaaaacatgtttgaacccttattttattgcaccattaaaacatttggact

SEQ ID NO: 185488 - DNA, 1151 bp, Homo Sapiens
aaatcataaatataaggtatccaaagatacagagcatgaagagaagttccgggatggaaacccaggtaaatgttgaaattcttcgtgaagtgcaagtggttaaatattcccagaatgactccaaaagtcatatgaatgattcctaaaatcacggacattttcattttgaaagagtttagaaaagtgaggcgatttgtggccaagttccaaataggatcaatgccaaggggataagggcctcggaacactccaggaatgcttggatccagctgcaaaatgctgttgtgtctaacgacgctgtcattccaaagcaccatcttcttatgctgtgcgggtgggtggctggagctgtacatggccgacacgttccacccagagccgaacaggttgactgactttgaaaagcagtcgttgtagatgaggccagtgtacactgagaacagccccatcagcaggaggatgtaccggccattaaaaaacatcctcatgatctcttgtgactgatttagtctgggatgattttcatttaacaccaacaagagggcaaataaaaacatcacaaagccatgtccgaagtctccaaacatcacagcaaataaaaacgggaaggtgatgatggtaaagagagctggattgacttctctgtagcttccgactccataagcatccacgatgttctgaaatccctcggtgaatttgttggtgcggatccgagtggggggtgtttcttttgtggggattatattcatgaatgaggggattgtagcaccactctctctcgagccctcctccagtgcccggcgcaggtcctgcagatccgcctcgggacaccagacctcagcaatgaggcacttgttggtcacgtcaaagctgcacatgttcagcatgtgatagatggccttcattttcttcacctggatcacacggctgtagacagactcggcggctttacatagcacttgcctcaaatagtcctcggttttgtgcagtacagtgtagagatcctggatgcgggtgttcagcccctcctggatctccctccgctcctcggctgtgtttggataggggtacacgtggcagtggtagcaatcacatatcttcttaaccttgtggccaatctgctctccccaaaaggatattaaaaaggccaa

SEQ ID NO: 185489 - DNA, 857 bp, Homo Sapiens
taggcatgagccaccacatctggccaatagtttcttttgatgtgcagaagctctttaatttaattagatctcctttgtcagtttttgtttttgctgcaattgcttatgttatcttcatcatgaaattttagccaagtcttatgtccagaatggtatttcttaggttatttttcagagtttttatagtttaatgttttatatttaagtctttaatccttcttaagttgatttttgtatgcagagtaagctgggggcccagtttcaatcttctgcatatggctagccagtaatcccagcaccatttattaaatggggacttctttccccattgcttgtttttgtcagctttgtccaagatcagatgattgtaggtgtacagcattatttctggactctctgttatgttccatttatctgtgtgtctgtttttctactaataccatgctgttttggttactgtagctctgtagtatggtttgaggtttggtaacttgatgcctccccttttgttctttatgtttaggattgccttggctaggctcttttttggttccatatgaattttaaagtagtttctaattctgtgaagaatgtcattggtagtttgatagggatagcattgaactatttgctcaactcaacattttaggaatttatttctgctgtctagtgctcaaaacttgcagctagaattgagggaagagagagaccttcttatattgttttatattgtttgatactcagtacctgttttaagaaaaaacaacaaggaagtaaaaccaaagacaggcagcccagcgccaggcccaaaaccaggcctgggcctgcctggcctaaacccagtagttaaaaatcaa

SEQ ID NO: 185490 - DNA, 774 bp, Homo Sapiens
ttgggatgctttcggatgagccttaactgacccaatcctttgtgatgcgggagagattgctaggcctcgctcacctggccagaaccagggaaagaggccgcggttgcagcgcgattccagggatgtggcctggttacctgccttctctgatacgtcaagacaccttcaacaatggcttgcagctgtaccctgttggctgcacccaggacgcccttttcactgctaagcagtcctacctgaggcccaggggctgccagattgacccataaataatctccggcgcctcagatccagaagctgctgagcctgatcttagtgccttctcctttctctgtgtggccccccagcccctttccccactgccttgtgtccaaggccctttccttcatgtatccatggaggagagacaaaaatacacatcaataaaataagatagggaatccataaatagacattcagaagtatggccaacggatttatcttaaaaccaatggaggaagaagagtttcaataaatgttgtggacttccatttgtcaaagaccaaaacaaaggaaccccaaccttacatgtaatacaaacttaactcaaaatggatcatatatctaaatgtaaaatggaaagctataaaactgaaaacagactatctttacaacctaggcgtaggtatagtttttagacattacaccaaaagcacatgccgtaaaagaaaaaatagataaattggtggatttcattaaaattaaaaaactttttctctctgaaaaatcctgtta

SEQ ID NO: 185491 - DNA, 1084 bp, Homo Sapiens
ttgggctgccacttggccgggcgtctgcgggccgtgggggatgggggcggcgagctccagccctcggcggtggcggcggccgtaggtgtggggcggccgtccgcgtccgggacgcgggatggagcgccgtggatttcagtttttctgactgttacatgaaaggatgattgctcacaaacagaaaaagacaaagaaaaaacgtgcttgggcatcaggtcaactctctactgatattacaacttctgaaatggggctcaagtccttaagttccaactctatttttgatccggattacatcaaggagttggtgaatgatatcaggaagttctcccacatgttactatatttgaaagaagccatattttcagactgttttaaagaagttattcatatacgtctagaggaactgctccgtgttttaaagtctataatgaataaacatcagaacctcaattctgttgatcttcaaaatgctgcagaaatgctcactgcaaaagtgaaagctgtgaacttcacagaagttaatgaagaaaacaaaaacgatctcttccaggaagtgttttcttctattgaaactttggcatttacctttggaaatatccttacaaacttccttatgggagatgtaggcaatgattcattattgcgactgcctgtttctcgagaaactaagtcgtttgaaaatgtttctgtggaatcagtggactcatccagtgaaaaaggaaatttttcccctttagaactagacaacgtgctgttaaagaacactgactctatcgagctggctttgtcatatgctaaaacttggtcaaaatatactaagaacatagtttcatgggttgaaaaaaagcttaacttggaattggagtccactagaaatatggtcaagttggcagaggcaactagaactaacattggaattcacgagttcatgccactgcagtctctgtttactaatgctcttcttaatgatatagaaagcagtcaccttttacacaaacaattgcagctctccaggctaacaaatttgtgcagcctctacttggaaggaaaatgaaatggaaaaacaaaggaaagaaataaa

SEQ ID NO: 185492 - DNA, 1469 bp, Homo Sapiens
ttggatggacagcagtctagagatcctcctgtgaaaatgcaaggctctatcacaacccctggaagtattgcactggctcaggcccaggctcaggcccaggttccagcaaaagctcctcttgctggtcaagttagcactatggtaaccacctcaacaactaccactgttgctaaaacggttacggtcaccaggccaactggagtcagctttaagaaagatgtgccaccttctattaatactacaaatatagatacgttgcttgtggccacagatcaaactgagagaattgtggagcccccagaaaatatccaggagaaaattgcttttattttcaataatctctcacagtcaaatatgacacaaaaggttgaagagctaaaggaaacggtgaaagaagaatttatgccttgggtttcacagtatctggttatgaagagagtcagtattgagccaaactttcatagcctgtattcaaacttccttgacacgctgaagaatcctgaatttaacaagatggttctgaatgagacctacagaaacattaaagtgctcctgacctctgataaagctgcagccaatttctcagatcgttctttgctgaagaacttgggacattggctaggaatgatcacattagctaaaaacaaacccatcttacacactgacttggatgtgaaatcattgctgctagaggcttatgttaaaggacaacaagaattgctctatgtagtgccctttgttgccaaagtcttagaatctagcattcgtagtgtggtttttaggccaccaaacccttggacaatggcaattatgaatgtattagctgagctacatcaggagcatgacttaaagttaaacttgaagtttgaaatcgaggttctctgcaagaaccttgcattagacatcaatgagctaaaacctggaaacctcctaaaggataaagatcgcctgaagaatttagatgagcaactctctgctccaaagaaagatgtcaagcagccagaagaactccctcccatcacaaccacaacaacttctactacaccagctaccaacaccacttgtacagccacggttccaccacagccacagtacagctaccacgacatcaatgtctattcccttgcgggcttggcaccacacattactctgaatccaacaattcccttgtttcaggcccatccacagttgaagcagtgtgtgcgtcaggcaattgaacgggctgtccaggagctggtccatcctgtggtggatcgatcaattaagattgccatgactacttgtgagcaaatagtcaggaaggattttgccctggattcggaggaatctcgaatgcgaatagcagctcatcacatgatgcgtaacttgacagctggaatggctatgattacatgcagggaacctttgctcatgagcatatctaccaacttaaaaaacagttttgcctcagcccttcgtactgcttcccc

SEQ ID NO: 185493 - DNA, 900 bp, Homo Sapiens
ttggcttgtttagcattagaataaaattatatatgtccttgggaaatattatgacagttgactttaagatcaaaaggaagggaagacctgaaagtcatttgaacattttaggaaaagaatattggagagaaaaaggtattaaatatatagaaataggtttttaacctaacaaggtctgcctcttatgacgagaatgcaacagcttggtaaatcataaaagaaacatttaagctaataggattttcgtactgtctctatagctgtagctttaaaattcaacgtatataattggcatggaaacttaatttgcagtcttttcaagcctttaggatagtgtgatgtgtaacaaacaacctcaaatgtgaatgccttgattttatttttatggtgactttagctacagcatttcctatacccagagctaaacactggaataatactgacatcatttaatttaacataagcaattatgtttaaggagtaatttgtgtcatgtacatatttgattgattttttttcttctacataattttatttgaacaaatgtagacagtttatatgtcgcctttttctgttcaaatttgcatggcctattaagttggctggagagtgttttatgtggaaatattttcaagataatgttccttaggaagaaaataacattcttgggttgagggaaggaatgccatacactactgtctcttcagatctgaaatactccagtttagagccaggaaatttcacaggtcacaccgatttttagcattaaaaactaaggaatatacttagcacttacttaatcttttcagttttccagtttacgtctcaggaatgaagtgtagtctatggttgacaatggagttttgtgatcctgcttattgtaactgacaactgttttca

SEQ ID NO: 185494 - DNA, 2409 bp, Homo Sapiens
ctttgtacaaaaaagttggcgctgactggcccggctgggcagggatgaaattgattctgcagtaaagatgttggtgtcattaaaaatgagctacaaagctgccgcgggggaggattacaaggctgactgtcctccagggaacccagcacctaccagtaatcatggcccagatgccacagaagctgaagaggattttgtggacccatggacagtacagacaagcagtgcaaaaggcatagactacgataagctcattgttcggtttggaagtagtaaaattgacaaagagctaataaaccgaatagagagagccaccggccaaagaccacaccacttcctgcgcagaggcatcttcttctcacacagagatatgaatcaggttcttgatgcctatgaaaataagaagccattttatctgtacacgggccggggcccctcttctgaagcaatgcatgtaggtcacctcattccatttattttcacaaagtggctccaggatgtatttaacgtgcccttggtcatccagatgacggatgacgagaagtatctgtggaaggacctgaccctggaccaggcctatagctatgctgtggagaatgccaaggacatcatcgcctgtggctttgacatcaacaagactttcatattctctgacctggactacatggggatgagctcaggtttctacaaaaatgtggtgaagattcaaaagcatgttaccttcaaccaagtgaaaggcattttcggcttcactgacagcgactgcattgggaagatcagttttcctgccatccaggctgctccctccttcagcaactcattcccacagatcttccgagacaggacggatatccagtgccttatcccatgtgccattgaccaggatccttactttagaatgacaagggacgtcgcccccaggatcggctatcctaaaccagccctgttgcactccaccttcttcccagccctgcagggcgcccagaccaaaatgagtgccagcgaccccaactcctccatcttcctcaccgacacggccaagcagatcaaaaccaaggtcaataagcatgcgttttctggagggagagacaccatcgaggagcacaggcagtttgggggcaactgtgatgtggacgtgtctttcatgtacctgaccttcttcctcgaggacgacgacaagctcgagcagatcaggaaggattacaccagcggagccatgctcaccggtgagctcaagaaggcactcatagaggttctgcagcccttgatcgcagagcaccaggcccggcgcaaggaggtcacggatgagatagtgaaagagttcatgactccccggaagctgtccttcgactttcagtagcactcgttttacatatgcttataaaagaagtgatgtatcagtaatgtatcaataatcccagcccagtcaaagcaccgccacctgtaggcttctgtctcatggtaattactgggcctggcctctgtaagcctgtgtatgttatcaatactgtttcttcctgtgagttccattatttctatctcttatgggcaaagcattgtgggtaattggtgctggctaacattgcatggtcggatagagaagtccagctgtgagtctctccccaaagcagccccacagtggagcctttggctggaagtccatgggccaccctgttcttgtccatggaggactccgagggttccaagtatactcttaagacccactctgtttaaaaatatatattctatgtatgcgtatatggaattgaaatgtcattattgtaacctagaaagtgctttgaaatattgatgtggggaggtttattgagcacaagatgtatttcagcccatgccccctcccaaaaagaaattgataagtaaaagcttcgttatacatttgactaagaaatcacccagctttaaagctgcttttaacaatgaagattgaacagagttcagcaattttgattaaattaagacttgggggtgaaactttccagtttactgaactccagaccatgcatgtagtccactccagaaatcatgctcgcttcccttggcacaccagtgttctcctgccaaatgaccctagaccctctgtcctgcagagtcagggtggcttttcccctgactgtgtccgatgccaaggagtcctggcctccgcagatgcttcattttgacccttggctgcagtggaagtcagcacagagcagtgccctggctgtgtccctggacgggtggacttagctagggagaaagtcgaggcagcagccctcgaggccctcacagatgtctaggcaggcctcatttcatcacgcagcatgtgcaggcctggaagagcaaagccaaatctcatggaagtccttggttgatgtatctgggtctcctctggagcactctgccctcctg

SEQ ID NO: 185495 - DNA, 1797 bp, Homo Sapiens
ctgcctcccaaaggctgtttttaattcattctcacagccatttcctctggcagagtgactgcctgtgcatggtctgtgcctttagtggctgaatgaataaatgaatgggatatgcacaaatacctgttgccctagcgcctcctgtggcgaagcaggccacgatgatgtgacaatatcttgtcatgtaattggctgtgaggactccgctggattcccggttgtgttactatttccatagatggtgggttaatgacagagaggggcgctcttagccaagggatacactgggcagcgcggcactacgctgcagttttccggctgcagattctgtttgtcatctgctggaaatgtccacgatggatttaattttaaaaaacttttttctttcccaatttagggaatacccactctggtgtacagacacgactggaactatgaacatctctttatggacatcaagaacaaaatggcacaggtgatcccgataaacctgatcctgtgcacggggctttctgccttctcagtgtgtttccctccgtgttaggcctactccagccttgccccgggtgtttgctgtgagcccacagtttctgcggcctcccttacagagagcaagcaagacagcaaatcagcaaggtttcttgtagagtaaaagcagattgacatcttgtgggtttgattcttaggaatgatgttgatgcatggccatgcctgctgaagcgggaagtccatggaaccgatttgttcctgctctccgcatgcgggtactgataggtagacctgtgtgtctccatggcctccaggaactgcctgcacaccgtgcgcccaagtgtcagctgttagagagttggccccccgcatgtggcttgggcagtgaaggggctcggctctcttaccaggtggtgagatgccagaaacccagcccacagacatccctctcctgcttttcatttcccaggactccctccccagctcggtcattagtgccatcagtggacagctgcagtcctacagcgatgcctgtgaagtgctgtctgtcgtagaagtcactctggggtttctgagcacagctggtggggatccaaacatgcagctgaatgtgtatactcaagacatcctgcaaatgggtgatcagacgattcacgtgttaaaggccttaaacagatgccagttaaaacacaccattgccctctggcagttcctgtctgctcataagtctgaacagctgctgcggctgcacaaagagccatttggggaaatcagttcaaggtacaaagcggatctgagcccggaaaatgctaagctcctcagcacattcctaaatcagactggcctagacgccttcctgctagagctgcacgaaatgataatcttgaaactaaagaacccccaaacccaaaccgaggagcgcttccgccctcagtggagcctgagagacactctcgtaagttacatgcaaactaaagaaagtgaaattcttcctgaaatggcatctcagttcccagaagagatactgctcgccagctgtgtctcagtgtggaaaacagctgctgtgctgaaatggaatcgagaaatgagatagaattatttcctcagctatctttggatgactttggagagaagactcctctctcctcgtctgcggcgtggacttgatcatggactggtgcctttgcattcagaagagagctgtcagcgtagcaccgaattcaagaccaagcgtgctacctgagctgacagctttttgaaagccgagctgtttctgaaccatgtacatacatgttctgaaactttctc

SEQ ID NO: 185496 - DNA, 1365 bp, Homo Sapiens
  misc_feature (1256)..(1267): n is a, c, g, or t
ttggactgaactgcatgtcatcagttatgaagtggagcgggacctgactccactgattctctccaactgccagtaccaggtggaggagggcagagagaccgtgcaggagttcgatctggagaagattcagcggcagatcgtcagccgcttcctccagggcaagccccggctgagcctcaagggaatacccactctggtgtacagacacgactggaactatgaacatctctttatggacatcaagaacaaaatggcacaggactccctccccagctcggtcattagtgccatcagtggacagctgcagtcctacagcgatgcctgtgaagtgctgtctgtcgtagaagtcactctggggtttctgagcacagctggtggggatccaaacatgcagctgaatgtgtatactcaagacatcctgcaaatgggtgatcagacgattcacgtgttaaaggccttaaacagatgccagttaaaacacaccattgccctctggcagttcctgtctgctcataagtctgaacagctgctgcggctgcacaaagagccatttggggaaatcagttcaaggtacaaagcggatctgagcccggaaaatgctaagctcctcagcacattcctaaatcagactggcctagacgccttcctgctagagctgcacgaaatgataatcttgaaactaaagaacccccaaacccaaaccgaggagcgcttccgccctcagtggagcctgagagacactctcgtaagttacatgcaaactaaagaaagtgaaattcttcctgaaatggcatctcagttcccagaagagatactgctcgccagctgtgtctcagtgtggaaaacagctgctgtgctgaaatggaatcgagaaatgagatagaattatttcctcagctatctttggatgactttggagagaagactcctctctcctcgtctgcggcgtggacttgatcatggactggtgcctttgcattcagaaggagagctgtcagcgtagcaccgaattcaagaccaaggcgtgctacctgagctgacagctttttgaaagccgagctgtttctgaaccatgtacatacatgttctgaaactttctcatctttttatgagtactgttcattgagagatgacaatgaagattagatgaaattggaaataaaccaacattgtttacattccaggagacttgtagctcagccacacacgcagtaaatgacctgtgcccgttcgcctctggcactgcccacccctcnnnnnnnnnnnncttctaattctgtactcacaaaagagaatctcattttcttctttcttccattcccttaaattctgagtactgtacatatatttctgggcttcccacga

SEQ ID NO: 185497 - DNA, 1551 bp, Homo Sapiens
  misc_feature (965)..(985): n is a, c, g, or t
ccaactttgtacaaataatttggaaagcagaaaaatcaagagctaataaacttttgccactttctagacttaaataagctggatggatttggtgattctacaaaaaaagacactgaggttgagaccttgaagcatgacactgctgcagtcgatcgttccgtcaagcgtcttttcaaagttcggagtgatcttgattttgctgagcaactgtggtgcaaaatgagcagtagtgtgatttcataccaagacttggtgaagtgtttcacattgatcatccagagtctacaacgtggtgatatacagccatggctccatagtggaagtaacagtttactaagtaagctcattcatcagtcttatcatggaaccatggacacagtttctctcagtgggactattccagttcaaatgcttttggaaattggtttggacaaactaaagaaagattatatcagttttttcataggtcaggaacttgcatctttgaatcatttggaatacttcattgctccatcagtagatatacaagaacaggtttatcgtgtccaaaaactccaccatattctagaaatattagtcagttgcatgcctttcattaaatctcaacatgaactcctcttttctttaacacagatctgcataaagtattacaaacaaaatcctcttgatgagcaacacatttttcagctgccagtcagaccaactgctgtaaagaacttatatcaaagtgagaagccacagaaatggagagtggaaatgtatagtggtcaaaagaagattaagacagtttggcaactgagtgacagctcacccatagaccatctgaattttcacaaacctgatttttcggaattaacactaaacggtagcctggaagaaaggatattctttactaacatggttacctgcagccaggtgcatttcaagtgaagtgtgctgatgaagtcctctataagcacaagccnnnnnnnnnnnnnnnnnnnnnggtaattattgtagaacctgaaaacagcaatgtatggaaaccctcaaagcagaaaagggaggaagatcctgaagattctcttatgaagctccaaaattgataatcctgtctcagctctgcctcctcaggaggagcattagtagaacagcagtgatgaggacacagagggagcagacagtgggtaccacgatctccgtaaccatttgcatgtgacttagcaagggctctgaaatgacaaagagaacgagcaccacaaatgagaacaggctcattttagtaaatacagctttatcccaaaagctttaactgtattgggaaaacttaaaaaatagcatcctcaaattttctgattcttatttgccatgaaatagaacttagtaaattaaatgttatttgaaaatgttataagagctttgtaaatatttcagaaaatatgggataaatgcctgaatttggttcttctacaggtgctataataaagtccatctctcaatacttatactttctaattcatctcagagtattagcagccatattccacagttcctataatttttactgggggg

SEQ ID NO: 185498 - DNA, 1276 bp, Homo Sapiens
  misc_feature (1014)..(1046): n is a, c, g, or t
gccaactttgtacaaaaaagttggggcaagatttatgttgaaattgagcgtgcgcgactgactaaaacattagcaactataaaagaacaaaatggtgatgtgaaagaggcagcctccattttacaggagttacaggtggaaacctacgggtcaatggaaaagaaagagcgagtggaatttattttggagcaaatgaggctctgcctagctgtgaaggattacattcgaacacaaatcatcagcaagaaaattaacaccaaatttttccaggaagaaaatacagagaaattaaagttgaagtactataatttaatgattcagctggatcaacatgagggatcctatttgtctatttgtaagcactacagagcaatatatgatactccctgtatacaggcagaaagtgaaaaatggcagcaggctctgaagagtgttgtactctatgttatcctggctccttttgacaatgaacagtcagatttggttcaccgaataagtggtgacaagaagttagaagaaattcccaaatacaaggatcttttaaagctttttaccacaatggagttgatgcgttggtccacacttgttgaggactatggaatggaattaagaaaaggttcccttgagagtcctgcaacggatgtttttggttctacagaggaaggtgaaaaaaggtggaaagacttgaagaacagagttgttgaacataatattagaataatggccaagtattatactcggataacaatgaaaaggatggcacagcttctggatctatctgttgatgagtccgaagcctttctctcaaatctagtagttaacaagaccatctttgctaaagtagacagattagcaggaattatcaacttccagagacccaaggatccaaataatttattaaatgactggtctcagaaactgaactcattaatgtctctggttaacaaaactacgcatctcatagccaaagaggagatgatacataatctacaataagggtcttagtgctttagnnnnnnnnnnnnnnnnnnnnnnnnnnnnnnnnngactgttataatggtgtatatgttggggttttttttctaagcttctttgtcttaaattttaaaatagtgaatatgttttgagactccctttgacctttcagttccccaagttcattgttaactttgcatttgcaattggtgcaaaaatacagatttctgtcgtctgaatacacaaaaagttgttgtcataacttacccagatatgtttttctatcatttggaaacctttt

SEQ ID NO: 185499 - DNA, 1127 bp, Homo Sapiens
ttggttcatcttttgttttaggaaggaagacttcaagaagtcattgaaacccttctctctctggaaaagcagactcgtactgcttccgatatggtatcgacatcccgtatcttagttgcagtagtgaagatgtgctatgaggctaaagaatgggatttacttaatgaaaatattatgcttttgtccaaaaggcggagtcagttaaaacaagctgttgccaaaatggttcaacagtgctgtacttatgttgaggaaatcacagaccttcctatcaaacttcgattaattgatactctacgaatggttaccgaaggcaagatttatgttgaaattgagcgtgcgcgactgactaaaacattagcaactataaaagaacaaaatggtgatgtgaaagaggcagcctccattttacaggagttacaggtggaaacctacgggtcaatggaaaagaaagagcgagtggaatttattttggagcaaatgaggctctgcctagctgtgaaggattacattcgaacacaaatcatcagcaagaaaattaacaccaaatttttccaggaagaaaatacagagaaattaaagttgaagtactataatttaatgattcagctggatcaacatgagggatcctatttgtctatttgtaagcactacagagcaatatatgatactccctgtatacaggcagaaagtgaaaaatggcagcaggctctgaagagtgttgtactctatgttatcctggctccttttgacaatgaacagtcagatttggttcaccgaataagtggtgacaagaagttagaagaaattcccaaatacaaggatcttttaaagctttttaccacaatggagttgatgcgttggtccacacttgttgaggactatggaatggaattaagaaaaggttcccttgagagtcctgcaacggatgtttttggttctacagaggaaggtgaaaaaaggtggaaagacttgaagaacagagttgttgaacataatattagaataatggccaagtattatactcggataacaatgaaaaggatggcacagcttctggatctatctgttgatgagtccgaagcctttctctcaatctagtagttaacaagaccatctttgctaaa

SEQ ID NO: 185500 - DNA, 2154 bp, Homo Sapiens
ttggcacccgcctccggcggggctctcagtgaaaaatgtactctgacctgaatcctgaattttccttgatggtcaaaagattaagaaatcatgagtggaggatctcaagtccacattttttggggtgctccaattgctccactgaaaatcacagtatcagaagacacagcttctttaatgtctgttgctgacccctggaaaaaaattcagcttttatacagtcaacattctttatatctgaaggatgaaaaacagcacaaaaatcttgaaaactataaagtcccagaatctattggttctccagatcttagtggtcatttcttagcaaactgtatgaatagacatgttcatgtgaaagatgactttgtacgttctgtttctgaaacacagaatatagaatcccagaagattcactcctctagactgagtgatataactagctctaatatgcaaatatgtggatttaaaagcacagttccgcatttcaccgaagaagaaaagtatcaaaagcttctcagtgaaaataaaattagagatgaacagcctaaacatcagccagatatatgtggtaagaactttaacacaaatttgtttcagttgggccataaatgtgcagctgtgttggatttggtttgtagtactgaaaaaattaatatagggcctgaagtggtacaaagagagtgtgtgccaacagaatatcatgaaatacaaaaccagtgtttgggattattttcctcgaacgcagtagataagtcaaggtctgaagcagcagttaggaaggtctcagaccttaaaatatcaactgatacagaatttctcagtataattacctccagccaggttgcttttttagctcaaaagaaagataaaaggcggagtcctgtaaataaagggaatgtaaacatggagactgaaccaaaggcaagttacggggagataagaatacctgaagagaattcgattcagcttgatggttttacagaagcatatgaaagtggacaaaaccaagcatattcccttgaactttttagtcctgtttgtcctaaaacagaaaatagccgcattcacataaactctgataaaggtcttgaagaacatacaggatctcaagaacttttcagttctgaagatgaactgccaccaaatgagatacgtattgagttgtgtagctcaggaatactgtgttcccaactaaataccttccacaaaagtgctattaaaagaagctgtacctctgaagataaagtgggccagtctgaagctctatctagagtccttcaagtagctaagaaaatgaagttgatttctaatggaggagattctgctgtagaaatggatcggagaaatgtgtctgaatttaagagtattaaaaaaacatcattaataaaaaactgtgattctaaaagccagaagtataattgtttagtcatggtgctatctccatgccatgtgaaggaaataaacataaaattcggaccaaattctggctctaaagtgcctttagcaacagttacagtaattgatcaatcagaaactaagaagaaggtttttctgtggaggactgcagcattttgggcatttacagtgtttcttggagatataattttactcacagatgttgttattcatgaggaccaatggattggcgagacagtactacaatcaacatttagcagtcagttattaaatcttgggagttattcatctattcagcctgaagaatattccagtgtagtttgtgaagttgtacttcaagacttactggcatatgtgtcctcaaaacattcctacctcagagatcttcctccgaggcagcctcagagggtgaacagtatagactttgtagaattggagcaccttcaacctgatgtattagtccatgcagtactaagagttgttgatttcactatactgacagaggcagtatacagttatagaggacagaagcagaaaaaagttatgttaacagtggaacaggcccaagatcaacattatgcgcttgtattatggggtcctggagcagcctggtactctcaacttcaaaggaaaaaaggttatatttgggaatttaaatatctttttgttcagtgcaattacacactagaaaacctagaattgcatacaacgccttggtcatcctgtgagtgcttgttt

SEQ ID NO: 185501 - DNA, 1041 bp, Homo Sapiens
  misc_feature (132)..(149): n is a, c, g, or t
ttttaaaagtcaatctccagtttctcatcacatcttaatttttttaaaaaggcttttaaacactagtatcactccaagtctttagctttgatacttgctctgaaaacacactatcgtatgtttgtgtatgtnnnnnnnnnnnnnnnnnngtgacttaaaagtggcaaccgcctcttgaaaagtaaaaatatgtcatccctccattctgcccttaaatgagaaataaagacaatagatttgcccactgcagactgggataccagaaaagacgttctaagtctcgcctgagacaatattaacctgctatcttaagtcccaacttggatgacttaaatttcagtgtacgtgcctccgttcccactcttgccccatcagctccatcagcatcgtcatccccggctcggatcccggccgcgacccgccagggccgccggagtccgcgaataccgcccgctcccagcaacgaagctccccggctcccggccgaccgcgagttcctggagcagcagcctccaaggttcccaaagcccacgattcaggcgagcggtgccgaccgggccgtggactgtggcattttaaaactacagaagtctcactgcacgactggcgcggccgaggtggcccaggagaccctccaagagattctggtcagctgccgggagcgtggaagagcaaccaaagccaccaaggcgccgcgccaagtccccggagcagtcacctcagctttccgttctccctctagttacaattactccacaggcttctggcgcttccttcgagaaaatgaaaaactaaaaacgcgtagaggtggtagaagtcgttggcattttccgtttaatgtgatcccccaggctccatcccttaagtggggtttccaaactcggatgcatcctcagcagaggttttccatgttgacagatctctcgcctcccacaaaatggggccggggaggcggccgcggtctcctctatgggcgccgccattttgtgaggcggcggcggcgcggcggcaggagcccggggtgtgtataatggttgccaa

SEQ ID NO: 185502 - DNA, 835 bp, Homo Sapiens
ctttgtacaaaaaagttggcagagcattcctctacaaattggaagaacacgaggaatttttcccagcatttcaggcatttactaatgatctacttgaaatcttagaaattgatgacttggatgccattgtacctgcagtaaagaaattaaaagtactttcatactgaaaacaaatcaaatcatttttactgtgtaaattgtattcttaacattttgtattttgtaggattgatcttattttgagacaagggttgtaaaatgtatttgctctcagaattcatccccttcttagtattaggtcattcttcatctgtgtaatttttattatctttgagattcttatacagaaaatagttgcaagggtaaggtaattaactttagatcccttcatttctaaagcaattattgagtgcttaaaatttaaggttgttttagagtggagtttgtgagtaaaagaggagcccagggagacagattgcaagtagtaggttgcaatcttttagattcagcttgtaataatctttgagccacaccaaaaggaatgccaagggctctctaaatttagccagtaggaagctactgctctcctggcaaggattaattggcacattctgttaagatatccctcatgacagttgccctttcaaagcaggaggaagaaaaggaagaaagaaaaactgtttcatcatttctgttagggtaggaaatgaatcatagggtaaaatggatgagtagatagaagtctctcatttaaaaagtgtcttttgcaatcttgatgtaatgcactttttataaggacttgagatctcaaataaaatttctgtaaagaatttcc

SEQ ID NO: 185503 - DNA, 2135 bp, Homo Sapiens
ttggcgactgagtaagatgaagatccagtttcagacatgagactcgttgggtgatcatttcattgagatcaacctgaatgaccaggtgtaaagtgcaagagtaatatgctatgactgaggcaactcaaattttttaattgccaatttctgtttcttttgattctacaaaagtaactatgtttccggtagcccctaaaccccaggattccagtcaaccatcagacagactcatgactgaaaaacagcaggaagaagcagaatgggaaagcataaatgtgctattgatgatgcatggcttaaaacctttgtctctagtcaaaagaacagatctcaaagatctcatcatttttgacaaacagtcatcacaaaggatgagacagaatttgaaattgttggtggaagaaacatcatgtcaacagaacatgatacaggagcttatagaaactaatcaacagcttagaaatgaacttcagctagagcaaagccgagcagccaatcaagaacaacgagctaatgacttggaacaaattatggaaagtgtgaaatccaaaattggtgaattggaggatgaatcactaaatagggcttgccaccaacagaataaaataaaagatcttcaaaaggagcagaaaactttgcaggtgaagtgccagcattataagaaaaaacgaacggagcaagaagaaactattgcttctttgcaaatggaagtctgtagattaaaaaaggaggaagaagatcgcattgtcactcaaaacagagtgtttgcctatctgtgcaaaagagttcctcataccgtcttggatagacagttgctttgtctaattgattactatgaatctaaaattagaaaaattcatacacaaggcaatataaagaagatgaaagtcagtcagaagaagaaaacgactacagaaatctggatgcctcaccaacttataaaggccttttaatgtcattacagaatcaactcaaggaatcaaaatctaagattgatgcactttcaagtgaaaagctgaacctccaaaaagatttggaaaccaggcctacgcagcatgaattaagactttataaacagcaggtgaagaagctggaaaaagcccttaagaaaaacgtcaaattacaggagcttattaatcataagaaggctgaggacacagagaagaaagatgagcccagcaaatataatcagcaacaggccctaattgaccagagatactttcaggtgctgtgtagcatcaattcaattatccacaatccaagagctccagtaataatttataaacagaccaaagggggagtccaaaattttaataaagatcttgttcaagattgtggatttgagcatcttgttcctgtaatagaaatgtgggcagatcaactgacatccttaaaggaaatgagtgacataaaaatagattaccggttgaagttctgagtgaatgatgcagataacttgtgctctagagtctggaggagaaagagaacactctgattgtagcccccaagaagggctttgccatggtggatttgtataagtccttgaaaacactatctgcagaactggtaccttggcttaatttgaagaagcaggatgaaaatgaaggtatcaaagttgaagatttgttgtttatagtagatactatgctggaagaagttgaaaataaggaaaaggacagcaatatgccacactttcaaactttgcaagctattgtttctcacttccaaaagttatttgatgtgccttctttaaatggagtctatccccgaatgaatgaagtttatactaggcttggagaaatgaacaatgctgtgagaaacctccaagaactcttagaattagatagttcatcctcattgtgtgtgctagtaagcactgttggaaaactctgtaggctgattaatgaagatgtgaatgagcaggttatgcaggtattaagacctgaagacctccagagcattatctacaaattggaagaacacgaggaatttttcccagcatttcaggcatttactaatgatctacttgaaatcttagaaattgatgacttggatgccattgtacctgcagtaaagaaattaaaagtactttcatactgaaatcaaatcatttttactgtgtaaattgtattctt

SEQ ID NO: 185504 - DNA, 1751 bp, Homo Sapiens
  misc_feature (522)..(582): n is a, c, g, or t
  misc_feature (638)..(681): n is a, c, g, or t
  misc_feature (1286)..(1294): n is a, c, g, or t
  misc_feature (1651)..(1659): n is a, c, g, or t
ttggattccttctccctatctgcttatatcgcattgctcatttagagtttgcaggaggctccatactaggttcagtctgaaagaaatctcctaatggtgctatagagagggaggtaacagaaagactcttttagggcatttttctgactcatgaaaagagcacagaaaaggatgtttggcaatttgtcttttaagtcttaaccttgctaatgtgaatactgggaaagtgattttttctcactcgtttttgttgctccattgtaaagggcggaggtcagtcttagtggccttgagagttgcttttggcattaatattctaagagaattaactgtatttcctgtcacctattcactagtgcaggaaatatacttgctccaaataagtcagtatgagaagtcactgtcaatgaaagttgttttgtttgttttcagtaatattttgctgtttttaagacttggaaaactaagtgcagagtttacagagtggtaaatatctatgttacatgtagattatacatatannnnnnnnnnnnnnnnnnnnnnnnnnnnnnnnnnnnnnnnnnnnnnnnnnnnnnnnnnnnncatatccacacacatacattacatatatctgtgtatataaatccacatgcacatgnnnnnnnnnnnnnnnnnnnnnnnnnnnnnnnnnnnnnnnnnnnntatgactttaaatagctatgggtacaatattaaaaaccactggaactcttgtccagtttttaaattatgtttttactggaatgtttttgtgtcagtgtttctgtacatattatttgttaattcacagctcacagagtgatagttgtcatagttcttgccttccctaagtttatataaataacttaagtattgctacagtttatctaggttgcagtggcatctgctgtgcacagagcttccatggtcactgctaagcagtagccagccatcgggcattaattgatttcctactatattcccagcagacacatttagaaactaagctatgttaacctcagtgctcaactatttgaactgttgagtgataaaggaaacaaatataactgtaaatgaatcttggtatcctgtgaaacagaataattcgtaatttaagaaagcccttatcccggtaacatgaatgttgatgaacaaatgtaaaattatatcctatatttaagtacccataataaatcatttccctctataagtgttattgattattttaaattgaaaaaagtttcacttggatgaaaaaagtagaaaagtaggtcattcttggatctacnnnnnnnnnagccttattaatatttttccctattagaaaccacaattactccctctattaacccttcacttactagaccagaaaagaacttattccagataagctttgaatatcaattcttacataaactttaggcaaacagggaatagtctagtcaccaaaggaccattctcttgccaatgctgcattccttttgcacttttggattccatatttatcccaaatgctgttgggcacccctagaaataccttgatgttttttctatttatatgcctgcctttggtacttaattttacaaatgctgtaatataaagcatatcaagtttatgtgatacgtatcattgcaagagaatttgtttcaagannnnnnnnnaatgttccaaaacatggccaatatacaacattcaagggaaatggggaaacataatttagagaacaagaacaaaccatgtctcaaattttttt

SEQ ID NO: 185505 - DNA, 1916 bp, Homo Sapiens
ttggagcccgaggcctatatttatagagaaacgcgtgtccccgaggccgccgtgggcagcgtccggtcgcctcttaaaggatttttacccttcggaaggggattccccgtttaatttttttcctactttgattttttgaaatttggagcttcgcaccaggaccgcggagaagtgcaaagtcgcggggagggccgtattgtgcggagagccttttgtctgcggtgctgcggccgtgggagccggcccccgcctcccgtttccgtcccgtctccaagcccgccgactccagctcgtcctcgccgcgccggtgccacctgtgagccgcggcgtgggcccgggctccgaaggcgcccctttgtcctgcggcgggcccgataagaagtcctcctggcggggctcggggtggtggggggcggggagatgaacgctgcggccagcagctaccccatggcctccctgtacgtgggcgacctgcattcggacgtcaccgaggccatgctgtacgaaaagttcagccccgcggggcctgtgctgtccatccgggtctgccgcgatatgatcacccgccgctccctgggctatgcctacgtcaacttccagcagccggccgacgctgagcgggctttggacaccatgaactttgatgtgattaagggaaagccaatccgcatcatgtggtctcagagggatccctctttgagaaaatctggtgtgggaaacgtcttcatcaagaacctggacaaatctatagataacaaggcactttatgatactttttctgcttttggaaacatactgtcctgcaaggtggtgtgtgatgagaacggctctaagggttatgcctttgtccacttcgagacccaagaggctgccgacaaggccatcgagaagatgaatggcatgctcctcaatgaccgcaaagtatttgtgggcagattcaagtctcgcaaagagcgggaagctgagcttggagccaaagccaaggaattcaccaatgtttatatcaaaaactttggggaagaggtggatgatgagagtctgaaagagctattcagtcagtttggtaagaccctaagtgtcaaggtgatgagagatcccaatgggaaatccaaaggctttggctttgtgagttacgaaaaacacgaggatgccaataaggctgtggaagagatgaatggaaaagaaataagtggtaaaatcatatttgtaggccgtgcacaaaagaaagtagaacggcaggcagagttaaaacggaaatttgaacagttgaaacaggagagaattagtcgatatcagggggtgaatctctacattaagaacttggatgacactattgatgatgagaaattaaggaaagaattttctccttttggatcaattaccagtgctaaggtaatgctggaggatggaagaagcaaagggtttggcttcgtctgcttctcatctcctgaagaagcaaccaaagcagtcactgagatgaatggacgcattgtgggctccaagccactatatgttgccctggcccagaggaaggaagagagaaaggctcacctgaccaaccagtatatgcaacgagtggctggaatgagagcacttcctgccaatgccatcttaaatcagttccagcctgcagcgggtggctactttgtgccagcagtcccacaggctcagggaaggcctccatattatacacctaaccagttagcacagatgaggcctaatccacgctggcagcaaggtgggagacctcaaggcttccaaggaatgccaagtgctatacgccagtctgggcctcgtccaactcttcgccatctggctccaactggtaatgctccggcctctcgtggcctccctactaccactcagagagtcgggtctgagtgcccggaccgcttggctatggactttggtggggc

SEQ ID NO: 185506 - DNA, 1338 bp, Homo Sapiens
  misc_feature (1123)..(1131): n is a, c, g, or t
ttggccctgctgctctgaggacaccatcccttcccaagtttcagattatgattatttctctgtaagtggtgaccaggaggcagatcagcaggagttcgacaagtcctccaccattccaagaaacagcgacatcagccagtcctaccgacggatgttccaagccaagcgtccagcctcaactgctggcctccccaccaccctgggacctgctatggtcactccaggggttgcaactatccgacggaccccttccaccaagccttctgtccgccggggaaccattggagctggtcccatccccatcaagacacccgtgatccctgtcaagaccccaaccgtcccagacctcccaggggtgttgccagcccctccagatgggccagaagagcggggggagcacagccctgagtcgccatctgtgggtgagggcccccaaggtgtcaccagcatgccctcctcaatgtggagcggccaagcttccgttaaccctccacttccaggcccgaagcccagtatccctgaggagcacagacaggcaattccagaaagtgaagctgaagaccaggaacgggaacccccaagtgccactgtctccccaggccagattccagagagtgaccctgcagacctgagcccaagggatactccacaaggagaagacatgctgaacgccatccgaaggggcgtgaaactgaagaagaccacgacaaacgatcgctcagcccctcgcttttcttaggttcacaagaaatgcgccggtggggaatgaactgtttcattaataaaacctaatttgtcttgatccattccactctataataaaacaaaagattttgtaggcaactcggaatatagctcttttgaaagtactcgacacctttagataagaattaaaaccaacctatgtaactgacataatcttgatcttttaatttgtaaatattgacaattttctttctgcacattttaatcttagtttcccttttgatttttctgaaggtgccaaattccatttaacttttttacaagtctttgtaaaattttaaatgcataaagggggttggggcaggggaaccacgaagtagttaattttagaaaaggatttactatacttcactcttcnnnnnnnnnccccacaagcttttgtagatgcattgtagtagtctagcttagaagcaaatgcaagttattttaatgtacaaactaaatgggtaagaggtaaaatcttcatttaaatatactatgttctggatgaaaagagcaggagtaacaattgatgagcaatattcagagtgaagtaaatctgggaaatggtagactgtgttgggattgggggga

SEQ ID NO: 185507 - DNA, 1110 bp, Homo Sapiens
  misc_feature (179)..(187): n is a, c, g, or t
ttggattttctttctgcacattttaatcttagtttcccttttgatttttctgaaggtgccaaattccatttaacttttttacaagtctttgtaaaattttaaatgcataaagggggttggggcaggggaaccacgaagtagttaattttagaaaaggatttactatacttcactcttcnnnnnnnnnccccacaagcttttgtagatgcattgtagtagtctagcttagaagcaaatgcaagttattttaatgtacaaactaaatgggtaagaggtaaaatcttcatttaaatatactatgttctggatgaaaagagcaggagtaacaattgatgagcaatattcagagtgaagtaaatctggaaatggtagactgtgttgggataggggggagggccatgggaggggtacatcgtcaacatagccgatcctgttacatttaagagtagcctcgtaggttgaatttcttctggtagcttcatggtaaatgcatccgaataagccatactggattgcagtgtttgtttctgtagggtgtttaaggacttgacttcctttctcccatgattcctctggactgcacacagcacccacaaccagccccatgcatgctgctgcctctgggcagtcgtagaatctcccacttcagtttctcgttgattgtactcacctttatggaatccaaatacatccaaaagggtaaggcagttttaaaaatgtgaaaacatttaaaaatgataatagcagggaattcttagattatagtaaatgccttttacttaactgtgcccagcaggctgggtgcgttaaaaagcccaagtattttgaaaaaactcgaacagatttgacaagggtagccagcttggagtctagcaacttgccaatgtgtttaccaatctgggggcttgtttttcttttcttctttcaaataaatggcagttaactggctttacagtaaacattgaagagaggaggatttgtttattgtcactgggaatctgaccactatactgtcctttttttgtattctgggtaaatgttttttggaaaagatttgtcttttctaagtggaagttaaatttgttatactgcctcatcccctaaagccca

SEQ ID NO: 185508 - DNA, 1406 bp, Homo Sapiens
gctttttctataatagccaactttgtacaaaaaagttgggaattcaccaccatcgagaaccagccctggtttgcggccatctacaggaggcaccgggggggctctgtcacctacgtgtgtggaggcagcctcatcagcccttgctgggtgatcagcgccacacactgcttcattgattacccaaagaaggaggactacatcgtctacctgggtcgctcaaggcttaactccaacacgcaaggggagatgaagtttgaggtggaaaacctcatcctacacaaggactacagcgctgacacgcttgctcaccacaacgacattgccttgctgaagatccgttccaaggagggcaggtgtgcgcagccatcccggactatacagaccatctgcctgccctcgatgtataacgatccccagtttggcacaagctgtgagatcactggctttggaaaagagaattctaccgactatctctatccggagcagctgaaaatgactgttgtgaagctgatttcccaccgggagtgtcagcagccccactactacggctctgaagtcaccaccaaaatgctgtgtgctgctgacccacagtggaaaacagattcctgccagggagactcagggggacccctcgtctgttccctccaaggccgcatgactttgactggaattgtgagctggggccgtggatgtgccctgaaggacaagccaggcgtctacacgagagtctcacacttcttaccctggatccgcagtcacaccaaggaagagaatggcctggccctctgagggtccccagggaggaaacgggcaccacccgctttcttgctggttgtcatttttgcagtagagtcatctccatcagctgtaagaagagactgggaagataggctctgcacagatggatttgcctgtgccacccaccagggcgaacgacaatagctttaccctcaggcataggcctgggtgctggctgcccagacccctctggccaggatggaggggtggtcctgactcacatgttactgaccagcaacttgtctttttctggactgaagcctgcacgagttaaaaagggcagggcatctcctgtgcatgggtgaagggagagccagctcccccgacggtgggcatttgtgaggcccatggttgagaaatgaataatttcccaattaggaagtgtaacagctgaggtctcttgagggagcttagccaatgtgggagcagcggtttggggagcagagacactaacgacttcagggcagggctctgatattccatgaatgtatcaggaaatatatatgtgtgtgtatgtttgcacacttgtgtgtgggctgtgagtgtaagtgtgagtaagagctggtgtctgattgttaagtctaaatattttttttatctgtgtggac

SEQ ID NO: 185509 - DNA, 1331 bp, Homo Sapiens
ttggagaccgcagccccggagcccgggccagggtccacctgtccccgcagcgccggctcgcgccctcctgccgcagccaccgagccgccgtctagcgccccgacctcgccaccatgagagccctgctggcgcgcctgcttctctgcgtcctggtcgtgagcgactccaaaggcagcaatgaacttcatcaagttccatcgaactgtgactgtctaaatggaggaacatgtgtgtccaacaagtacttctccaacattcactggtgcaactgcccaaagaaattcggagggcagcactgtgaaatagataagtcaaaaacctgctatgaggggaatggtcacttttaccgaggaaaggccagcactgacaccatgggccggccctgcctgccctggaactctgccactgtccttcagcaaacgtaccatgcccacagatctgatgctcttcagctgggcctggggaaacataattactgcaggaacccagacaaccggaggcgaccctggtgctatgtgcaggtgggcctaaagccgcttgtccaagagtgcatggtgcatgactgcgcagatggaaaaaagccctcctctcctccagaagaattaaaatttcagtgtggccaaaagactctgaggccccgctttaagattattgggggagaattcaccaccatcgagaaccagccctggtttgcggccatctacaggaggcaccgggggggctctgtcacctacgtgtgtggaggcagcctcatcagcccttgctgggtgatcagcgccacacactgcttcattgattacccaaagaaggaggactacatcgtctacctgggtcgctcaaggcttaactccaacacgcaaggggagatgaagtttgaggtggaaaacctcatcctacacaaggactacagcgctgacacgcttgctcaccacaacgacattgccttgctgaagatccgttccaaggagggcaggtgtgcgcagccatcccggactatacagaccatctgcctgccctcgatgtataacgatccccagtttggcacaagctgtgagatcactggctttggaaaagagaattctaccgactatctctatccggagcagctgaaaatgactgttgtgaagctgatttcccaccgggagtgtcagcagccccactactacggctctgaagtcaccaccaaaatgctgtgtgctgctgacccacagtggaaaacagattcctgccagggagactcagggggacccctcgtctgttccctccaacgccgcatgactttgactggaattgtgagctggggccgtggatgtgccctgaagacaagccag

SEQ ID NO: 185510 - DNA, 2645 bp, Homo Sapiens
  misc_feature (2412)..(2447): n is a, c, g, or t
ttggatgttaaggaatgtgggtggtttgaagtcagaaaaatgggtaagaagagtcgagtaaaaactcagaaatctggcactggtgctacagcaactgtgtcaccaaaggaaatcttgaacctgaccagtgagctgctgcagaaatgcagcagtccggcgcctggcccaggaaaagagtgggaagagtatgtgcagatccggactctggttgagaaaatacggaaaaagcaaaaaggtctgtccgttacttttgatggaaaaagagaagattactttcctgatctaatgaaatgggcctctgaaaatggggcttctgtcgagggttttgaaatggttaacttcaaagaagagggctttggtttgagagcaacaagagatatcaaggcagaagaattgtttttatgggttccacgaaaattgctaatgactgttgaatctgctaaaaattcagtgttggggcccttatattctcaagaccgaatccttcaagccatgggaaacatcgcactggcctttcatttgctgtgtgagcgagccagccctaactccttctggcagccctatattcaaaccctccccagtgaatatgacactcctctctactttgaagaagatgaagttcggtatcttcagtccacacaagctatacatgatgtcttcagccagtataaaaacacagctcgacagtacgcctacttctataaagtcatccagacccatcctcatgccaacaaactacccttgaaggattctttcacttacgaggactacaggtgggcagtctcttctgttatgacgaggcaaaaccaaattcccacagaggatggttcccgcgtgaccctggctctgattcctttatgggatatgtgtaaccacaccaacggcctgatcactactggttacaacctggaagatgaccgctgtgagtgtgtggctctgcaggattttcgggctggagagcagatttacattttttatggcactcgatccaacgcagagtttgtgatccacagtggttttttctttgacaataactcacacgacagagtgaaaataaagcttggagtgagtaaaagtgacagactctacgccatgaaggccgaggtcttggctcgtgccggcatccccacttccagtgtttttgcattgcattttaccgagccgcccatctctgctcagcttttggcttttctccgagtattctgtatgactgaagaagaactgaaagaacacttgctgggagacagcgctattgatagaatcttcaccttggggaactcggaatttcctgttagctgggacaacgaggtcaaactttggacatttcttgaagatagagcctcacttcttttaaaaacatataaaacaactattgaggaagataaatccgtcttgaaaaaccacgatctttctgttcgtgcaaaaatggccatcaaattgcgcttaggtgagaaagagattttggaaaaagcagtaaagagtgcagctgtcaaccgggaatactatcgccaacagatggaggaaaaggctccgcttcccaaatatgaagagagtaaccttgggctgttggagagcagcgtgggggactcgaggctccccctggtcttgagaaacctcgaggaggaggctggagtgcaggatgccttgaacatcagagaggcaatcagcaaagcaaaggccacagaaaacgggcttgtaaacggtgaaaactctatccctaatgggaccaggtccgaaaatgaaagtctcaatcaagaaagtaaaagagcagttgaagacgccaaaggatcttcttcagacagcactgctggagttaaggagtagctcgaggtgaagctggatgggggatccagtggagcaggagttgacggacagtccgttcacatcgctgtgtttccttgttaacatttttctttctgcagagaggaagatatgtttttgctgctttatataaaaatggtttttttaagttattttaaaaatctagcttccctttttgattaagattgccatcttgcttttaggcaaaacaaaccaattaacaaacaaccacaagaaagggagaagaggtgcctgtgggagattttgcagacctattgtgggtataggtattttcttcctggggaagaattcagttcccgtctcagctgtacttttgtgggcctgtcatcttgatgaccagaatgaaagcttgctctgcctcctgccagccagaattggtggcgggacttggggatacagcgtgaaggtggggaagttgcacagcagaaaacagaattgaagttgggaaactctagagtctgggcaaaatgtttggttttttctcttaaaaaaaataacaccccattaccaaaagaaaaggtaaggtggcaaccttatttttaatagtttgaaatgatgataatcctaatnnnnnnnnnnnnnnnnnnnnnnnnnnnnnnnnnnnngtgatttctaaagatttgtttacttttgtgttttgttttactgtactaagaacttgtcctttctccttgaatcaagtacgacatgcatcatcctcctaattttaaatgttggctctgattttaaagtggtgcatttgattccagccttggtaatggagagtttgcaaacacacagcggcccacagcttcacgtggtgg

SEQ ID NO: 185511 - DNA, 909 bp, Homo Sapiens
cctttcagtctgattttgaggttttcacctggggctacggtatcagtctctacatcatcggaaagtattccaagaactttccacgttgtgcttgtttggcatcatcacaagctgctggcctttacaaatagatctgattccagctttcccaggaccacagtgcccatatccttgtacttatccacaattggcagcctgattggtccatcaactgatctattgaagttcggcaaattatccagatatggaataaacggtaatccaatgtaccaaggacagaaatccgactgctctttgagatttgctccagtaagtcctgagcagggcataaagtgaatgtcctttttgggattgaagccaacttttttcaaaaatggcactagtttctccttacattcttcatatctctcattgctccaatttactgttggatcatccatcttattaattagcacaattaggtgttttacacctgctgtctttgccaacattgcatgttctcttgtctgtcctcctttttcaaatccagtttcaaactctcctttcctggctgagattaccagcacagccaaatcagcttgagaggcaccaccaatcatatttgggacaaaactcttgtggccaggggcatctagaattgtgaaatgcttcttttcggtttcaaaataggcacgacccacttctactgttttacccttgtctcgttcttcctgatttgtgtctaaggcccaagacaagtaccaagtttctctgtttttctctttagcttctctttcatacttttcaagcgtccttttgtcaaccattccagtcaaatacattatttgtcctccaatggttgacttgccagcatctaaaagtaacatcaacatgcaaaccataggttaaaaccaaaaccaatgtctccaa

SEQ ID NO: 185512 - DNA, 3345 bp, Homo Sapiens
  misc_feature (2785)..(2819): n is a, c, g, or t
ttggctctctttactgagtgcagaaacaatgtctgttcttcaggatgcccctgcctgttgcctgcctctgtttaaatttacagatatctatgaaaaaaagtttggacacaagttgaatgtgtcagatctatataaattaacagacacggtcgcaatccgtgaacaaggaaacggacggctggtgtgtctcctacccagcagtcaggcccgccagagccccttggggtcttcccagtcacacgacggctcctccacgaattgcagcccaattatatttgaagagttagaatatcacgagcctgtctgcagacagcattgttccaataaggatttcagcgaacatgaatttgatccagactcttacaagattccttttgtgattctttctttgaagacatttgcgccccaggttcacagtcttctccagacccacgagggcaccgtgcctttattgagctttccagattgttacattgcagagtttggcgatctagaagtagtgcaagaaaaccaaggaggtgttcccttagaacacttcattacctgtgttccaggtgtaaacattgccactgctcagaatggcatcaaagtggttaaatggattcacaacaagcccccgcctcccaacactgacccttggcttctgcgttcgaagagtcctgtaggtaacccccagctgatccagttcagtagagaagtgattgacttgctgaaaagccagccatcttgtgtcatacccatcagtcatttcatcccatcctatcaccatcattttgcaaagcagtgccgagtgtcagactacggatactccaagctgattgagttattagaagcagtgcctcatgtattgcagattcttggaatgggctccaaacgtctgctgacccttacccacagggcccaggtgaagcgctttactcaggatttactaaaacttctcaaatcccaggccagcaaacaggtcattgtgagagaattctcacaggcttatcactggtgtttctcaaaggactgggatgtcactgaatatggtgtttgtgagttgattgacatcgtatcagagattccagacacaaccatctgcttgtcccaacaagataatgaaatggtgatttgtatccccaaaagagaacgcactcaggatgaaatagaaaggacaaaacagttctccaaggatgtcgttgatttgctgcgtcaccaaccccatttccggatgccctttaataaatttatcccttcttaccatcaccactttggccggcagtgcaaacttgcgtactatgggtttaccaaactacttgaactttttgaagccatacctgatactttacaagtattggaatgtggagaagaaaagatccttactctgacagaggtggagcggttcaaagctctagctgcccagtttgttaaactccttcggtcccaaaaagataactgccttatgatgacagatctccttacagaatatgctaaaacttttggttatacatttcgtctccaagactatgatgtcagttccatttcggctttaactcagaaactctgccatgtcgtgaaggttgccgatatagaatctggcagacagattcagctgatcaaccgaaagtctctgcgatctctcactgcccagttgctggtattgttgatgtcttgggaaggaaccacccatctttctgttgaggagctcaagagacattacgaaagtacccacaacactccccttaacccctgtgaatatggattcatgaccttgaccgaactgctgaagagcctgccatacttggttgaggttttcactaatgataagatggaagaatgtgtgaagctcacaagtctgtatttgtttgcaaagaatgtgcggtctttacttcatacttaccactaccagcagattttccttcatgagttttccatggcctataccaagtatgtcggagaaactctgcagcccaagacctacggccacagcagcgtggaggagctcttgggagcaattccacaggtggtctggataaaaggacatggtcataagagaattgtagtgttaaaaaatgacatgaaaagtcgtttgagttcactcagtctctcccctgccaatcatgaaaaccagccctcggagggcgagcgcatcctggaggtgcccgaatcgcacacagcctcggaactcaagcttggagctgacggcagtgggcccagtcacacagagcaggagcttctccgcctgaccgacgactcccccgtcgacctcctgtgtgcgcctgtcccctcgtgcctgccgtcccctcagctgagaccagaccccgttatcctccaatctgctgatctcattcagtttgaggagcgccctcaagagccttctgaaattatgattttaaaccaagaagaaaaaatggagattccaataccaggaaagagcaaaactctgacctctgactccagctcgtcctgcatctcagcagctgtccccgtgcctccctgcccctcctcggaaacctccgagtcactgctcagcaaggaccccgtggaaagcccggccaaaaagcaacccaaaaatagagtcaaattggcagccaacttttccttagcacctataaccaagctttaactcccatttggaatatagaattaggatgggaaaacactgtctgattctgcacacaaaagtgggtttcaaaaatacatccttttctgtgtcatgaaaaccccccgaagccattgacttcatcttacctgtgttctatcatgtttttcttttccattgaacacagctttgagctgaagnnnnnnnnnnnnnnnnnnnnnnnnnnnnnnnnnnnaattatttgaagaacttgtggcatttgttaaagaatccttaatatattttaccaaatttttagtaactattatgaaatacaatggtgttccaaaagaagaaagcactaaaaactcaactagcaggaagcggttttgcttccattgagccacgtcggtggtgtcatcctacatgtagcataatagagtctctcagcctttgcttactggtgtttccgacagtattaacccagtgcgtggcatgtctttgaagcaaagcctgtcccgctagcctgtgtgttcacacaccaaaggagaagggtaggcgaggggttcggagtgtattttcaggttggaatgtgaaggttcctggcttccatgtgacttgtaagtgtgccttgttttttatttaaactatgtctgtagttgacaaaagtggcttcatcacaaatttttttaaacgtttctactttggggttccatttagagctttctagaaagttgaggatgtttgaagcttcccttctgtgttccagtttgatatgggtt

SEQ ID NO: 185513 - DNA, 2217 bp, Homo Sapiens
  misc_feature (90)..(123): n is a, c, g, or t
ttggtgaaaaccccccgaagccattgacttcatcttacctgtgttctatcatgtttttcttttccattgaacacagctttgagctgaagnnnnnnnnnnnnnnnnnnnnnnnnnnnnnnnnnncaattatttgaagaacttgtggcatttgttaaagaatccttaatatattttaccaaatttttagtaactattatgaaatacaatggtgttccaaaagaagaaagcactaaaaactcaactagcaggaagcggttttgcttccattgagccacgtcggtggtgtcatcctacatgtagcataatagagtctctcagcctttgcttactggtgtttccgacagtattaacccagtgcgtggcatgtctttgaagcaaagcctgtcccgctagcctgtgtgttcacacaccaaaggagaagggtaggcgaggggttcggagtgtattttcaggttggaatgtgaaggttcctggcttccatgtgacttgtaagtgtgccttgttttttatttaaactatgtctgtagttgacaaaagtggcttcatcacaaatttttttaaacgtttctactttggggttccatttaggagctttctagaaagttgaggatgtttgaagcttcccttctgtgttccagtttgatatgggttaggttaaggaaaaggagatggtctcgatgtcatggatttaaagtcagcatttggattacaacacacattattgtgtgtcgagaggcagcattggaaagagcctgattttctaaaatatgcatcaagtgcataaattacaaatcagagctgagtggggaggtgcttcagcagcagcgggatcaatacgatttccactgggaagagacaggaattctacctacacataggaaggccaaggttgatccacttaaccttgttattgtaattttaaagctggtatcggtagctgggaagctttatgtgtgtgtatgtcagctcagcatcttttaatcgtgtctgattttactctcgttacttctcgctgttggaagcatctctgggtttcttgtggcgtctggtgtggaatggccttcctctctaggtgcctgaggtgtccgctgacgggtggcctctcacccccctctagagaaacctgacatttacaatggattgtatttgtccggcaaaaaaggcggattcattcatagagcagaaagaacctgttggcgtaaggtcttccactagttagatggtttcttttggggaaatgtttatatttggtaacttctagaaagccagaaaatggactctgatttcatagcattttgataaaatgccacaaaataagggctatagagagatttttacaagtcagattttttgttccccaaatcttttaaatgaagccagtgactcccagttctcaacacatggccccagtcaagacagaacaccatggaaaaaaccctgtaagtattatggcactctccgaatcctcctgaaggcatttcctctacagacatagtgttacaggaagtgaaatgcaaatgtgcaattttttttaaaggagcttttaaacaaagtaataataattggtgttgagaacatcagttgccttattctaagatttcataaggctgagtttgcacgcttggacttcagttctgctagcatgtaaagagtggtggactttaaaaccgtaagaggtatcattacaagtcacctggaacagactcaaagaacaggttctttgggcaacagacaaagaagaatcaagttctgtgctgtcccgtgagtgtgtctgagtaccattcactggagttgctgcttaggtctgggacgtgtgtgtgactcttaacaattgctgtctgaaaatgagagagaagacttcggaagcacattgtgttcataatgtactccacaatggccagtccaattgctatctatttttttatccagaggcttaattaaatgatgtggtaaaatgatgtttgagcattaagacaatgtaattctttatttctgggtggaaagatataccggattaaatttatctgtttaaaaaaatgacaaaagttatcaccaaaaccccctttcccatcttgcactgtttgttttggattgggtttgggggaaagagatgtttttcttagttgtctactttgtttgaacacttttgttgtggttcaagtgctgttttgtgtgttgggaccaaacagttgtcataaactttacaagcgagcatct

SEQ ID NO: 185514 - DNA, 1632 bp, Homo Sapiens
ttggggaccgaatttacaagcagtattcacctagacgtcgacctggagatcctgtttgccctttttatagtcaccaattaagaagcaaacacctggctatcaaaaaaatgaatgaaattcagaaaaatatcgatggatgggaaggcaaagatattggacagtgttgtaatgaattcattatggagggaccattgacaagaatcggtgccaaacatgaacggcatatttttctgtttgatggcttaatgatcagttgtaaacctaatcatggccagactcggcttccaggttacagtagtgcagaatacaggttaaaagaaaaatttgtcatgaggaaaatacaaatttgtgataaagaagatacttgtgagcacaagcatgcatttgaattagtatccaaagatgagaacagcataatatttgctgctaagtctgctgaagaaaaaaacaactggatggcagcccttatttctcttcattatcgtagtactctagatcgaatgttagattcagtattattgaaagaagaaaatgagcaaccactgagattaccaagtcctgaagtatatcgttttgtagtaaaagactctgaggaaaacattgtttttgaagacaacttgcaaagtagaagtggcatccccattattaaaggaggaactgtagtgaaattaattgaaaggttaacatatcatatgtatgcagatcccaattttgttcgtacttttcttaccacatatcgttcattttgtaaaccacaggaattgctgagcttactgattgaacggtttgaaattccagagccagaacctactgacgcagacaaattggcaatagagaaaggcgagcagccaatcagtgcagaccttaaaagatttcgcaaggaatatgtccaaccagtacaacttaggatcttaaatgtatttcggcattgggttgaacatcatttttatgactttgaaagagacttggaattgcttgaaagactagaatccttcatttcaagtgtaagagggaaagctatgaaaaaatgggtagagtcaattgctaagatcatcaggaggaagaagcaagctcaggcaaatggagtaagccataatattacctttgaaagtccacctccaccaattgaatggcatatcagcaaaccaggacagtttgaaacatttgatctcatgacacttcatccaatagaaattgcacgtcagctgacacttttggagtctgatctttacaggaaagttcaaccgtctgaacttgtagggagtgtgtggaccaaagaagataaagaaataaattctccaaatttattaaaaatgattcgccataccacaaatctcaccctctggtttgaaaaatgcattgtggaagcagaaaattttgaagaacgggtggcagtactaagtagaattatagaaattctgcaagtttttcaagatttgaataatttcaatggcgtattggagatagtcagtgcagtaaattcagtgtcagtatacagactagaccatacctttgaggcactgcagaaaggaaaaggaaaatttggacgaagctgtggaattaagtcagatcactttaaaaaatacctagtaaaacttaagtcaatcaatccaccttgtgtgcctttttttt

SEQ ID NO: 185515 - DNA, 990 bp, Homo Sapiens
ttggcctgtatctgtcctccagactacatgcaagtgaatgggggaaataattgcatggatatgagaagaagtttgtgctacagaaactactatgctgacaaccagacctgtgatggagaattgttattcaacatgaccaagaagatgtgctgctgttcctacaacattggccgggcgtggaacaagccctgtgaacagtgtcccatcccaagtacagatgagtttgctacactctgtggaagtcaaaggccaggctttgtcatcgacatttataccggtttacccgttgatattgatgagtgccgggagatcccaggggtctgtgaaaatggagtgtgtatcaacatggttggcagcttccgatgtgaatgtccagtgggattcttctataatgacaagttgttggtttgtgaagatattgacgagtgtcagaacggcccagtgtgccagcgcaacgccgaatgcatcaacactgcaggcagctaccgctgtgactgtaagcccggctaccgcttcacctccacaggacagtgcaatgatcgtaatgaatgtcaagaaatccccaatatatgcagtcatgggcagtgcattgacacagttggaagcttttattgcctttgccacactggttttaaaacaaatgatgaccaaaccatgtgcttggacataaatgaatgtgaaagagatgcctgtgggaatggaacttgccggaacacaattggttccttcaactgccgctgcaatcatggtttcatcctttctcacaacaatgactgtatagatgttgatgaatgtgcaagtggaaatgggaatctttgcagaaatggccaatgcattaatacagtggggtctttccagtgccagtgcaatgaaggctatgagtggctccagatgggaggacctgtgtggatatcaatgaatgtcttctagaacccagaaaatgtgcaccaggtacctgtcaaaacttggatgggtcctacagatgcattt

SEQ ID NO: 185516 - DNA, 1874 bp, Homo Sapiens
  misc_feature (1378)..(1386): n is a, c, g, or t
taaaaggcaactttgtacaaaaaagttggctgaagatgaaaatccaggttttgcttcattaattcaccatccagagaccaaataattaaaagaaaaacaaatatagataggtagaactatattttcccccaatcagaatcatcatatcataggtacaatctttcaccaagtaaatttgtataaataagcactattctttgtattaccaaagcaaggtacaggtgactaccctagttcaaaacaaccactttctcaggcttctcatgtgtgtagctaagctaccttgtcatatgtgttgattcttgaaaactgggacgtgtatttccattgggggttggccatttatgctgacatgccatccttccagcaaacgtatgggaatgtgctttcaattgatggactactctattttttgcaaatttgtaaactttgcttctccaaatacaagtactaggttgtccatttatggtacctatttggtgctagtaaattttcaaactagatttataaatgcactgtaatatgtacacaacttagaaaccaaattacaagtattcagttccaatacttcattaatttcaatcaaccaaagttagttcagtagcttatctcagttatgagtataatacattacatgtaaattaagtgtgtgtatactgtaatcgtgctattttttatcattgaaacatttataaactagaataataatgcccttaatgtgagggtttgtaatggtgcttattaagaccaaagacttgttaaatgtatacaccaagtggtaatgaaatttctgtgactggcccacacgtgcatagaggtctgggaggaccaggaaacagcctcagtggccagaggatcaccagtgcatccttcatcacagcatgtgcaatatgccaagattaccctcggtcattcctgtcacaaggggtcaatgtcataaatgtcacaataaaacaatctcttcttttttttagtttaccccttggctttgtgttcttgcatggatttggggttggaggggccattccggaggctaaataaagtctcctggatttaaattatcctgggtctcttacttatggcttatgaaagtaccaaatgtataaccactagaagaaaatttaacatatgagtcgatcccttgttttatccattgaaagtagcagagtctggtgtcattaacctgacttgcttgtgagaaatttagattgtagagtcatttctgaaacatgacctaattcatcttgtgacttttaaatagtcttaaataccaagttcagtcattgtcttagagcacatgaatttcattataatagatttatcatgcccccctctcaaatatacacagttttggcaagccttaggtgttctgttccannnnnnnnncccctaaacatctttcgttagtcaatgctcatctaattacaaagggataatcccagactgtatccaattgctgtaacttttggtttcttaatgtcataatttttaaagtctgttttattttaagtgcaatattgagtatttagctgttaggctcaatccgtcgatatgaaataattttttaaatccctaagggcaggaaagcatttcgtggtagtgaaaataagaggaaataagatggcatgaaggtggggggcggagaaactaggtaggacacaggaaagtgctctcaaaaatctttgaagagctcagctgaaaaaatggagtagatttggctcatactattccggaaggcaaaaccagggtcagctgatgtcagccccagtttaatacacacggtcccaattatagagctactcactgaaagaatgggtttccttgcattgtggtgagctccctgtcacaagatagaagagtttcagtctaggctt

SEQ ID NO: 185517 - DNA, 4125 bp, Homo Sapiens
ctttgtacaaaaaagttggatcgacatttataccggtttacccgttgatattgatgagtgccgggagatcccaggggtctgtgaaaatggagtgtgtatcaacatggttggcagcttccgatgtgaatgtccagtgggattcttctataatgacaagttgttggtttgtgaagatattgacgagtgtcagaacggcccagtgtgccagcgcaacgccgaatgcatcaacactgcaggcagctaccgctgtgactgtaagcccggctaccgcttcacctccacaggacagtgcaatgatcgtaatgaatgtcaagaaatccccaatatatgcagtcatgggcagtgcattgacacagttggaagcttttattgcctttgccacactggttttaaaacaaatgatgaccaaaccatgtgcttggacataaatgaatgtgaaagagatgcctgtgggaatggaacttgccggaacacaattggttccttcaactgccgctgcaatcatggtttcatcctttctcacaacaatgactgtatagatgttgatgaatgtgcaagtggaaatgggaatctttgcagaaatggccaatgcattaatacagtggggtctttccagtgccagtgcaatgaaggctatgaggtggctccagatgggaggacctgtgtggatatcaatgaatgtcttctagaacccagaaaatgtgcaccaggtacctgtcaaaacttggatgggtcctacagatgcatttgcccacctggatacagtcttcaaaatgagaagtgggaagatattgatgagtgtgtcgaagagccagaaatttgtgccctgggcacatgcagtaacactgaaggcagcttcaaatgtctgtgtccagaagggttttccttgtcctccagtggaagaaggtgccaagatttgcgaatgagctactgttatgcgaagtttgaaggaggaaagtgttcatcacccaaatccagaaatcactccaagcaggaatgctgctgtgccttgaagggagaaggctggggagacccctgcgagctctgccccacggaacctgatgaggccttccgccagatatgtccttatggaagtgggatcatcgtgggacctgatgattcagcagttgatatggacgaatgcaaagaacccgatgtctgtaaacatggacagtgcatcaatacagatggttcctatcgctgcgagtgtccctttggttatattctagcagggaatgaatgtgtagatactgatgaatgttctgttggcaatccttgtggaaatggaacctgcaagaatgtgattggaggttttgaatgcacctgcgaggagggatttgagcccggtccaatgatgacatgtgaagatataaatgaatgtgcccagaatcctctgctctgtgccttccgatgtgtgaacacttatgggtcatatgaatgcaaatgtcccgtgggatatgtgctcagagaagaccgtaggatgtgcaaagatgaggatgagtgtgaagagggaaaacatgactgtactgaaaaacaaatggaatgcaagaacctcattggcacatatatgtgcatctgtggacccgggtatcagcggagacctgatggagaaggctgtgtagatgagaatgaatgtcagacgaagccagggatctgtgagaatgggcgctgcctcaacacccgtgggagctacacctgtgagtgtaatgatgggtttaccgccagccccaaccaggacgagtgccttgacaatcgggaagggtactgcttcacagaggtgctacaaaacatgtgtcagatcggctccagcaacaggaaccccgtcaccaaatcggaatgctgctgtgacggagggagaggctggggtccccactgtgagatctgccctttccaggggactgtggctttcaagaaactctgtccccatggccgaggattcatgaccaatggagcagatatcgatgaatgcaaggttattcacgatgtttgccgaaatggggaatgtgtcaatgacagaggatcatatcattgcatttgtaaaactgggtacactccagatataactgggacttcctgtgtagatctgaacgagtgcaaccaggctcccaaaccctgcaattttatctgcaaaaacacagaagggagttaccagtgttcatgcccgaaaggctacattctgcaagaggatggaaggagctgcaaagatcttgatgagtgtgcaaccaagcaacacaactgccagttcctatgtgttaacaccattggcggcttcacatgcaaatgtcctcccggatttacccaacaccatacgtcctgcattgataacaatgaatgcacctctgacatcaatctgtgcgggtctaagggcatttgccagaacactcctggaagcttcacctgtgaatgccagcggggattctcacttgatcagaccggctccagctgtgaagacgtggacgagtgtgagggtaaccaccgctgccagcatggctgccagaacatcattgggggctacaggtgcagctgcccccagggctacctccagcactaccagtggaaccagtgtgttgatgaaaacgaatgcctcagcgctcacatctgcggaggagcctcctgtcacaacaccctggggagctacaagtgcatgtgtcccgccggcttccagtatgaacagttcagtggaggatgccaagacatcaatgaatgtggctctgcgcaggccccctgcagctatggctgttccaataccgagggcggttacctgtgtggctgtccacctggttacttccgcataggccaagggcactgtgtttctggaatgggcatgggccgaggaaacccagagccacctgtcagtggtgaaatggatgacaattcactctccccagaggcttgttacgagtgtaagatcaatggctaccccaaacggggcaggaaacggagaagcacaaacgaaactgatgcctccaatatcgaggatcagtctgagacagaagccaatgtgagtcttgcaagttgggatgttgagaagacagccatctttgctttcaatatttcccacgtcagtaacaaggttcgaatcctagaactccttccagctcttacaactctgacgaatcacaacagatacttgatcgaatctggaaatgaagatggcttctttaaaatcaaccaaaaggaagggatcagctacctccacttcacaaagaagaagccagtggctggaacctattcattacaaatcagtagtactccactttataaaaagaaagaacttaaccaactagaagacaaatatgacaaagactacctcagtggtgaactgggtgataatctgaagatgaaaatccaggttttgcttcattaattcaccatccagagaccaaataattaaaagaaaaacaaatatagataggtagaactatattttcccccaatcagaatcatcatatcataggtacaatctttcaccaagtaaatttgtataaataagcactattctttgtattaccaaagcaaggtacaggtgactaccctagttcaaaacaaccactttctcaggcttctcatgtgtgtagctaagctaccttgtcatatgtgttgattcttgaaaactgggacgtgtatttccattgggggttggccatttatgctgacatgccatccttccagcaaacgtatgggaatgtgctttcaattgatggactactctattttttgcaaatttgtaaactttgcttctccaaatacaagtactaggttgtccatttatggtacctatttggtgctagtaaattttcaaactagatttataaatgcactgtaatatgtacacaacttagaaaccaaattacaagtattcagttccaatacttcattaatttcaatcaaccaaagttagttcagtagcttatctcagttatgagtataatacattacatgtaaattaagtgtgtgtatactgtaatcgtgctattttttatcattgaaacatttataaactagaataataatgcccttaatgtgagggtttgtaatggtgcttattaagaccaaagacttgttaaatgtatacaccaagtggtaatgaaatttctgtgactggcccacacgtgcatagaggtc

SEQ ID NO: 185518 - DNA, 1188 bp, Homo Sapiens
tggcccctgataaagccgaaccaaagcccatatcacagcataggccagtcctggagtacccatcaccctcacacccatgggattcagatctgaaatggtcatctcaaggcatcaacagtctcactgagacacagtgtgggacccagactgtattctagatcagcacttatgcccacaacctcaaaaggaaaattagttagggccccaatttagagtttcagtttgggtacagaggtcccagagattggaaacactttaggcaccattgtgcctgagtgggagaggagggtggcaggcaggtccggctacctaagcctccacccatccaggctcaacagccctgcccttctatcagagcccaggaggcagcagcaagtgcataatgcacaaggaagggggatgatgaaggaacaaggccagctgcagaactgctcttctctccaaagccttgccaatcactttctggaaagaagcagcagagccctcggtctggatacaatgtttctctctaagccttgaggcatcaggacaagggcaggggaaaggaggggttgggaggagggacagagaactgcccctagttcttgccattgcaagagggaatgttttctccttgaggaatcccaccaccaccagatttgccaggcagcccagcatgcacaccagcatgcgtgcacatgcacacgcgtgtccaagcagcccactgttaacagccacctctccctatcacctgagaacccctaagcttccattccaaagggatgtgccttctgcgttccctaaatcccactcatctaatggaatacagctgcttatgtaagtccaccttcctcagggctgtgaagcaagttccaggtcgtttcatgtgcccacacctataggcgtgatccctcccacctcccccagccctggaacgactacatctcctgtgcccctaaacttgccaaaacattcccctcccctctgtgtcctgctcactcttccaatcgcctacctggcctactcagctccctcacacactaccctttctctgcccatcctgttccatgcccacccatccaccaactccacttcttccaagggcatttctctgttctgttcctgctctcctggcccccagccacacctagccccacctggccctggactttcacttgctagcaaaaaaggcccctacagttaccccaa

SEQ ID NO: 185519 - DNA, 1110 bp, Homo Sapiens
  misc_feature (363)..(430): n is a, c, g, or t
ttggcccatttcaggccgccacgcacctggagggcgactaccagcgctcagcttgctcgctgcagtccctgggcaacgctgccccacatgccaagagcaaggagctcaacggcagctgcatgaggccgggtctggcccccgagaccctgtcggccccgcctggctcacccccgcccagtgccgcacctaccagtgccactagcaacagcagtaatgggggcgggcccagcaaaagtggtcccccaaagtgcggtcccggcaccaactccaccctcaccaaacagatattcccctggatgaaagagtcgaggcaaacgtccaagctgaaaaacaactcccccggcacagcagagggctgtggtnnnnnnnnnnnnnnnnnnnnnnnnnnnnnnnnnnnnnnnnnnnnnnnnnnnnnnnnnnnnnnnnnnnnaggggacaagagccccccggggtcggcggcgtccaagcgggcgcggacggcgtacacgagcgcgcagctggtggagctggagaaggagttccattttaaccgctacctgtgccggcctcgccgtgtagagatggccaacctgctgaacctcagcgagcggcagatcaagatctggttccagaaccggcgcatgaagtacaagaaggaccagaaggccaagggattggcctcgtcgtcggggggcccatctccagccggcagccccccgcagcccatgcagtccacggccggcttcatgaacgccttacactccatgacccccagctacgagagcccgtccccacccgccttcggtaaagcccaccagaatgcctacgcgctgccctccaactaccagccccctctcaaaggctgcggcgccccgcagaagtaccctccgaccccggcgcccgagtatgagccgcacgtcctccaagccaacgggggcgcctacgggacgcccaccatgcagggcagtccggtgtacgtgggcggggtcatcctctgcacctgctcctgtgcagcctctgccagcctcaaaatcctggacgtgaggcagatccttgttgacgaggcaggcatggccacggaacctgaaaccctcatcaccctggtgcagttcccactggcggagaaggtgg

SEQ ID NO: 185520 - DNA, 1194 bp, Homo Sapiens
  misc_feature (519)..(538): n is a, c, g, or t
  misc_feature (540)..(807): n is a, c, g, or t
  misc_feature (872)..(881): n is a, c, g, or t
ttggcaggaacttttcattgtttggggaagcttttgaatgcagtactgtggaggaaatcatccttaaaatagcatttcacacatagggccaaaattgaaattgtcaaggaaacccctcagcatctaacgtcatcttgtagaagagctgggcatacctcttcctctaggccaattcagaggccactggccacccaagtagagtggggcccactggcatgagtagtccctgtgcccatgcccatggtggtgcttgactttgctttggggcttaatcctagtatcatttggccattaatttttaattaagtttatacttgaataatcagttttactcctgaaaaattttgaagccagcactgactttgtttatattcacttaccttgtatatgaacttatgacattagagtttgtgaaactgtcttaacgtggctcatacacgtgatgtcagagggactggtcagttctttacagggtgaattaatcggcagctggctagtcagagcaactgatgggtggcnnnnnnnnnnnnnnnnnnnngnnnnnnnnnnnnnnnnnnnnnnnnnnnnnnnnnnnnnnnnnnnnnnnnnnnnnnnnnnnnnnnnnnnnnnnnnnnnnnnnnnnnnnnnnnnnnnnnnnnnnnnnnnnnnnnnnnnnnnnnnnnnnnnnnnnnnnnnnnnnnnnnnnnnnnnnnnnnnnnnnnnnnnnnnnnnnnnnnnnnnnnnnnnnnnnnnnnnnnnnnnnnnnnnnnnnnnnnnnnnnnnnnnnnnnnnnnnnnnnnnnnnnnnnnnnnnnnnnnnnnnnnnnnnggtggccctatttttaaaccattcgttacgctgtgtagacagagctttattgccctggaaaagannnnnnnnnnaactctcatgcagttcagtctttccatcatttcactttgtgagtcactcacataattgtcaatcattcctctgaccttcttaagaatttacaccttaccgtctctgtgattgaagcagacttctcgctttatttcccttaggctcatttttctgtgggctctcccttaaagacacatggccacagacacctccttcgcatatgtaatctgccttcccctgcggccttccgtggtcacagcaacagggactgctcaccccctccagctggggcttttctaacaagcacagtcagaaatgcgcacgcctggggtt

SEQ ID NO: 185521 - DNA, 1826 bp, Homo Sapiens
  misc_feature (1376)..(1388): n is a, c, g, or t
ttgggcaaggttcaacttattaacaattaggcagactctttatgcttgcaaaaactacaaccaatggaatgtgatgttcatgggtatagttcatgtctgctatcattattcgtagatattggacaaagaaccttctctatggggcatcctctttttccaacttggctgcaggaatctttaaaagatgcttttaacagagtctgaacctatttcttaaacacttgcaacctacctgttgagcatcacagaatgtgataaggaaatcaacttgcttatcaacttcctaaatattatgagatgctggcttgggcagcatccccttgaactcttcactcttcaaatgcctgactagggagccatgtttcacaaggtctttaaagtgactaatggcatgagaaatacaaaaatactcagataaggtaaaatgccatgatgcctctgtcttctggactggttttcacattagaagacaattgacaacagttacataattcactctgagtgttttatgagaaagccttcttttgggggtcaacagttttcctatgctttgaaacagaaaaatatgtaccaagaatcttggtttgccttccagaaaacaaaactgcatttcactttcccggtgttccccactgtatctaggcaacatagtattcatgactatggataaactaaacacgtgacacaaacacacacaaaagggaacccagctctaatacattccaactcgtatagcatgcatctgtttattctatagttattaagttctttaaaatgtaaagccatgctggaaaataatactgctgagatacatacagaattactgtaactgattacacttggtaattgtactaaagccaaacatatatatactattaaaaaggtttacagaattttatggtgcattacgtgggcattgtctttttagatgcccaaatccttagatctggcatgttagcccttcctccaattataagaggatatgaactgagtttttcttttgttgtttgttcttagctgtaattcctatgcttctatttcagagagccaggagagtttgatattaaaggaggttaaaactgtgatcttatgccatgtcatcaatggccacttaggggccatggctgatgacacattcttatctctacagtactaatgtgttattatagagccatgcattttatttctgaataagaacatatttaaactaatattcccttacaatatggacagtattaatccttccaagatgcagtatttatcaagtgaagcatatttagcagcaaattccattttaacataacttaggaaccaataaccagggtgttttgtggttgggggaggcacggggtggagtattcttttttatatcctcnnnnnnnnnnnnntcaatacttatatttcaatggcaatctagtatttttttaaaagactgtataggcatgaataatagaggtggtttgagttttgtagggccatcacctggaaagtcaatgtgactagacacaaagtagcccagaggctacttttcttcctacagcttattatagttgtaggttctatgacctcacttcatgggttccaggcaattccgctgaaaggtttgtctcctgaaattttttaagtttgttttcctgacacatgtaatcagatgtgtagcaaccgagggaaacgaagcctaacattctccattgtggaaatacacacagggaggttacatttcacagcgtgggatttttccagcttacacatgtgggatgacatcacagaaaaccacaaaagcagcaaattaaactgtagaagagtcaatactcctgacgagtctc

SEQ ID NO: 185522 - DNA, 1086 bp, Homo Sapiens
ttggggaagctcagctgatgcaggccggttggagtggacgtcattgccgggaacgagcgagtcgccgctgcagccctagtgactgcggcctgcatcccgattgtcttctcctccaaggtctacatgattacctgaagtttaataagtaagaccatgaattatggcatttcttaaatgaagcgttcaagaagtgagagaatgtcatagaaaataaatgatttttaagttatgtctattaatctgactgtagatatatatatttacctccttagtaatgcaagaagtgtttgtgggaagcagagaagcaagcaactgtatttcttgttctcacctaagcattactggaggataagccacatcagtctacaaagaggttttcatacaaacataataagatgtaaatggaccaaaagtgaagcacattcttgcagtaagcactgttactctccaagcaaccatggtttacatattgggattttgaaacttagcacttctgctcccaagggacttacaaaagtgaacatttgtatgtcccgtattaaaagtactttgaactctgtttcaaaggctgtttttggcaatcaaaatgaaatgatttcacgtttagctcaatttaagccaagttcccaaattttaagaaaagtatcggatagtggctggttaaaacagaaaaacatcaaacaagccatcaaatctctgaaaaaatatagtgacaaatcagcagaaaagagtccttttccagaagagaaaagtcacattatagacaaagaagaagatataggtaaacgcagtctttttcattacacaagttctataaccacaaaatttggagactcattctactttttatcaaatcatattaattcatatttcaaacgtaaggaaaaaatgtctcaacaaaaggaaaatgaacatttccgggacaaatcagaacttgaagataaaaacgtagaagaggggaaattaagatctccagatcctagcatcctggcttataagccaggctcagaatctgtacatacgtggacaagcctacaagtccttctgcgatacctgatgttcttcaagtttcaactaaacaaagta

SEQ ID NO: 185523 - DNA, 2131 bp, Homo Sapiens
  misc_feature (207)..(231): n is a, c, g, or t
ttggcttcagggggcttatgaaaatgaagtgtctaaagagggccttgcggaaagtgaacccatgatatgccacaccctacctttgcctgaagggtttcaggtggttaaagtgggggccaatggagaggtggagacactagaacaaggggaacttccaccccaggaagatcctagttggcaaaaagacccagactatcagccaccagnnnnnnnnnnnnnnnnnnnnnnnnngagcaaactgcgttatacagaggagggcaaagatgtagatgtgtctgtctacgattttgaggaagaacagcaggagggtctgctatcagaggttaatgcagagaaagtggttggtaatatgaagcctccaaagccaacaaaaattaaaaagaaaggtgtaaagaagacattccagtgtgagctttgcagttacacgtgtccacggcgttcaaatttggatcgtcacatgaaaagccacactgatgagagaccacacaagtgccatctctgtggcagggcattcagaacagtcaccctcctgaggaatcaccttaacacacacacaggtactcgtcctcacaagtgcccagactgcgacatggcctttgtgaccagtggagaattggttcggcatcgtcgttacaaacacacccacgagaagccattcaagtgttccatgtgcgattacgccagtgtagaagtcagcaaattaaaacgtcacattcgctctcatactggagagcgtccgtttcagtgcagtttgtgcagttatgccagcagggacacatacaagctgaaaaggcacatgagaacccattcaggggaaaagccttatgaatgttatatttgtcatgctcggtttacccaaagtggtaccatgaagatgcacattttacagaagcacacagaaaatgtggccaaatttcactgtccccactgtgacacagtcatagcccgaaaaagtgatttgggtgtccacttgcgaaagcagcattcctatattgagcaaggcaagaaatgccgttactgtgatgctgtgtttcatgagcgctatgccctcatccagcatcagaagtcacacaagaatgagaagcgctttaagtgtgaccagtgtgattacgcttgtagacaggagaggcacatgatcatgcacaagcgcacccacaccggggagaagccttacgcctgcagccactgcgataagaccttccgccagaagcagcttctcgacatgcacttcaagcgctatcacgaccccaacttcgtccctgcggcttttgtctgttctaagtgtgggaaaacatttacacgtcggaataccatggcaagacatgctgataattgtgctggcccagatggcgtagagggggaaaatggaggagaaacgaagaagagtaaacgtggaagaaaaagaaagatgcgctctaagaaagaagattcctctgacagtgaaaatgctgaaccagatctggacgacaatgaggatgaggaggagcctgccgtagaaattgaacctgagccagagcctcagcctgtgaccccagccccaccacccgccaagaagcggagaggacgaccccctggcagaaccaaccagcccaaacagaaccagccaacagctatcattcaggttgaagaccagaatacaggtgcaattgagaacattatagttgaagtaaaaaaagagccagatgctgagcccgcagagggagaggaagaggaggcccagccagctgccacagatgcccccaacggagacctcacgcccgagatgatcctcagcatgatggaccggtgatggcggagccttgtgcgtcgccaggactgctctgggctgtgtttaaacggcccgcatcttaatttttctcccttctttctttttttggctttgggaaaagcatcattttaccaaacataccgagaacgaaaacttcaaggatgatgttagaaaagaatgtgatgtgactagaacttgctgtctgatgtgagcaagtcatggaatgttctgagtccctgagggtttactgtgaagtgctgaggacagtgttgacaactaactcgttttcctagatggaaccggagacattgaccccctccctccatgtggtaaacccactccagaatggccaccaggcttccc

SEQ ID NO: 185524 - DNA, 1033 bp, Homo Sapiens
actttgtacaaaaaagttgggtaagcagccacttaataaactgttgcacatggatacttatagacagacttattggacaattatgttttttgcagtgttaccagaatcaaggctctgtttattccccacaagacttgcatagaaaaataagatattatattttgtttgtatgtatttagtgttttgtataataccaagaaccgctgactaaatttactcaaattagggcattaaatatcatgtacttcatagtttgagactgttcactcaaatagggcagagtactattctatctagatgtgtaagtgttttttttaaaatcacatggaacggttttttttatactaaaaagtggagggagatttgtttaaacaagtatttctaaaagaaatatgtacatagttctggaaattatttgtggtaaggaaatattctttactccagttgcatttctcagacaataaagtggtgcatccatgctacctcctactttgtcaacaaagatgctatttaccctttacatttttgtatcataatagattttaaaaatctaatgttctttattgcaagacattcttttgttaacaggtttgtttctttttaatgttttacctaaaatttgacatgcttacaggacaggtttgcctcttactttatttaacattgtagaaatgtaattaataaacaatgctcactacacagtttagaatagacgttctcatttatattatcttccaaatttgatcagttagcaaaacttaatacaccaattaaaatatttctacatatgagaatgtttacaatttaaattttagaacttgttttggatgtgattatatgtacgaaaatcgtgtaacactatgctcatgctaagaccgacataacagaattactgaaataaatgtgctgtgaggaatggaaattatggtgcagtgtcttggtcatgataaattgtgattctttttaaaaattttttccaaaacattaggtattttaatctgaaatcaaattccctttacaacaacaagttttt

SEQ ID NO: 185525 - DNA, 1900 bp, Homo Sapiens
agctttggaaacaggagcaaaataaaatgcttgaagcagagaatgctctcaaaaaggcaaaattattatgcatgcaacgtcaagatgaatatgagaaagcaaagtcttccatgtttcgtgcagaagaggagcatctgtcttcaagtggcggattagcaaaaaatctcaacaagcaactagaaaaaaagcgaaggttggaagaggaggctctccaaaaagtagaagaagcaaatgaactttacaaagtttgtgtgacaaatgttgaagaaagaagaaatgatctagaaaataccaaaagagaaattttagcacaactccggacacttgttttccagtgtgatcttacccttaaagctgtaacagttaacctcttccacatgcagcatctgcaggctgcttcccttgcagacagtttacagtctctctgtgatagtgccaaactctatgacccaggccaagagtacagtgaatttgtcaaggccacaaattcaactgaagaagaaaaagttgatggaaatgtaaataaacatttaaatagttcccaaccttcaggatttggacctgccaactctttagaggatgttgtacgccttcctgacagttctaataaaattgaagaggacagatgctctaacagtgcagatataacaggtccttcctttataagatcatggacatttgggatgtttagtgattctgagagcactggagggagcagcgaatctagatctctggattcagaatctataagtccaggagactttcatcgaaaacttccacgaacaccatccagtggaactatgtcctctgcagatgatctagatgaaagagagccaccttccccttcagaaactggacccaattcccttggaacatttaagaaaacattgatgtcaaaggcagctctcacacacaagtttcgcaaattgagatcccccacgaaatgtagggattgtgaaggcattgtagtgttccaaggtgttgaatgtgaagagtgtctccttgtttgtcatcgaaagtgtttggaaaatttagtcattatttgtggtcatcagaaacttccaggaaaaatacacttatttggagcagaattcacacaagttgcaaaaaaggaaccagatggtatcccttttatactcaaaatatgtgcctcagagattgaaaatagagctttgtgtctacagggaatttatcgtgtgtgtggaaacaaaataaaaactgaaaaattgtgtcaagctttggaaaatggaatgcacttggtagatatttcagaatttagttcacatgatatctgtgacgtcttgaaattataccttcggcagctcccagaaccatttattttatttcgattgtacaaggaatttatagaccttgcaaaagagatccaacatgtaaatgaagaacaagagacaaaaaagaatagtcttgaagacaaaaaatggccaaatatgtgtatagaaataaaccgaattcttctaaaaagcaaagaccttctaagacaattgccagcatcaaattttaacagtcttcatttccttatagtacatctaaagcgggtagtagatcatgcagaagaaaacaagatgaactccaaaaacttgggggtgatatttggaccaagtctcattaggccaaggcccacaactgctcctatcaccatctcctcccttgcagagtattcaaatcaagcacgcttggtagagtttctcattacttactcacagaagatcttcgatgggtctctacaaccacaagatgttatgtgtagcatatgtgttgttgatcaaggctgttttccaaagcctctgttatcaccagaagaaagagacattgaacgttccatgaagtcactatttttttcttcaaaggaagatatccatacttcagagagtgaaagcaa

SEQ ID NO: 185526 - DNA, 3748 bp, Homo Sapiens
  misc_feature (3072)..(3093): n is a, c, g, or t
ctttgtacaaaaaagttggcagaaacttccagtgaagagagagtacacacttatttggagcagaattcacacaagttgcaaaaaaggaaccagatggtatcccttttatactcaaaatatgtgcctcagagattgaaaatagagctttgtgtctacagggaatttatcgtgtgtgtggaaacaaaataaaaactgaaaaattgtgtcaagctttggaaaatggaatgcacttggtagatatttcagaatttagttcacatgatatctgtgacgtcttgaaattataccttcggcagctcccagaaccatttattttatttcgattgtacaaggaatttatagaccttgcaaaagagatccaacatgtaaatgaagaacaagagacaaaaaagaatagtcttgaagacaaaaaatggccaaatatgtgtatagaaataaaccgaattcttctaaaaagcaaagaccttctaagacaattgccagcatcaaattttaacagtcttcatttccttatagtacatctaaagcgggtagtagatcatgcagaagaaaacaagatgaactccaaaaacttgggggtgatatttggaccaagtctcattaggccaaggcccacaactgctcctatcaccatctcctcccttgcagagtattcaaatcaagcacgcttggtagagtttctcattacttactcacagaagatcttcgatgggtccctacaaccacaagatgttatgtgtagcataggtgttgttgatcaaggctgttttccaaagcctctgttatcaccagaagaaagagacattgaacgttccatgaagtcactatttttttcttcaaaggaagatatccatacttcagagagtgaaagcaaaatttttgaacgagctacatcatttgaggaatcagaacgcaagcaaaatgcgttaggaaaatgtgatgcatgtctcagtgacaaagcacagttgcttctagaccaagaggctgaatcagcatcccaaaagatagaagatggtaaaacccctaagccactttctctgaaatctgataggtcaacaaacaatgtggagaggcatactccaaggaccaagattagacctgtaagtttgcctgtagatagactacttcttgcaagtcctcctaatgagagaaatggcagaaatatgggaaatgtaaatttagacaagttttgcaagaatcctgcctttgaaggagttaatagaaaagacgctgctactactgtttgttccaaatttaatggctttgaccagcaaactctacagaaaattcaggacaaacagtatgaacaaaacagcctaactgccaagactacaatgatcatgcccagtgcactccaggaaaaaggagtgacaacaagcctccagattagtggggaccattctatcaatgccactcaacccagtaagccatatgcagagccagtcaggtcagtgagagaggcatctgagagacggtcttcagattcctaccctctcgctcctgtcagagcacccagaacactgcagcctcaacattggacaacattttataaaccacatgctcccatcatcagtatcagggggaatgaggagaagccagcttcaccctcagcagcagtgcctcctggcacagatcacgatccccacggtctcgtggtgaagtcaatgccagacccagacaaagcatcagcttgtcctgggcaagcaactggtcaacctaaagaagactctgaggagcttggcttgcctgatgtgaatccaatgtgtcagagaccaaggctaaaacgaatgcaacagtttgaagacctcgaagatgaaattccacaatttgtgtagggatgtcaaatttcagggtttttttgttgttgttgtgttattttgtggtattgtgcttgttttgtgaaagaatgttttgacagggccccttttgtataggactgccaaatcatgggttttgccttttgttgttgtatttatcctctgttggtaatactgaatggtagaatgttttgatagggtcacatttgtgcctcactggaattatctttaaattctgtatttttaaagttgtgaataagataggtggattcgtattttttaaagttcagttgactttccccaccaaatggtccatttgaatgcatccctaatatatgatatagtctcaactaataggtgcaatttgggaaaatcaggtttattttttggagtggaactgttataagtgcttatttataaaaggaatgtttctgaatgcaagtgcctaaaaagatctttgttggtatgcatatgttttgtcacacaattttatagtgcatctttcaccatttgtgcttttttaagatacgtatgtaagctcttatttttcaattggcaattcagttaatttttaaatgtttacataatggccagaaggcttgcaaatctgtatttaattgcattttaattaattgccagtttttacatgtgatagtcagttgtacaaagaaaatgcacttaaacctgtttctaaattatatattcagttatattatatttggctttagatggttttaatacatttgatagtttttcaccccttggctttattttatataaacttttgtttttcagcagttctgaactttttagtattttataaatggtccaaaaaatgcctgtttcagaagtttttgaattcagtgcatttcctcttgatttgtctgggttaaaaccattccttttgtatgaaatgttttgacttaggaatcattttatgtacttgttctacctggattgtcaacaactgaaagtacatatttcatccaaatcaagctaaaatttatttaagttgattctgagagtacaggtcagtaagcctcattatttggaatttgagagaaggtataggtgatcggatctgtttcatttataaaaggtccagtttttaggactagtacattcctgttattttctgggttttatcattttgcctaaaataggatataaaagggacaaaaaataagtagactgtttttatgtgtgaattatatttctactaaatgtttttgtatgactgtgttatacttgatannnnnnnnnnnnnnnnnnnnnncaacttgttaaattatttcatgttcccgtggcttcttttcagttgttgcctattacagtatgagagtttaaggttattaaccattggcttagaagtcaacacctaggatcatacatccgttgactacaatgtggaatgaattttatggaaacctgttttatagttctatgtgatgtaaaggtctagggagcaataaccagcccttttttttctgaaggcttgtttttagtcctcattgtacaaaatataaaataatcatattgctatgaatacctaaaaagaaaattagagcccatgtgtattgagccttctctgtgtgccaggaactttgccaaggtgctacatagattattttatttcaagttcacagcaacctataatgggtgggtaagcatgttattatttctgtgttacagataaggaaactaaggcttagttaaatgacttgcttcagtgttccacaggtgtaacaggtggagtcaaatctcaaacatagggctgtcagattttgatggttagtgctcttaatgactgtgattactaaataatatctggtagtttttaacaatagaaaatgcaactttaaaaaaatttttattgtggtaaaatacacataaacatttaccatttttaagtatattgtttgaaccatttt

SEQ ID NO: 185527 - DNA, 1840 bp, Homo Sapiens
ttggcaagatgacggagccgggcgcctctcccgaggacccttgggtcaaggtggagtatgcctacagcgacaacagcctggaccccgggctttttgtagaaagcacccgcaaggggagtgtagtgtccagagctaatagcatcggttccaccagtgcctcttctgtccccaacacagatgatgaggacagtgattaccaccaggaggcctacaaggagtcctacaaagaccggcggcggcgcgcacacactcaggctgagcagaagaggagggacgccatcaagagaggctatgatgaccttcagaccatcgtccccacttgccagcagcaggacttctccattggctcccaaaagctcagcaaagccatcgttctacaaaagaccattgactacattcagtttttgcacaaggagaagaaaaagcaggaggaggaggtgtccacgttacgcaaggatgtcaccgccctaaagatcatgaaagtgaactatgagcagattgtgaaggcacaccaggacaacccccatgaaggggaggaccaggtctctgaccaggtcaagttcaacgtgtttcaaggcatcatggattccctgttccagtccttcaatgcctccatctcagtggccagcttccaggagctgtcagcgtgtgtcttcagctggatcgaggagcactgtaagcctcagaccctgcgggagattgtgattggcgtcctgcaccaattgaaaaaccagctttactgaccggttcttggaaacctggagaacagccaacaagaggcccttgaatctctacgtggccactgaactgctgggcccgggagactggactacaacacctcacactggtcagctggtttctacttggtgtttggtttttcccagccccattttatcttcagcggagccgcggtgtttgttttgtgaaagcttctgattaatttattatattgacgataaaactcaaacctacccagccttccccccactccatggaagtccttgggatgggcgtctgctctggacaccccaaagagctcctgccctctcagccctttattcaagcctcagatttctgctcatgatctacatagatttggaaactgttttcctctgttttggtctcttgggcaacatttttggcccaagtttgggcaacatttggcccaagtttgggcattttggcagtagctgtatgggagaaaaagagtaagaggaaatattcccacagccatgaagggtgaaagggcaccttgtgcctagactagggctgcctggtcagtcccaggtgaggccaagggctttctggccatctcagggaggggccaccaggttcctcccctcaccccatattccatcaccttcctcctctgctctgggtggtaagggaagccctcctggttcccacaggctatgatgctgcatggcagaggcaggtataacacagcactacatattggaaattttttatttttctaaataccaatgcagttttgctacggttacaattttgaaatattaactgagcctcaaaatcaccctttctgtcaagcatatcttggcctctcccatgtctcagtgttgcctgcatttctcccaggacttgggggtggggtgaaaagcgtacaaaagatacttaaaagggctcctggggtacacaagcccagcaggccctgagtgaagccgtgggccctccaaatgctcgttttatagcaacctctctctaccctagttctccaaattcacttctgccttcctcagtttgatatctggcaagtttgactatccagaggaaattaaatatttttatataaaataaattataataaatattgcccaaa

SEQ ID NO: 185528 - DNA, 1146 bp, Homo Sapiens
  misc_feature (201)..(224): n is a, c, g, or t
  misc_feature (1011)..(1038): n is a, c, g, or t
ttggattaggttccaaaaattctaaaaaacctaaactcttcaggctacctttgtgtgtctctagaagagaaaagcatctatctggagatataaatgtgtatgtaaatataaacgtttgtggcaagaggacagttctgtgacatctgttgaacatatgtggttgtatatattggaaatgtacatatccaatatgaaatactnnnnnnnnnnnnnnnnnnnnnnnncagaatgcattgtataggattgcatgtgaagtcttttctactgaatctatatttccatttgtaagtgattttaagttaacatatgaaggcagggaaatgattacctttccagtaaaaagtatagataatttaattaacttagtgacaccaccaagtgttttgatataactaaatttgtggtaataagactgtctgcacctgtattcattgtggaacttcctctttcattggaaactttcttactcaagaatgacggcagtattgttttcttatatgtgcaatgaagtggaatgataaacagtatgcctttaatttatatgtgttcttgttctgatgttgtttcctgaaatgatttttcttcctaactgtggttttcgggtatgcaagcctaaatctttgtacactttgtctcacagaatagttctgaggctccatgacagggttttgtcattgttgatgttattgttgcttcgttttataaaaaagccaaaattttttttccaatccaaacgttcacctgtttcctttcctcaagctataccagtgtaataccagttaccctgtggatccatttaatatgttatccccactaattaattttcgtatattatttccaatatttggaaagctctttatagccatttggtatttcctattacccacctcctattttaaatatttatcagtctaaacttgtgcagtgtagtaaacatgcaagttgttatgattgagctgtattaccataagtagaattttaagtaaactgggtgaatttgggccatagatnnnnnnnnnnnnnnnnnnnnnnnnnnnnacaagctaactgttagaggtatagaatttattaatctgttgtacagatttgattatgaatttattgtttggaagaatggcacttgtttggcttttactatatgtgggg

SEQ ID NO: 185529 - DNA, 1635 bp, Homo Sapiens
  misc_feature (410)..(419): n is a, c, g, or t
  misc_feature (1115)..(1138): n is a, c, g, or t
ttggatgtgatattttgatacaagcatacaatgcataatgatcaaatcaaggtaatgttaaatgcttgaggcgatgtatatctccttatttttctaactggacttaaattctaaagagactatatataagttaaaaatgaagaataaataagagctcaattaaacgggaattttaaaagttacaataaatttgggataaaatgtaatgtaaggtgtttcatatggagagccatcactgccttttgatcactgtttccagaaaagcacagacttgtgcacctccctctgtgctttcttatgtttggacagttgaacataccaaaacaggtgatgagcaaacttgcaagcagtttttactgatagtttttacatagcataatgaagtataatgttataaataaagaactgtnnnnnnnnnncactgtgaggcttatgcctcttccagacttgcttttttgaacttttccatacattttttgttttagacctattccatctgggctagcagttgtaaaaacaaagcagagtgcaatgaactccatccgtctgtttctgtggtacagattttagccttcatcctaataagaaacatccctggatatgcccgttcagtttacagttcattttttgcttggtttggaaaaatttcattagagctatttatttgccagtatcacatatggctggcagcggacacaaggggtatcttggtactgatacctggaaaccctatgctcaacatcattgtcagcactttcatatttgtttgtgtggcacatgaaatttctcagatcactaatgatcttgcacagattattattcctaaagataactcatctctcttgaaaaggttggcatgtatagctgcatttttttgtggactcctcatcttatcatccattcaagataaatcaaaacattaggttccaaaaattctaaaaaacctaaactcttcaggctacctttgtgtgtctctagaagagaaaagcatctatctggagatataaatgtgtatgtaaatataaacgtttgtggcaagaggacagttctgtgacatctgttgaacatatgtggttgtatatattggaaatgtacatatccaatatgaaatactnnnnnnnnnnnnnnnnnnnnnnnncagaatgcattgtataggattgcatgtgaagtcttttctactgaatctatatttccatttgtaagtgattttaagttaacatatgaaggcagggaaatgattacctttccagtaaaaagtatagataatttaattaacttagtgacaccaccaagtgttttgatataactaaatttgtggtaataagactgtctgcacctgtattcattgtggaacttcctctttcattggaaactttcttactcaagaatgacggcagtattgttttcttatatgtgcaatgaagtggaatgataaacagtatgcctttaatttatatgtgttcttgttctgatgttgtttcctgaaatgatttttcttcctaactgtggttttcgggtatgcaagcctaaatctttgtacactttgtctcacagaatagttctgaggctccatgacaggttttgtcattgttgatgttattgttgcttcgttttataaaaaagccaaattttttt

SEQ ID NO: 185530 - DNA, 1008 bp, Homo Sapiens
ttggcgccaccctgagctgcagcctgacccgccctcgcgcgcgcgccctccccggccgggcccactccccgcgcgcccacccatgaacctggcgagccagagcggggaggccggcgccggccagctgctcttcgccaacttcaaccaggacaacacgtccctagctgttggtagtaagtccggttataaatttttctccctttcttctgtggataagctggaacagatctatgaatgcaccgatacggaagatgtgtgcattgtagagagattgttctccagcagcctagtggccatcgtgagccttaaagcaccaaggaagctaaaggtttgccactttaagaagggaactgagatctgcaactacagctactccaacacgattctggctgtgaagctcaacaggcagaggctgatagtatgcctggaggagtccctgtacatccacaacattcgggacatgaaggtgctgcatacgatcagggagacgcctccaaaccctgcaggcctgtgtgcgctgtcaatcaacaacgacaactgctacttggcgtacccagggagcgcgaccatcggagaggtgcaggtcttcgataccattaatttgagagctgcaaacatgattccggctcacgacagtcctttagcggcactggcctttgacgcaagtggaactaaacttgccacggcttcggagaaggggaccgtgattagggtattttccattccagaaggacaaaaactctttgagtttcggagaggagtaaagaggtgcgtgagcatctgctccctggccttcagcatggacggcatgttcctctccgcctccagcaacactgagaccgtgcacatcttcaaactcgagactgtgaaagaaaaacccccagaggagcccaccacctggaccgggtacttcgggaaagtgctcatggcctccaccagctacctgccttcccaagtgacagaaatgttcaaccagggcagagccttcgccacggtccgcctgccatt

SEQ ID NO: 185531 - DNA, 967 bp, Homo Sapiens
  misc_feature (183)..(191): n is a, c, g, or t
  misc_feature (254)..(304): n is a, c, g, or t
ttggcaaagatatttgctgttgtcatattaagcattggagactagaaaattactttccccctttgagctagagggtctcttgccaacagaaggacagctgagaaagctggatttaaaggatggttttatctgtactttgcagttaacagtgatattttgaaggcacatttttctgtgattcannnnnnnnnggccatagtgctaaccttgaagagattcgtggctgggtttttggtttctgagaaggtcgtagnnnnnnnnnnnnnnnnnnnnnnnnnnnnnnnnnnnnnnnnnnnnnnnnnnnaaagcgggggaggggaagaggggctgagaaaggaaatcatgttcactggtagaagtagagtggagcatcagttaccagggtcctgagagctggaggagaaaggattctatcttcaagttgggaggccctcctctcaccttgctcaaaaattgcaagcgattcaatcctgatcaagacaccaaagctacaggattctggaaccgtggagacaccgagaaaccatgagtgtaaggttaccccagagtatagacaggttaagtagcctgtcttctctgggagattctgcaccagagcgcaagtccccttcccaccatcgccagccttcggatgcctctgagacaacaggtctcgttcaacgctgtgtcattatccaaaaggaccagcatggcttcggcttcacagtcagtggggatcgcattgttctggtgcagtctgtgcggcctggaggtgcagccatgaaggccggtgtgaaagagggcgaccggatcatcaaagtcaacggcaccatggtgaccaatagctcacacctggaagtggtaaagctgatcaaatctggcgcctatgtcgcactcaccctcctgggctcttcaccttcatccatgggcatctctgggctccagcaggacccatccccagcaggagctctccgaatcacgtcagtga

SEQ ID NO: 185532 - DNA, 820 bp, Homo Sapiens
actttgtacaaaaaagttggccgaaacggggaagttgtcttgtgtggagaggttagtagagcagcgcgcgcgtcaccagagtcgtttctcttcggagtcttaggtgatcgagggtgtgcccagggggcggacttgtttgcgcctcccgttccctcccaatttccaaacgtgtcaccccggcgccgacggccctgtgcaggggaagcagatggagttcaagctggaggctcatcgcatcgtcagcatctctctgggcaagatctacaactcgcgggtccagcgcggcggcatcaagctgcataagaacctcctggtctcgctggtgctgcgcagcgcccgccaagtctacctgagcgacccgtgccccggcctctacctggccggtcccgctgggaccccggcgccgccaccgcagcagcagcccggggagccggcggccgggccacccgccggctggggagagccgcccccgcccgccgctcatgcctcttggccggagaccgagccgcagccggagcgctcctccgtctcagacgcgccgcgggtaggggacgaggtgccggtggccacggtgactggagtcggggacgtttttcaaggcggagaggcggacgcgacggaagctgcctggagccgcgtggaggggccgcgccaggcggcggccagaaaagccgagggtaccgccggaggctggggcgtcttccccgagatatctcgtgccgcgcgccgcccctgcggctgccccctaggcgggggaggaccagcccggggtacaccgggcggcgacccccccgccctgcctgctgctggcgcgccgcga

SEQ ID NO: 185533 - DNA, 1237 bp, Homo Sapiens
ttggatctaacagaacaactgaaatacttgaaatagacctataaaatagtaattaaaatgagaaatacataagatgataaataaaatgaaggtgaaggtattccagatctaccgaaaagattttcagtatcacagattattcataagaaattgagaaaaggaacaatcagaagttgcaaaagatggtatagccgaatataatggaaataggaaaaattagtcgaaaataaaggttgatttagaaatgaagaaaatgaatatatttcttaatacaaaataagtgggaaatgagaagttataccaataaaaagcatttaaaaatttaggggatattgtaacccagtataattttctgacaggttggactttgaccctaatggacttactggtgaactttttcaaatgtttaaataatgtctatccatgtatcatgaaggacagtatgcttcaaattgtcttttgaggcagacatgttctcagtactaaaagacatttttagaaggattttattctcaacagatgcaaaatgcaaaataaaatattggcaaacaatacagcaacaaataatttactatcactcaggattataaggctggtgttaagcagaacagccattaaatcagcatcaaaagaacaaatagtaaaatccaaagtattaattacagataacttttcaaaaattcatcattcacccttgatttaattatttctctggcaatgatttaatagacttctcggagtctgttaagtacttaaaccaagaactaccattattcctactgggaaaacataaacatttctcaagtggaaagtaaacagtgttggcactatttttatatatggttaaagagacctgtcattgcaataaaagccagcattcacaaaatgaggaagataaggaaagtagcataaatattttctattaacatggctttacaactgctaaaacttatagtataaaaatgtactaacaaagactaattcaagaagttgcaggatacacaatttttaaaaatctcatttctacatcttagcagtgacaaactgcaatttaaaaagtgtgtttggttattaatatatatgagacttttaaagaaagttatataactacatagagataaattaagaaagatgcctaaatagaagcaagttaaaagagctatatttttaaacatgaacaaactcccatgggagccatgccagtgtagtggaaaagtagtacatggggagatgggga

SEQ ID NO: 185534 - DNA, 2051 bp, Homo Sapiens
gcttttttcctaatagccaactttgtacaaaaaagttggctcagtactaaaagacatttttagaaggattttattctcaacagatgcaaaatgcaaaataaaatattggcaaacaatacagcaacaaataatttactatcactcaggattataaggctggtgttaagcagaacagccattaaatcagcatcaaaagaacaaatagtaaaatccaaagtattaattacagataacttttcaaaaattcatcattcacccttgatttaattatttctctggcaatgatttaatagacttctcggagtctgttaagtacttaaaccaagaactaccattattcctactgggaaaacataaacatttctcaagtggaaagtaaacagtgttggcactatttttatatatggttaaagagacctgtcattgcaataaaagccagcattcacaaaatgaggaagataaggaaagtagcataaatattttctattaacatggctttacaactgctaaaacttatagtataaaaatgtactaacaaagactaattcaagaagttgcaggatacacaatttttaaaaatctcatttctacatcttagcagtgacaaactgcaatttaaaaagtgtgtttggttattaatatatatgagacttttaaagaaagttatataactacatagagataaattaagaaagatgcctaaatagaagcaagtttaaagagctatatttttaaacatgaacaaactcccatgggagccatgccagtgtagtggaaaagtagtacatggggagatggggagtttttttgaaaaccagaattacagttctcatttcactacttaccagttgtatactcttgggaaagtcactcctagtatctatttcaccatctacagaagagaaatacttcacagaattattgtggggattaagttagataatgtgttttaaaatataaagctacatccaaagaaatgccaatatgtgacattagtatgaaatttactacagttccatttaacattccaactggttgctgtgtggaatatggcataattgtaataaattatttaggaaagcaagcaaagatgtaagtttttttaatttagggggaaaaaatgggagccttgctctccaaatccttaaaacatgctattaagcaacctttctgaatattctgtggtgccaagtagaaagtttaactgaaattaataagccaatggaaagaaagaaatattaataactgctggtggaaagactagctagatgtcagtgtggaaagattagatccactttacatgtgatattccaaatgaattaaaatgttaagtataaaaagaaaaatactacaagtctcacaccaatagtggtataaaggaacttcatggcaattggcaaggtagatcaactaagagaaaaagttttaaatgtgtagtaaataggaaaaagacaaaacaagatggaatttaaaagaagctatttgcattacacatggatgcactcagtttttgtaaaactatatgcatatccataagggtttgtactcttaggcaaatttataaagcgatcgtgtataaatgatataaaaaatcaatttgaatggtattcaaatttcctaatattaaaaatgcaactttgacttagttcatgctattgtattagcaaaactgttttaattgcatgtgtccttatagcagcagcattgtgtattagtagccttttaagagaactgtgtagaagactataaaaagggctttataactgatcttttgacatactcactttgagtggcatatgcccaggaaaatatttaaaagaaagaaaagctatttgtacaaagttttctagcagttccactcagataactttaagggggaaaaaagcccacgattggaaatggttaagtaaattttggtgtattgctagtgctatcacagaatgttatatagccattcaataatattgatatatgtcaaattgtatgcaaaaaagtgagattcaaaaatgttaataagaacataaattgtggtttactgatacatgtgaaaa

SEQ ID NO: 185535 - DNA, 1551 bp, Homo Sapiens
tttgaggaggagggatggcatcggcaccatggagctcccagggcttagagatggagcaaagttggcctcaccttggggaaccattctgctccttgatactggaagacatctgctgcatctgaggattgattccagtgccaaactgtcctcctatgtttcctgtcatgcctctgctcaccatgctgttgcggttggccaaggatgcttcaggatttgctgctagttgtgaaaacgggctggtagaagcaggtggggttcctggatttgtaccatagtttggtggataggggaattgctgtggagcaccctgaggaagacgggggttccccatttgaactggtagtccagatgagggagggaggttgttcccaaagctttgctgcctcataagcatggctctttgctgctgtattagctgcctctgtcggtgctgttgactgtacagttcccgctgacgttgtgccaacatttgagcattcaggggtggctgaggtgtaatttgctgttgcatgcctgatctcatattgatgccaacaggagcagttgctgcaaactggtttaagatagcttgccgattttggtgtatcaactgctgttgtccctgtaatcgctgctgtagttgaagtcgaagctggttaggtgcagccggaggtctgtttagagtttgcctgggctgcatgcccatgccaggtgaaaaagcacctcggggaggtgttacttgaacaggcatcgtccccagtgaaggtttttgcctgaccatgccttggaaagggctagggagattggcagtaggagaaggagaagagtaaggctgggaataaaggttgggtctttcttccatgatcaaaggtggcgttgcttgttgtggtggaaatctctctgataatacatctaatccacccccctgaacaagtttgtcaattcccagagctctgtctagttcagctagctcagtttcatctttgccactaaggaaggataccagctgttcaagaagagccttctcatcatttctcccttctactgttgtgggtggacagagaagctcatctaattgtgagctaatacactggtcttctgatttactctgatttatagctgtcactgtattatttgtccatggaatctgatcgcctgttcctggttgtccaaattggttatcaattgcttccaattccagctcaggtaatctatttagcctggaagtgggtctggcagtggcggactgaagtgaagctggcaggatctccgatttgatggttacactggtgaccgcaccatccatcctgtctgtctcacataagcctggcaactgtgctgccttctccagcgtgggcagtaactgatcaaactggtcaaggtcagctgtaaactggctctgggcctccagttttatttcctcaggagtgggtttggtcattggggttgggtttgtattacatggatccatctgttctttcttttccactttcacctttacatcatccaggctcaggtttggagttgatcttaaatctttctcatctttatctaaaagatagcgtaggccaa

SEQ ID NO: 185536 - DNA, 954 bp, Homo Sapiens
ggcttttatttttcaagtgtgctcctcttaaataaccataaagtgacacttccggtcacatttgatgtttgttcggatatcctctgggtttgtcaaatcttccatcctgtctgccaggatataagggtgagaagtttgccatgtgagaggctaaacttcataactgtaataaaacggcccagattgtggatttcttggttttgatattctccatgcaccattccagaaaggtagaacagcttggcacccgggtaaacttccgtccagaacctgtgttttaatcgcttctttgtcttcttcagttgcttattatgcttaaggagtcgaggtgggtgagaactcccataattttaggaaagccatgtacttgacagatgtttagaaactcaaacgtttccatttcaaacccaaagctggcatctataagcatcagtaccagatctgctactttagccagatcaatcatcatgttaatgtcacacccacattcaataatggtgagtctgcgctttttacctgacacaatcgtcacagggcctctgatctcggtcaacttctgccgggtaaagttccgaatgaggcattgtatcaaagtgctctttccaacttttggaggtcccatcaccactaccactattggtgggggctctagtggagttcgatcaaccactggaatatgatgcttttttgtcttcaaatcctgagtcctgtgaaaggatcgagccatccgcacagcagactgaactgcaaaagctttgggatttctcttccgggcatcttcttcgtctcctagctggagatcctgcagaagccgcttctttttctttgcagctttgggtccactgtttttctttctgtgtttcttctggtccttagcctccatagtggctatttaccaataacaagtaactctaacctgctcgcagccgcgactcctcaggtcagcatggccaa

SEQ ID NO: 185537 - DNA, 1201 bp, Homo Sapiens
ttgggttctgcatatacagtgcatcagtctgttctctttgaccacaattggaatacatttcaagatggtaacagccccatgaagtaccgctttaattccttgctggtaatctaatagaatcagattaagaaaaataacacaattttaccatttgacatactcttcattgaatttagtttgtctaaaatagtctcacaggtaaaaaacataacaacaatgaccaccattgtctttgatacatttattttaattcttaagtggccaaataacagattaggtaaaatgagattacatgaaaaggttctaaaatgatatatttagatgcaataattaaccatatgctagaatgcccacctctaagccaattggattctttagctctctttttctttccttcatctaccttcttctcttttttgcctctgtctttaccctttagaaactggcatgtgttagggcccagatttcaccagatacacaatcctcaggctgacataaagtttacgaggactgctactataactgagagtgctgaccaagcaaagaaacatttagttgatggtgcttgatatttttggtgggtgggggaaatctttttctcaccatcaaatctttgcagtaatcctctgcaggtcttagaaacacattggctctgtcagcatttgtaattgtacatttattcatcaggtatttatagtgaatcatactgtaaaaaagaggtagcatgatatgctggaaagcatattagactaggagtcaagacctggtttctagtcttggttttgccattaatgtgctgcatgatcttgggaaaatcatttaccctaaataagggtggtggactatcttgaagaaccctttcaactctaaaaattgaccctatcaactggagagcccacaaggcatagggaatagagaaaagggaaatgttttcagttttcttttttattttggttatgcttaaatatgaatgtaattaccaaaagatttagaagtgcatgtgctttggaggatttgtattgagcttttacagtattcatttttcaactcaaggcaatggctttctacaccaactctaatccataaacgggtcttatgacatctatgaagtagtagcaagacatgcttagtgtgtatttctctctttgagacactgtaatttctaccagaaaattccagagcattatgtaggtagaaaaaa

SEQ ID NO: 185538 - DNA, 947 bp, Homo Sapiens
  misc_feature (651)..(660): n is a, c, g, or t
ctttgtacaaaaaagttggctttacattcagcccatgatgggggccggcctgaattatgaatgttaccgattcggcatttccccatccacaaatgcgctggtgatcggtgccacggtgatggagggcttctacgtcatcttcgacagagcccagaagagggtgggcttcgcagcgagcccctgtgcagaaattgcaggtgctgcagtgtctgaaatttccgggcctttctcaacagaggatgtagccagcaactgtgtccccgctcagtctttgagcgagcccattttgtggattgtgtcctatgcgctcatgagcgtctgtggagccatcctccttgtcttaatcgtcctgctgctgctgccgttccggtgtcagcgtcgcccccgtgaccctgaggtcgtcaatgatgagtcctctctggtcagacatcgctggaaatgaatagccaggcctgacctcaagcaaccatgaactcagccattaagaaaatcacatttccagggcagcagccgggatcgatggtggcgctttctcctgtgcccacccgtcttcaatctctgttctgctcccagatgccttctagattcactgtcttttgattcttgattttcaagctttcaaatcctccctacttccaagaaaaataattnnnnnnnnnncttcattctaaaccaaaacagagtggattgggctgcaggctctatggggtttgttatgccaaagtgtctacatgtgccaccaacataaaacaaaaccaagccttggctcgttctcttctctcttcaatctctggaaaaataaatacatatagttgataacccctcttagcttacaggaagctttttgtattaattgcctttgaggttattttccgccagacctcaacctgggtcaagtggtacaggaaaggcttgcagtatgatggcaggagaatcagccttggggc

SEQ ID NO: 185539 - DNA, 1558 bp, Homo Sapiens
  misc_feature (178)..(265): n is a, c, g, or t
ttggcgaagatcggaaagaacagacccggaatgccagggccgaggtgttgcgccaggctaaagccaattttgaaaaagaagaaaggcgtaaagaacttaagcgacttcggggtgaggatacatggatgctacctgatgtgaatgagagaattgaacagttctcacaggaacactctgnnnnnnnnnnnnnnnnnnnnnnnnnnnnnnnnnnnnnnnnnnnnnnnnnnnnnnnnnnnnnnnnnnnnnnnnnnnnnnnnnnnnnnnncaatgagtcatctgatagctcatcaagctctgaagatgagtgggttgaggctgttccatcccagactcctgacaaggaaaaagcctggaaagtgaaagatgaaaagtcaggaaaagatgacacccaaattatcaagagggatgagtggatgactgttgattttatgtctgttaaaactgtgtcatcatcatcactcaaagctgaaaaggaaactatgaggaaaatagagcaagagaaaaaccaagcgcttgaacagtccaaactgatggaaagagaattgaatccgtactggaaggatggtgggacaggtcttccacctgaagactgtagtgtgtcatcgattactaaagtttcagtggtagaagatggtggattaagctggctaaggaaatcttatctaagaatgaaggaacaagctgagaaacaaagtagaaactttgaggacattgtagccgaaagatatgggtcaatggaaatatttcagtcaaaattagaagatgctgaaaaagctgcatccacgaaagaagattatagacgggaacggtggaggaaacccacatattcagataaagcacaaaattgtcaagaaagtagagaatcagacttagtaaaatatggtaacagttcaagggatagatatgctacaacagatactgcaaaaaatagcaataatgaaaaatttattggtgatgaaaaagataagagacctgggtctttagaaacgtgtagaagagaatctaacccaaggcaaaatcaagagttttcttttggcaatttgagagctaaattcttgagaccctctgatgatgaagaactgtcatttcacagcaagggcagaaaatttgaaccacttagttcatcttcagcattggtagctcagggctctttgtgtagtggttttagaaaacccaccaagaacagtgaagaaagattaacatcatggagtcgctctgatgggagaggagacaagaaacattcaaatcaaaagccatcggaaaccagtactgatgaacaccaacatgttccagaagacccaagagaaaaatcacaagatgaagtcttgagagatgaccctccaaaaaaagaacatctacgggatacaaagtctacatttgctggcagtccagagcgtgagtccattcacatcctgagtgttgatgagaagaacaagttgggagccaagattatcaaagcagagatgatggggaatatggaattagctgaacaacttaaagttcaacttgaaaaggcaaataaattcaaagaaactataacacagataccaaaaaaatc

SEQ ID NO: 185540 - DNA, 1707 bp, Homo Sapiens
aaaggggtttgtgtacaactgaaatcacaggtttcaaactgaggaccccagttttttggaaatgctgtacagttcatttccttgatgcgattcccatcatccaaacaaaacagctcctggacccgggaagcgttgcattggtgttgaagtgttccattggggttttccttgaatatggagccttgcctgccaatcatttcttctcaccagggcaataccactgtgtgggctggggaaagccaatgagttttgatatgaccacaggtgttcatgaaatggcaggaattaaaataggaatttgaatgataaactcaaaagtgtatatgttgtggggaagggagtatcaaaacagagtagtcagtcctctgccaggtttggtcattttccccatcacctggggaaacctcgccactcatgcagctggagaggacaaactgcatctggatcctttctttgcactgtggtagaccaggacggcctgttcttcaaatggtgcttggtcatcaaaatgaacttggctagcaggtacacacatctacagattggaatggcttcttaaaggctatcccaccttggaaataatcctggttatccgcaacacatgatgttttgtcctgcttcttgataggatatctccttagatgtgcctgttcagatccttctgaattctcatctcatcgacttcattttcagcatactgaggatctctcgcagggtccttgatatctttcagcgtgttaatactctttggtggaaagagcttttcatacacttttttccacaactccataggtgagtgggcatgaagctttccaatgtcattttcaggaacaggaggagatcctatttgaccgaaagaatccaatcctgctgtgataaacagcggtttattctgatccacacatattgatttgcttttgtcaatgccaaatgccaactggttgataactccacgtaattttagtaatagagcttctgatttactggtaaacattaatgatgctccataataatgtgcaacaaatcgaagtgtcttgcatattacctttctcttctcagactcaaaatcctgaaaaacatcatatttacttccaattatgaccagaggtaccggaaatgggtcaattaattcatgatcctgaggatgatccttcggcatattattccagatcttctgtctcatttcagaaactgctttagcatttgtctttcccagtttcattatcactttgtctacatggctttttgtggcttgcaagagattttccatggtgggccagagatcattaggttttgaaagatccagaacgagaacaagagaaaacgtccgtaaggtgtcacctgtgatgggtatgctgattaagtccaataaagaggttcctccaccgagttcccaaaagtgagcgatatcttttggtgtgttgtgcccttttgctcttcttccatatgtatattccaaagctaaggttggttttggtggttcatctctgtcaagacaccttagaataatagtagtctttcccccatttttactgccaatgaagaaaacagatttttctgcaatttcagctccatcaccttcacttccattaattccccttttttccacttcagcttttgcaatttcccagagagtttcactgggcatcgtcgacggcctggctgccgcaaacgtcacaggctcggagtagtgaccagcctagccaa

SEQ ID NO: 185541 - DNA, 2038 bp, Homo Sapiens
taaaaagcggtacattccttggtcttgagtatcaacgcgaacatcaaagtccaccgcatctctctgtgctgcagctaagttttctgcatcttctttcttacttgtggttgctgtagatttaattttgctgacttcttcattaacagcagacgcagaaaccagtggtgcttgtggtctgttatccacagacgttggttgaatagaatcatgaatatctacagacttctgtgatattgtatccaatggcttttcacttacaggagatggaggtgggggggcagtttctccagaattgggtcgccaggtcaacagcgcatgtgggattgtggttttgaagatatccagtgtgcagttgcaagttttatcccagatttctagggtaaatttttcaccattcagaataacaacattctctaaacagtttgtaccagatcgcgctaactgctcattgtcttgctgcacacaccagtagagctgagcaaaaatgtcatccaaaagtacatcactgagtacttctaaatactgagtgaatacatcacagattgcataaagtgcatgattgcaagttgttgtcatccattcagctttctctgtctgttgttctggcaatttcatattgtcaaagattctgaaaacaattctaaataaatcctgccaccagtgtttctcataagtgtggccatatgttttcattatttcaaacattactgttaaacccctggttcttacatctaatttgcatctattgatgatacaggataactcaaagagaattgggaaccatcctctcacccacaccctgtcttcaggtgctacgttcatatcatcgcttgtgtattccttgaaagcctgaggtctatcagacacatattttgcacaatggcgaataagtcgaattgcttccatacttgtgtctgggaaagctgcattgcacgcaaattcagacaaacacttcactgcatcctggaaagaatcaatggtcgctggaaagtgtttttcaaatacaagggtgacaatgtgcccggttgtttggaatgcaagttccactatgctttcatcttgatcagatgcagctagatgaaatacagagaaaatgttcttccatccagatcgaatgttagcagcttgagaattaaccatctgtgctatacaccgtacaaccatatctcgaattgttggagacctgttccgtttcattatatgttcaaaaggtcttaagaaatccttctggaatctgaagttagcaagctcccctttctctaagaacttcattgacaactgcctcaaggagtctactgcaaaaatagctacatcttcattaggattacacccaaccttattaaaatgatctccaataacttcccaaattcgagaccactgtaatcttattcttcccatgttgtaatatgatatttctactattttttgtagactaaacattcttgggtgtgtcgtggaaagtaattcatccatagacacagcacagagccaacggacaaaatccacaatggcatttccatctagccttgtagatcctgtgaatattctatctacagcaacaacaacactctgagaactggtttctccaatggattcctgaatacttgctatctgtttccagtccacatttcctccaactagccctaaacccacaaattcatcaggagcctgatcttttgttccagtaagagatccttctctgcctcgcactgttccagaaatgtatcgaggtttcactccagttcctataagctgtgccagctccaactgactgatgcacttcagaatctcatgccatgaatttcctaaataatttccatctgtatgagccactgtgataagtgtttttattgtgtcaatgttcttctgtttcatttcagtaataccggaactcactgtgagtaaggtaaatcttgctagtgcctggacatatgcatctctctccagctgaatgctgaaaatgcatgcaattctgattgcacatcttataccttccaggcaaagagaggctacttcagtatcatcacaatcttgccaa

SEQ ID NO: 185542 - DNA, 1320 bp, Homo Sapiens
  misc_feature (806)..(848): n is a, c, g, or t
ctttgtacaaaaaagttggattatgcaatttgacttgattcctgaacttcgtgctgttcttagaagattttttctgcgaatcggagtagtttttcagatatcacaaccacctgaacaggaacttggaataaacaagcaatgatgggaacttaatatttttgttggcatttacatccctctgctctttaaaaggacgctggagctgaggtttcctacctgaaaaatgatttctctggattgcagtgtctgagttactggtaaagatgcttagaagtcttactcaaacttgcaacactccagtcccttttagtgctggtggattttgtgtgttatattggcctcatgttgagcagaaagcctgtttaaacagtgtcagctcatgctcacgggtccttccctgtcttccacggcaggaaaagccccacgtttttggcaggtgtggaagtgaaacttacccaaagaactatagatgtaaagattgaacttctacaagaagtacaactcaggagagctgtattttgaaggataaaatgtttataattggggagtggggagagaagaagaaattattgttcatggtaaaagatatttagcaactatggtattcttattctgaagatttttgcacactcaggctatctgagatactggtaatcatcctgtgaaaaatgtacagagatgcaggtctgtaatataaaaatcttaaaacattatatagttcttcctgcactgttttctttattttcttattcatttgctaaatacccataatattttgtcaaatgcactaaacatttgggtggaannnnnnnnnnnnnnnnnnnnnnnnnnnnnnnnnnnnnnnnnnnggtaggtggtgattttgaggctgtaacatgcccagaagctgttgtggccgacacttcaacaatagggaaaaaaaggtagaaaatatccctactgacagtaactacctgtcacatatttctcttaggacttttaaagatgagccattaaaatagaatgatcctttatggaccaaaacttgaatcactgcaaaatgaatccagattgctgtcattttcttttcttttgggtggtggggcttgatgtagattttactctatgtacagaatttaacgttgaatatattaaaataacaaatctggcatggtttgcggaggttagatttactggaaatgtattcatactgtgaattgtgctctgatggttaaaagacaagattgtcaagcattccgtattaacagtggatgtagaaaattttttcatatggacaaaatgtatatggtacagatgtaaagttttctatgttaaaaattc

SEQ ID NO: 185543 - DNA, 2306 bp, Homo Sapiens
ttggctctgtttcattttcaaaaatgctttccaacattgaacttctctctcctgctagccctaaaagaagatccccctagaaatctcctggaagagaggaaatcagatcaactggggctgcctcagaccttgcagcaggaattctccctgatcaatgtgcaaatccggaatgtcaatgtggagatggatgcggcagacaggagctgcacagtgtctgtgcactgcagcaaccatcgtgtcaagatgctggtgaagttccctgcacagtacccaaacaacgccgccccttccttccagtttattaaccccacaaccatcacatccaccatgaaagctaagctgctgaagatcctgaaggacacagccctgcagaaagtgaagcgtggccagagctgcctggagccctgcctgcgccagctcgtctcctgccttgagtcctttgtgaaccaggaagacagcgcttccagcaacccgtttgcactccccaactctgtcactccccccttaccgacgtttgcgcgggtgaccacggcttacgggtcgtaccaggacgccaacattccctttcctaggacttctggggccaggttctgcggagcaggttacctggtatatttcacaaggcccatgacaatgcatcgggcggtgtctcccacagagcctactccgagatctctctcagccttgtctgcttatcacactggcttgatcgcgcccatgaagatccgcacagaggcccctgggaaccttcgtttatacagtgggagccccactcgcagcgagaaagagcaggtctccatcagctccttctactacaaggagcggaaatcaagacgatggaaaagtaagcgtgagggatcagactctggcaatcgacagatcaaggctgctgggaaagtcatcatccaggatattgcttgcctcctgcctgttcacaaatcgctgggagagctgtacatattgaatgtgaatgatattcaggaaacatgtcagaagaatgccgcctctgccttgctcgttggaagaaaggatcttgtccaggtttggtcgctggctacggtagctacagatctttgccttggtccgaaatctgacccagatttggaaacaccctgggctcgacatccatttgggcggcagctgctggagtccctgttggctcactattgccggctccgggatgttcagacactggcgatgctctgtagcgtgtttgaagcccagtctcggcctcaggggctaccaaacccctttgggccttttcctaaccgttcttctaatcttgtggtgtcccatagtcgatatcctagctttacctcttctggttcctgctccagtatgtcagacccagggctcaacactggcggctggaacatagcgggaagagaggcagagcacttgtcctccccttggggagaatcctcaccagaagagctccgctttgggagtctgacctacagtgatccccgtgagcgagaacgcgaccagcatgataaaaataaaaggctcctggaccccgccaatacccagcaatttgatgactttaagaaatgctatggggaaatcctctaccgttggggtctgagagagaagcgagctgaagtgttgaagtttgtctcctgtcctcctgaccctcacaaagggatcgagttcggcgtgtactgcagccactgccggagtgaggtccgtggcacgcagtgtgccatctgcaaaggcttcacgttccagtgtgccatctgtcacgtggctgtgcggggatcgtccaatttctgcctgacctgtgggcacggtggccacaccagccacatgatggagtggtttcggacccaggaggtgtgtcccaccgggtgtgggtgccactgcctgcttgaaagcactttctgaacctacagaagttgggtattgtctgaaatcccagaggacccataagtgccggtgacaagctgtctgtcaggggagaggctccagaacctgggttcgtccccagtgagaccggaggatgatcccccaaggactgcgcagcatcagctcttggtgggcctctgccttctcttctgtttggccacctggtgtggatgtcactgtgtgaagataggacagaagtgcagagctgcgctttgtgtgttgtctatgtcggctgagctaccaaggtggaagttttcatggagaaaagcacctgggctccagggccagtgttacagtgttaccctgtaagtgttagccttaaaccccgagcagcgttctcttgatgccagtgcagagaccagagtcagatgccgaggacagtgggtaggaatttcatcaac

SEQ ID NO: 185544 - DNA, 880 bp, Homo Sapiens
aaaaggcaactttgtacaaaaaagttggggctttcctggaggacagatgccttctcagtatcctggaggacaacctacttaccctagtcagcctgccacagtgactcaggtcactcaaggaactatccgaccagctgccaacttcgatgctataagagatgcagaaattcttcgtaaggcaatgaagggttttgggacagatgagcaggcaattgtggatgtggtggccaaccgttccaatgatcagaggcaaaaaattaaagcagcatttaagacctcctatggcaaggatttaatcaaagatctcaaatcagagttaagtggaaatatggaagaactgatcctggccctcttcatgcctcctacgtattacgatgcctggagcttacggaaagcaatgcagggagcaggaactcaggaacgtgtattgattgagattttgtgcacaagaacaaatcaggaaatccgagaaattgtcagatgttatcagtcagaatttggacgagaccttgaaaaggacattaggtcagatacatcaggacattttgaacgtttacttgtgtccatgtgccagggaaatcgtgatgagaaccagagtataaaccaccaaatggctcaggaagatgctcagcgtctctatcaagctggtgaggggagactagggaccgatgaatcttgctttaacatgatccttgccacaagaagctttcctcagctgagagctaccatgggagcttattctaggatgggctaatcgagacttgttaagcagtgtgagccgtgagttttccggatatgtagaaagtggtttgaagaccatcttgcagtgtgccctgaaccgccctgccttctttgctgagaggctctactatgctatgaa

SEQ ID NO: 185545 - DNA, 1854 bp, Homo Sapiens
ttggcacagaaactgctggacacactgaagaaactgaataaaacagatgaagaaataagcagttaaaaaaataagtcgcccctccaaaacacgcccccatcccacagcgctccgcagcttcccaccaccgcccgcctcagttcctttgcgtctgttgcctccccagccctgcacgccctggctggcactgttgccgctgcattctcgtgttcagtgatgccctcttcttgtttgaaacaaaagaaaataatgcattgtgttttttaaaaagagtatcttatacatgtatcctaaaaagagaagctcatgtgcaattggtgcacagcaggagaaatttctggactgttaggatgaatggacgccttctccccgttatttaagatttgtgaccttgtacataaccctgggtgacgtgcacattgcttgggtatggaacggtagaaatttgggtgtttttaaaaccttgtttggggttgttcctgtccttgttgagaatcatagagatgtctgtgttcttggagtatttcacactgaggactaatctgctatcttcattccagtccctacccctcagtgcctgctctcatccaaataacctgggaggtgacaatcaggatatctcaggaggtccaaggtggaacagacctctttgcctttcccagcgtctcatacccccggtagtgcagctgtgggtggaggctggggtgtctgcacgaagtcaggccagcgtcctcctccacagcctgtcactgccccctccccagcctgtgtccacagtgctgtgatcccgagggaagtcctccagtctaagtcacagtgccctgacaggtgagaagcaaactcccgctggaagcctccatctctttggaaaaacagttagtctggagcctgtggcccaggcccttctgtccccaggcatcatcccaacagctcattttccctagtccgccttcgttcaagggtcaggaatggaccagaacagatgggttctggaggcccctgaacagagggctatggctgtggagaaggttcttggcccgttggactcacacagaccctgtaccctctcggcaagcatcttcagtcagattatcctcagtttcagatacttcataataccttgtgttgtgtggggtcatacatcatcgtgtttgtaagagaagatggtcattttattctctgtataaaacttagctctaaagcagaaactaaagcagcaaatgcaggaaggctgtctcgccatcctcaagactcagcagctctcattctccagtggtgagcacaccatttgtgctgctgctgttgtcgtgaaatataataacagtggaagtcacaaaaatgtcccctgcccagccccctcgccgcccttgacctcctgcaggccatgtgtgtattacttgtctagtgatgtcctctcaaagtgctgtacgcgagctcggcgccacctccgcctccctttcagagcctgctccccgccctctctgctcgctgcattgtggtgttctcttctcaaggctttgaaatctccccttgcactgagaaaagtcgtcagatctctccccgtctccctcccaacttatacgacctgatttccttaggacggaaccgcaggcacctgcgccgggcgtcttactcccgctgcttgttctgtcccctccctcggaccaaacagtgctcatgcttcaggaccttgtttgtcgaagatgttggtttccctttctctgggttaaatccacccttggcctctttccacatgatcctgacaggtgactttgttccctcctgtagtgcccgtggaggcgggaagctgagcccggctcccaggaagcacagtgagggctcagccattgccaa

SEQ ID NO: 185546 - DNA, 1168 bp, Homo Sapiens
  misc_feature (217)..(225): n is a, c, g, or t
  misc_feature (804)..(819): n is a, c, g, or t
tgtacaaagaagcagatgagaaggatgattcaggtgctaccacaatgaacattggttctgacaaacttctgttccgaaacaccaatgtggaagatgtccttaatgcccgaaaactggagcgagactcacttcgggatgaatcccaaaggaagaaggaacaggacaagctgcagagggagagagacaaactagccaagcaggagcgcaaggaaaaggnnnnnnnnnggacacagagaggggagcgaaagcgataaccttggcctactctattctttccccccatgaacttatcaaagggagaactggttgtgtatttaagagaaatgagagtgcattgcaaagtagtttcccaaggcatttcccctattgtttacatggtcaaaaggaaaatcaaaatcacttctaattacaaaatgtgctgttttggtggggtgggcaatcagattattatagttgatgactgtaccaaagatctggaatgggggccacctttatattttaatactcaagtcctgtgctccttttggccactttaaaaagtcttccctcaccttggataaataggattcagaaagctaacagttttcattctgaaggagcagaaacataatcaatccctccctgagataaaatgtgggcatgcacattgctttggagtcagtattcagctgtaagtgtagtattgttttatggctgaaatagaaagctaatgaagaggcctacctggatccagattttatgttaacatggcagcaaaactaggaaaatgggaagaaattacttgcggggtgttctagatctgannnnnnnnnnnnnnnngaaagtttcagcctgtgggaggaaaagaggtatcttttaaaatagagatagttacatattttcctcatctaggctgtgtcactattgggtgcaaggatatcattgttggctagattcattttgtataatcatgtatcctcttgtgtgctggtagagattttaatcctgatttttccataaaacatgagtattaagaaataattcctggtttggagaaactggagaaatcacccttttaaggaagaaacactggaaatttctgctaacaccaagatatttaagagtgtacatagtagtgctcaacaatttattgaatgatgagtgaatggaaaaactgggagagtcaaaa

SEQ ID NO: 185547 - DNA, 1085 bp, Homo Sapiens
  misc_feature (475)..(490): n is a, c, g, or t
  misc_feature (776)..(820): n is a, c, g, or t
ctttgtacaaaaaagttgggcatttcccctttatataagtattacatggtcaaaaggaaaatcaaaatcacttctaattacaaaatgtgctgttttggtggggtgggcaatcagattattatagttgatgactgtaccaaagatctggaatgggggccacctttatattttaatactcaagtcctgtgctccttttggccactttaaaaagtcttccctcaccttggataaataggattcagaaagctaacagttttcattctgaaggagcagaaacataatcaatccctccctgagataaaatgtgggcatgcacattgctttggagtcagtattcagctgtaagtgtagtattgttttatggctgaaatagaaagctaatgaagaggcctacctggatccagattttatgttaacatggcagcaaaactaggaaaatgggaagaaattacttgcggggtgttctagatctgannnnnnnnnnnnnnnngaaagtttcagcctgtgggaggaaaagaggtatcttttaaaatagagatagttacatattttcctcatctaggctgtgtcactattgggtgcaaggatatcattgttggctagattcattttgtataatcatgtatcctcttgtgtgctggtagagattttaatcctgatttttccataaaacatgagtattaagaaataattcctggtttggagaaactggagaaatcacccttttaaggaagaaacactggaaatttctgctaacaccaagatatttaagagtnnnnnnnnnnnnnnnnnnnnnnnnnnnnnnnnnnnnnnnnnnnnnggaaaaactgggagagtcaaaagtgagcaaaagctctccatttctacttctgtcacaaaccacattaaattgtaaataaggcccttctccacttgacttcaggcagcagattgtctagaagcctaaggacagcaatttctctgacaagacaaagtagatattttataccaggggttggcaaactactgcccacgggccgaatttggcccagtctgtttttgtatggtgcaaactaaaaatgatttttacatttttaaagagttat

SEQ ID NO: 185548 - DNA, 1735 bp, Homo Sapiens
  misc_feature (1675)..(1692): n is a, c, g, or t
agcatctgggaccggccgattctgcacctccgtccggcgctgccctttgattcggatttccatcttgcattctccggctgatcgcgggacctggctcgtgcagaggaggggggccgatcgctatggagtatttcatggtgcccactcagaaggtgccctctttgcaacatttcaggaaaacagagaaagaagtgataggagggctctgtagccttgccaacattccactaacccccgagactcagcgggaccaggagcggcggattcggcgggagatcgccaacagcaacgagcggagacgcatgcagagcatcaacgcgggattccagtccctcaagaccctcatcccccacacagacggagagaagctcagcaaggcagccattctccagcagacagccgagtacatcttctccctggagcaggagaagaccaggctcttgcagcagaacacacagctcaagcgcttcatccaggagctgagcggctcgtcccccaagcgacggcgggcagaggacaaggacgaaggcataggctccccggacatctgggaggacgagaaggcggaggacctgcggcgggagatgattgagctgcggcagcagctggacaaggagcgctcggtgcgcatgatgctggaggagcaggtgcgctcgctggaggcccacatgtacccggaaaagctcaaggtgattgcgcagcaggtgcagctgcagcagcagcaggaacaggtgaggctgctgcaccaggagaagctggagcgggaacagcagcagctgcggacccagcttctgccccctccggcccccacccaccaccccacggtgatcgtgccagcaccgcctcctcctccctcccaccacatcaatgtcgtcaccatgggcccctcctcggtcatcaactctgtttccacatcccggcaaaatctggacaccatcgtgcaggcaatccagcacatcgagggcacccaggaaaagcaggagctggaggaggagcagcggcgagctgtcatcgtgaagcctgtccgcagctgcccggaggcccccacctctgacaccgcctccgactccgaggcctcagacagtgacgccatggaccagagccgggaggagccgtcgggggacggggagcttccctgactacccccccagccctcctctcccttctgggggctggagggagccggggcagccacagggagagacatgggcgaatgagtgagaaatttttacaaaattacgatgtcatttgggtctcttttatgacctctttttcaatactgtaaatcgacctttgaacgaagccactcaacccgaggtcccggggctggggtgtcgcagagcgtgtgggagcatcggcaccccagggcggggcctcggccccgggggctggaggaagctgacacggagatgcctggcctctctctgccaaaaagcattttttcctttaaatatgttttttaagaacagggaaaattaaacaaaaccccaggttatttcttccctgcccagagccagcctgggattgtcagccttcaatcccctttccttcctctttttgggttttcttctttctcctttaagcacttacatggttgggggtaagactaggctggggcattctgggggcccggaggtctccgttgcttcttggttggggtttgctgctgctgtgnnnnnnnnnnnnnnnnnnatctcggcactagaattcgccactctcccaccccccagccccc

SEQ ID NO: 185549 - DNA, 2651 bp, Homo Sapiens
  misc_feature (2367)..(2375): n is a, c, g, or t
ttggtgaagtcctatccatttgtactttcagcaaacctgcatggaggttctttggtggttaactacccttttgatgatgatgaacaaggacttgccacatatagtaaatcaccagatgatgctgtgttccaacaaatagcactttcttattccaaggaaaattcccagatgtttcaaggtagaccttgcaagaatatgtatcctaatgaatattttcctcatggaataacaaatggagctagttggtataatgtgccaggaggaatgcaggactggaactatttacaaacaaattgctttgaagtgactattgaactaggttgtgtgaaatatccacttgagaaagagctgccaaacttttgggaacagaatcgaagatcactaatccagtttatgaaacaggttcatcagggcgtcagaggatttgttctagatgccacagatggcaggggtatattaaatgccaccattagtgttgctgagattaatcacccagtgactacttacaaaactggagattactggcgtctcttggttccaggaacttataaaatcacagcatctgctcgagggtataatccagttaccaagaatgtgactgtcaagagtgaaggcgctattcaggtcaacttcacacttgttcgatcctcaacagattcaaacaatgaatcaaagaaaggaaaaggggctagcagcagcaccaatgatgccagtgatccaactactaaagagtttgaaactttaattaaagacctttcagcggagaatggtttggaaagcctcatgttacgctcctcctcaaatctggctctggctctttatcgataccattcctacaaagacttatcagagtttctgagaggacttgtaatgaactatccacatattacaaatcttaccaatttgggacagagcactgaatatcgtcacatttggtcccttgaaatctccaataagcccaatgtatctgagcctgaagaaccaaagattcgttttgttgctggtatccatggaaatgcgccagttggaactgaactgcttttggctctggcagaatttctctgcctgaactacaaaaagaacccagctgttacccaattggttgacaggactaggattgtgattgtcccttctctaaatccagatgggcgagagagagctcaagagaaagactgtacttcaaaaataggacaaacaaatgctcgtggcaaagatttggatacagacttcacaaataatgcctcccaacctgagaccaaagccatcattgaaaatttgattcaaaaacaggactttagtctttctgttgccttagatggtggttccatgctggtcacatatccttatgacaagccagtacagacagtggaaaataaagagactctgaagcatttggcatctctttatgcaaataatcatccatccatgcacatgggtcagcccagttgcccaaataaatcagatgagaatattccaggaggagtaatgcgtggagcagaatggcatagtcacctgggcagcatgaaggattatagtgtcacctatggccattgtccggaaatcacagtatacacaagctgctgttactttcctagtgctgcacgactcccttccttgtgggcagacaataagagatctcttcttagtatgttagtggaggttcacaagggagttcatggatttgttaaagataagactggaaagccaatctctaaagcagtcattgtacttaatgaaggaataaaggtacaaacaaaagagggaggttatttccatgtactcttagcgccaggtgtccataacattattgccatcgctgatgggtaccagcaacaacattcacaggtctttgtgcatcatgatgcagctagttctgtggtgatagtctttgacacagataaccggatatttggtttgccaagggagcttgtggtaactgtatcaggtgctactatgtcggcattgatcctaacagcttgcattatttggtgcatctgctcaatcaagtctaatagacacaaggatggctttcatcggctcaggcagcatcatgatgagtatgaagatgaaattcgcatgatgtctaccggctccaagaagtccctcctaagccatgagttccaggatgaaacagacactgaagaggaaacattatattctagcaaacattgaaaaacacattttgcatatctcccagcataagtaccaagcaaaattacagttcctcttgggagaacactgcattaagaagagagactctcttgcttcttcaaagagctttgggaaattaaattgctaaatttgtattctctgtgaatttcactggcagttttgaacttcccttccttaaagtactctaaacctttnnnnnnnnntctgatttatgcagcagagatgggacagccactttttctttttaatttaagatgagctatttggagcttatgtaataatggcataaagccaactagaggatgttgtattttgcacatcagatgtttactagtggctttagtatttttctttgttttaaatggccaaaagaatccagaaacattaaaggcacggacagcagtcagaatcgacataaagctttaaaaactcaagttttttcaacctactgaggagtacttttctctagttgttaaata

SEQ ID NO: 185550 - DNA, 1692 bp, Homo Sapiens
ttgtacaaaaaagttggcaagactttcccattcatatgagttacctagaagcgtgaatgtataggatacctgactactaagactatattctcagccctgccctgtcttttatttgcgggtctaatctaatattagaatatattaaccgcttaaggcattgaagccatatgggatggggaatgcatttcttcagtgtttctccgagagactttccatttccttggagttatggcggcaagtaagtatcatagtattaagaaatttgcctaaatctgagttgtgcctttctttactcacaaggcatgggctttgtcctggtgatcagtttgtaagccttcttccttcccagctccttaataaaagcaaagtgattgagtaggtaatgttcaaagtgtctgcctgtgtacatgtacttgtattgattatgtagttcagtaagatgtgcccaagtcatttcagaaagaaagacccttcagttttgatgcattttgctgaacacttgggtagtgagtgggatcctatccagttgaggaatgcttgcaatgctcattgaagggatttgctttgggactttgtcatcttccagaaaggaaacatattgtatatttggcccagtgtgattgattgctttatctttggtaacttttacttgaatgggatttgctgaattaatgactattgaatttaaaactaattatgagttgacaaataaataaaaggtagtgtttatgtctgagcttattgtgtttgagctaacaccaggttactcagtaaccatgacctgctcctccatttccatttattctcaacattaaatagttttatcttgttgttgccagaaatgcacttgtgccaggtattgtccctgctgtatgaaaagcttcttggcaatgaattctgtaatagtgccctacattatggttttctggtggaattgttttaacagtgacaacccaggatttccaatatatttttgttttattgttattaccaaaaattccactatgattgatgttcagtgattttctatagcaacttttttggtaactctttgggtttctgatttgttttagctaaaattttggggatatgatttgggtctttgattaatgtcagctgaacttggatttctagttcatgaagaaatctctcccaatacccatttatcctatttttagcaataattcgttaatgattccacttgattttcagaatattgtcctggttgattttgatttgacagcatacattatgaaatttgaaagtaggttaccattttgaggcagttggatataaattatgtaaatatgtatgattatgatttttataaatggcataacatgagtgtactaactaccttctatgctggccatgctacagattttctggaggtatgacaatagtatttttttatgctcagattaaaaatcagcttttcacctctccagtttttccaagtgatactcccagttctagagcaatctacagctgtttatgtgaggtgcccaacacccattcatctcaagtgcttcagtctttggtttatttcatgcactgtgccttcaaatgaaatttttaaaagggactttaaatgaagttgaatagtagtttttaaaagtcaatttgtaatttatgtgaaatctaactgtaatgaggtccttttctgttttttatatgtaaacagatctacta

SEQ ID NO: 185551 - DNA, 2531 bp, Homo Sapiens
  misc_feature (63)..(71): n is a, c, g, or t
ttggctctgtgaatttcactggcagttttgaacttcccttccttaaagtactctaaacctttnnnnnnnnntctgatttatgcagcagagatgggacagccactttttctttttaatttaagatgagctatttggagcttatgtaataatggcataaagccaactagaggatgttgtattttgcacatcagatgtttactagtggctttagtatttttctttgttttaaatggccaaaagaatccagaaacattaaggcagggacagcagtcagaatcgacataaagctttaaaaactcaaggttttttcaacctactgaggagtacttttctctagttgttaaatagctggagtttttcttattcaggtttaatggaggttgaattgatttttaaacacatataacagtaggaaatgaataaatgggcttctgcatttggctttctacctgttccaaggctagatcggaactggtagactacgctgtaagcaggatttcactacctctcttaaggtttagcaaacttctaaatagcccattttaagggagaacttactaactttattgtgaaaggtctaaatgcccacttgaatgaagctgagagagagatctagcaaaagctaaaactcatgttgtctatctttgaacttggtaaaaacccacaggtgctgctgcttatatctgtgaagcactagcttattctaggaatgcctgattctttaatattgcctaaatcggaacctttttctatgttgcacacatggttttcagatgacccagccatctacaagatctgaattctactgaaaatatctagaaatgtggaagagacctacttgcacattcttaacctgtatttgaacacaaaatatctatacttcatgctccagcccaagcctataccctgtaatagcatactattattgaaatcgcttgaccggtcttgttcacataggcctctgggagtgatttggttctttgccctaatgtttcatttgacggtctctttttgatcaaccaatttttctaaaagttcagtcgaaagcttttaagtatagcttcctcccttgaaaaaaaatgtaaactatgactgctgagtgataaaacactgtggtgtgaaagtgtcatcttcactgccaatcaggcaaagaccggaaagatttgcattttattatgtctgtcttatcatgcaatggaaatgatgctttttgtaagtatgcatcttaccaatgatgtaacggtttaatacctttgaatgttttaataaccaagttgctgctgaacttatactaaatcaggggaccaaaaaacttgctcttatcttctcaaattgtattctatatccattaatgtatcagttatcccaaagccttcaggtggaggggtttaccaccttcctaggtcgttcaaccaggttttgtgaggaatgcattcaaagtggctttataaaagaagattttctttagcaagaataatgaggtcatgtcatttgttaataagtatctgtgataaatccgtggttcaaggttaagccattctggtattctggtattagcaactgtaaattctgccacctcatacatggaacagagcttgtgggatgctaatagttagtgaagtatacatgatttaatttctaataatctttatgttttctttaaggatggtggtgtattgctctttttcagctttatttttaagagtacagtcaggaaaccaacaaggggcctaagagtggctgcccctgcttgggacattacagcaagtgaaacaaagttaatgtgacaagctttgctttgttatcattggtcttcactagaggataccttttacatgtacttctctcttggatcaaatatgtctttaactgtacatctcagtggctggaggccatgccttttaagcatgtgtaaaatttttaaagaaatgaacatacacatagttattttagtaatatttcctgaaagaaaaaccaaattctgctataagtcttgatcttcaatgaacttttaaataatgcatttagctggaaaacaagactttcccagcttgtattacctagaagcgtgaatgtataggatacctgactactaagactatattctcagccctgccctgtcttttatttgcgggtctaatctaatattagaatatattaaccgcttaaggcattgaagccatatgggatggggaatgcatttcttcagtgtttctccgagagactttccatttccttggagttatggcggcaagtaagtatcatagtattaagaaatttgcctaaatctgagttgtgcctttctttactcacaaggcatgggctttgtcctggtgatcagtttgtaagccttcttccttcccagctccttaataaaagcaaagtgattgagtaggtaatgttcaaagtgtctgcctgtgtacatgtacttgtattgattatgtagttcagtaagatgtgcccaagtcatttcagaaagaaagacccttcagttttgatgcattttgctgaacacttgggtagtgagtggg

SEQ ID NO: 185552 - DNA, 1040 bp, Homo Sapiens
ccaactttgtacaaaaaagttggcattggtcttcactagaggataccttttacatgtacttctctcttggatcaaatatgtctttaactgtacatctcagtggctggaggccatgccttttaagcatgtgtaaaatttttaaagaaatgaacatacacatagttattttagtaatatttcctgaaagaaaaaccaaattctgctataagtcttgatcttcaatgaacttttaaataatgcatttagctggaaaacaagactttcccagcttgtattacctagaagcgtgaatgtataggatacctgactactaagactatattctcagccctgccctgtcttttatttgcgggtctaatctaatattagaatatattaaccgcttaaggcattgaagccatatgggatggggaatgcatttcttcagtgtttctccgagagactttccatttccttggagttatggcggcaagtaagtatcatagtattaagaaatttgcctaaatctgagttgtgcctttctttactcacaaggcatgggctttgtcctggtgatcagtttgtaagccttcttccttcccagctccttaataaaagcaaagtgattgagtaggtaatgttcaaagtgtctgcctgtgtacatgtacttgtattgattatgtagttcagtaagatgtgcccaagtcatttcagaaagaaagacccttcagttttgatgcattttgctgaacacttgggtagtgagtgggatcctatccagttgaggaatgcttgcaatgctcattgaagggatttgctttgggactttgtcatcttccagaaaggaaacatattgtatatttggcccagtgtgattgattgctttatctttggtaacttttacttgaatgggatttgctgaattaatgactatttgaatttaaaactaattatgagttgacaaataaataaaagtagtgtttatgtctgagcttattgtgtttgagctaacaccagttactcattaccatgacctgctcctccatttccatttattctca

SEQ ID NO: 185553 - DNA, 1114 bp, Homo Sapiens
  misc_feature (196)..(204): n is a, c, g, or t
  misc_feature (696)..(728): n is a, c, g, or t
ctttgtacaaaaaagttgggaacctatttttgatgtggtacaacagttgagagcagcaccaagtgcatttagttgaatgaagtcttcttggatttcacccaactaaaaggatttttaaaaataaataacagtcttacctaaattattaggtaatgaattgtagccagttgttaatatcttaatgcagatttttttnnnnnnnnncataaaatgatttatctgtattttaaaggatccaacagatcagtattttttcctgtgatgggttttttgaaatttgacacattaaaaggtactccagtatttcacttttctcgatcactaaacatatgcatatatttttaaaaatcagtaaaagcattactctaagtgtagacttaataccatgtgacatttaatccagattgtaaatgctcatttatggttaatgacattgaaggtacatttattgtaccaaaccattttatgagttttctgttagcttgctttaaaaattattactgtaagaaatagttttataaaaaattatatttttattcagtaatttaattttgtaaatgccaaatgaaaaacgttttttgctgctatggtcttagcctgtagacatgctgctagtatcagaggggcagtagagcttggacagaaagaaaaagaaacttggtgttaggtaattgactatgcactagtatttcagannnnnnnnnnnnnnnnnnnnnnnnnnnnnnnnnccttctgcaatacatttgaaaacttgtttgggagactctgcattttttattgtggtttttttgttattgttggtttatacaagcatgcgttgcacttcttttttgggagatgtgtgttgttgatgttctatgttttgttttgagtgtagcctgactgttttataatttgggagttctgcatttgatccgcatcccctgtggtttctaagtgtatggtctcagaactgttgcatggatcctgtgtttgcaactggggagacagaaactgtggttgatagccagtcactgccttaagaacatttgatgcaagatggccagcactgaacttttgagatatgacggtgtacttactgccttgtagcaaaataaagatgtgcccttatttt

SEQ ID NO: 185554 - DNA, 1724 bp, Homo Sapiens
ttggatttctacacccttcccccttccttagacacagaaccacacatgcagctaccccgggtggcacagcaccaccattgccgaccacaccagacctcatggagacagtgcacctgtttcctgtttgggagaacaccactccactccatctctgccagcggatcctggctccctacctgaagaaagcgcctcgccagcaaggtgcatgatcgtccaccagggcaccattctggataatgttaagaacctcttagaatttgcagaaacactccaatttatagattctttcttaaacacttccagtaaccatgaaaactcagacttggaaatgccttctttaacttccacccccctcattggtcacaaattgactgttacaacaccatttcatagagaccagactgtgaaaactcaaaaggaaaatactgtttttagaaccccagctatcaaaaggtcaatcttagaaagctctccaagaactcctacaccattcaaacatgcacttgcagctcaagaaattaaatacggtcccctgaagatgctacctcagacaccctctcatctagtagaagatctgcaggatgtgatcaaacaggaatctgatgaatctggaattgttgctgagtttcaagaaaatggaccacccttactgaagaaaatcaaacaagaggtggaatctccaactgataaatcaggaaacttcttctgctcacaccactgggaaggggacagtctgaatacccaactgttcacgcagacctcgcctgtggcagatgcaccgaatattcttacaagctccgttttaatggcaccagcatcagaagatgaagacaatgttctcaaagcatttacagtacctaaaaacaggtccctggcgagccccttgcagccttgtagcagtacctgggaacctgcatcctgtggaaagatggaggagcagatgacatcttccagtcaagctcgtaaatacgtgaatgcattctcagcccggacgctggtcatgtgagacatttccagaaaagcattatggttttcagaacacttcaagttgacttgggatatatcattcctcaacatgaaacttttcatgaatgggagaagaacctatttttgttgtggtacaacagttgagagcagcaccaagtgcatttagttgaatgaagtcttcttggatttcacccaccctaaaaggatttttaaaaataaataacagtcttacctaaattattaggtaatgaattgtagccagttgttaatatcttaatgcagatttttttaaaaaaaacataaaatgatttatctgtattttaaaggatccaacagatcagtattttttcctgtgatgggttttttgaaatttgacacattaaaaggtactccagtatttcacttttctcgatcactaaacatatgtatatatttttaaaaatcagtaaaagcattactctaactgtagacttaataccatgtgacatttaatccagattgtaaatgctcatttatggttaatgacattgaaggtacatttattgtaccaaaccattttatgagttttctgttagcttgctttaaaaattattactgtaagaaatagttttataaaaaattatatttttattcagtaatttaaatttgtaaatgccaaatgaaaaacgttttttgctgctatggtcttagcctgtaaacatgctgctagtatcagaggggcactatagcttggacag

SEQ ID NO: 185555 - DNA, 885 bp, Homo Sapiens
ttggatttaatttacttatctccccacccacccctcgtttctttttagctggtcaaaatgtctttggaagtttcctaaagtctgaattcagtgaggagaatattgagttctggctggcttgtgaagactataagaaaacagagtctgatcttttgccctgtaaagcagaagagatatataaagcatttgtgcattcagatgctgctaaacaaatcaatattgacttccgcactcgagaatctacagccaagaagattaaagcaccaacccccacgtgttttgatgaagcacaaaaagtcatatatactcttatggaaaaggactcttatcccaggttcctcaaatcagatatttacttaaatcttctaaatgacctgcaggctaatagcctaaagtgactggtccctggctgaagggaattaacagatagtatcaagcgcagaaggaatgtgccagtatggctccctgggtgaacagcttggccttttttgggtgtcttgacaggccaagaagaacaaatgactcagaatggattaacatgaaagttatccaggcgcagagttgaagaagcataagcaagacaaaaacagagagaccgcagaaggaggaagatactgtggtactgtcataaaaaacagtggagctctgtattagaaagcccctcagaactgggaaggccaggtaactctagttacacagaaactgtgactaaagtctatgaaactgattacaacagactgtaagaatcaaagtcaactgacatctatgctacatattattatatagtttgtactgagctattgaagtcccattaacttaaagtatatgttttccaatttgcccttgctactattgcttgtcggtgttattttattttattgtttt

SEQ ID NO: 185556 - DNA, 967 bp, Homo Sapiens
ttggcaccatgcgcgcagcagccatctccactccaaagttagacaaaatgccaggaatgttcttctctgctaacccaaaggaattgaaaggaaccactcattcacttctagacgacaaaatgcaaaaaaggaggccaaagacttttggaatggatatgaaagcatacctgagatctatgatcccacatctggaatctggaatgaaatcttccaagtccaaggatgtactttctgctgctgaagtaatgcaatggtctcaatctctggaaaaacttcttgccaaccaaactggtcaaaatgtctttggaagtttcctaaagtctgaattcagtgaggagaatattgagttctggctggcttgtgaagactataagaaaacagagtctgatcttttgccctgtaaagcagaagagatatataaagcatttgtgcattcagatgctgctaaacaaatcaatattgacttccgcactcgagaatctacagccaagaagattaaagcaccaacccccacgtgttttgatgaagcacaaaaagtcatatatactcttatggaaaaggactcttatcccaggttcctcaaatcagatatttacttaaatcttctaaatgacctgcaggctaatagcctaaagtgactggtccctggctgaagggaattaacagatagtatcaagcgcagaaggaatgtgccagtatggctccctgggtgaacagcttggccttttttgggtgtcttgacaggccaagaagaacaaatgactcagaatggattaacatgaaagttatccaggcgcagagttgaagaagcataagcaagacaaaaacagagagaccgcagaaggaggaagatactgtggtactgtcataaaaaacagtggagctctgtattaaaaagcccctcagaactgggaaggccaggtaactctagttacacagaaactgtgactaaagtctatgaaactga

SEQ ID NO: 185557 - DNA, 1095 bp, Homo Sapiens
ttgcaacaaattgatgagcaatgcttttcttataatggcgcaactttgtacaaaaaagttggctcctacaagcgcagcaattgcaagcccatcccggccaacctgcagctgtgccacggcatcgaataccagaacatgcggctgcccaacctgctgggccacgagaccatgaaggaggtgctggagcaggccggcgcttggatcccgctggtcatgaagcagtgccacccggacaccaagaagttcctgtgctcgctcttcgcccccgtctgcctcgatgacctagacgagaccatccagccatgccactcgctctgcgtgcaggtgaaggaccgctgcgccccggtcatgtccgccttcggcttcccctggcccgacatgcttgagtgcgaccgtttcccccaggacaacgacctttgcatccccctcgctagcagcgaccacctcctgccagccaccgaggaagctccaaaggtatgtgaagcctgcaaaaataaaaatgatgatgacaacgacataatggaaacgctttgtaaaaatgattttgcactgaaaataaaagtgaaggagataacctacatcaaccgagataccaaaatcatcctggagaccaagagcaagaccatttacaagctgaacggtgtgtccgaaagggacctgaagaaatcggtgctgtggctcaaagacagcttgcagtgcacctgtgaggagatgaacgacatcaacgcgccctatctggtcatgggacagaaacagggtggggagctggtgatcacctcggtgaagcggtggcagaaggggcagagagagttcaagcgcatctcccgcagcatccgcaagctgcagtgctagtcccggcatcctgatggctccgacaggcctgctccagagcacggctgaccttttctgctccgggatctcagctcccgttccccaagcacactcctagctgctccagtctcagcctgggcagcttccccctgccttttgcacgtttgcatccccaacatttcctgagttatagggccacaggagtggaataactgttttcccctaaagggaaaagcccaccgaatcttgtagatatattcaaac

SEQ ID NO: 185558 - DNA, 1223 bp, Homo Sapiens
ctttgtacaaaaaagttggcaacgacataacggaaacgctttgtaaaaatgattttgcactgaaaataaaagtgaaggagataacctacatcaaccgagataccaaaatcatcctggagaccaagagcaagaccatttacaagctgaacggtgtgtccgaaagggacctgaagaaatcggtgctgtggctcaaagacagcttgcagtgcacctgtgaggagatgaacgacatcaacgcgccctatctggtcatgggacagaaacagggtggggagctggtgatcacctcggtgaagcggtggcagaaggggcagagagagttcaagcgcatctcccgcagcatccgcaagctgcagtgctagtcccggcatcctgatggctccgacaggcctgctccagagcacggctgaccatttctgctccgggatctcagctcccgttccccaagcacactcctagctgctccagtctcagcctgggcagcttccccctgccttttgcacgtttgcatccccagcatttcctgagttataaggccacaggagtggatagctgttttcacctaaaggaaaagcccacccgaatcttgtagaaatattcaaactaataaaatcatgaatatttttatgaagtttaaaaatagctcactttaaagctagttttgaataggtgcaactgtgacttgggtctggttggttgttgtttgttgttttgagtcagctgattttcacttcccactgaggttgtcataacatgcaaattgcttcaattttctctgtggcccaaacttgtgggtcacaaaccctgttgagataaagctggctgttatctcaacatcttcatcagctccagactgagactcagtgtctaagtcttacaacaattcatcattttataccttcaatgggaacttaaactgttacatgtatcacattccagctacaatacttccatttattagaagcacattaaccatttctatagcatgatttcttcaagtaaaaggcaaaagatataaattttataattgacttgagtactttaagccttgtttaaaacatttcttacttaacttttgcaaattaaacccattgtagcttacctgtaatatacatagtagtttacctttaaaagttgtaaaaatattgctttaaccaacactgtaaatatttcagataaacattatattcttgtatataaactttacatcctgttttacctaa

SEQ ID NO: 185559 - DNA, 893 bp, Homo Sapiens
ctttgtacaaaaaagttggggctcattctgctcccccgggtcggagccccccggagctgcgcgcgggcttgcagcgcctcgcccgcgctgtcctcccggtgtcccgcttctccgcgccccagccgccggctgccagcttttcggggccccgagtcgcacccagcgaagagagcgggcccgggacaagctcgaactccggccgcctcgcccttccccggctccgctccctctgccccctcggggtcgcgcgcccacgatgctgcagggccctggctcgctgctgctgctcttcctcgcctcgcactgctgcctgggctcggcgcgcgggctcttcctctttggccagcccgacttctcctacaagcgcagcaattgcaagcccatcccggccaacctgcagctgtgccacggcatcgaataccagaacatgcggctgcccaacctgctgggccacgagaccatgaaggaggtgctggagcaggccggcgcttggatcccgctggtcatgaagcagtgccacccggacaccaagaagttcctgtgctcgctcttcgcccccgtctgcctcgatgacctagacgagaccatccagccatgccactcgctctgcgtgcaggtgaaggaccgctgcgccccggtcatgtccgccttcggcttcccctggcccgacatgcttgagtgcgaccgtttcccccaggacaacgacctttgcatccccctcgctagcagcgaccacctcctgccagccaccgaggaagctccaaaggtatgtgaagcctgcaaaataaaaatgatgatgacaacgacataatggaaacgctttgtaaaaatgattttgcactgaaaataaaagtgaaggagataacctacatcaaccgagataccaaaatcat

SEQ ID NO: 185560 - DNA, 923 bp, Homo Sapiens
  misc_feature (164)..(172): n is a, c, g, or t
tttgtacaaaaaagttgggaatgatttctgcgggggagtggggagaaagatgaaagaggtcttatttgtattctgaatcagcaattatattccctgtgattatttggaagagtgtgtaggaaagacgtttttccagttcaaaatgccttatacaatcaagaggnnnnnnnnnttacacaatttcaggcaagctacgttttcctttgtttcatctgcttcctctctcaccaccccatctccctctcttccccagcaagatgtcaattaagcagtgtgaattctgactgcaataggcaccagtgcccaacacatacagccccaccatcatccccttctcattttataaacctcaaagtggattcactttctgatagttaacccccataaatgtgcacgtacctgtgtcttatctatattttaacctgggagactgttgtcctggcatggagatgaccatgatgctggggttacctcacagtccccaccctttcaaagttgacatatggccatcccattggccagaatccacagacacacctaagcctgtggcactgggacagaatagattttccatttgagaggcacttcctgtgtcagtcttgtttgaaggaggtggtgatggtggatagaggtgaaggaggtagggagtgccctccaagtgcaaaaataacaaatatgattattgaccatcggggaattctcacacattgatttgttttttaagcaattgccagaaacccccttttttagcttttgcttggggtgggggtaggagttaaggtttattcaatcctgtcctgggtagggcgaaagttaatctagccatgtgatttttcagaaaagtaagtggaacatgctgccacttttcaattctgtcagtgcttccacatggaaacaaaatgcaataaaatttttccaaaacc

SEQ ID NO: 185561 - DNA, 2874 bp, Homo Sapiens
  misc_feature (224)..(269): n is a, c, g, or t
  misc_feature (1880)..(1892): n is a, c, g, or t
  misc_feature (2367)..(2375): n is a, c, g, or t
  misc_feature (2626)..(2635): n is a, c, g, or t
  misc_feature (2666)..(2686): n is a, c, g, or t
ccagaaacaagtgctaagattatttgttaatacagtgtttaatcatacttttaaatattaacaataaactgattttattaaaatttatagaaagctttctagtaacagcattataaggtcacagcttttgttaatctgtgttatgtagaattcttttaaaagaatttgatgttttgatgactttttaaatggttagtgtacatatatatttcctaagctgatgnnnnnnnnnnnnnnnnnnnnnnnnnnnnnnnnnnnnnnnnnnnnnnctgtcttcacagtcacaaactcgcagaaccccaagtctttcgagtctcaattcccaggattccagtattgaaatttcaaagcttactgataaggtgcaggccgagtatagagatgcctatagagaatacattgctcagatgtcccagttagaagggggccccgggtctacaaccattagtggcagatcttctccacatagcacatattacatgggtcagagttcatcagggggctctattcattcaaacctagagcaagaaaaggggaaggatagtgaaccaaagcccgatgatgggaggaagtcctttctaatgaagaggggagatgttatcgattattcatcatcaggggtttccaccaacgatgcttcccccctggatcctatcactgaagaagatgaaaaatcagatcagtcaggcagtaagcttctcccaggcaagaaatcttccgaaaggtcaagcctcttccagacagatttgaagcttaagggaagtgggctgcgctatcaaaaactcccaagtgacgaggatgaatctggcacagaagaatcagataacactccactgctcaaagatgacaaagacagaaaagccgaagggaaagtagagagagtgccgaagtctccagaacacagtgctgagccgatcagaaccttcattaaagccaaagagtatttatcggatgcgctccttgacaaaaaggattcatcggattcaggagtgagatccagtgaaagttctcccaatcactctctgcacaatgaagtggcggatgactcccagcttgaaaaggcaaatctcatagagctggaagatgacagtcacagcggaaagcggggaatcccacatagcctgagtggcctgcaagatccaattatagctcggatgtccatttgttcagaagacaagaaaagcccttccgaatgcagcttgatagccagcagccctgaagaaaactggcctgcatgccagaaagcctacaacctgaaccgaactcccagcaccgtgactctgaacaacaatagtgctccagccaacagagccaatcaaaatttcgatgagatggagggaattagggagacttctcaagtcattttgaggcctagttccagtcccaacccaaccactattcagaatgagaatctaaaaagcatgacacataagcgaagccaacgttcaagttacacaaggctctccaaagatcctccggagctccatgcagcagcctcttctgagagcacaggctttggagaagaaagagaaagcattctttgagaaaaacaagcaaaggagaagagtgttactgtacccttatgacagaattgtcctggattttgactccatccacgcccatcacctttctacattttgctgacagataactaaccgatgatgaggccgaggtaaaagagacatctgcagtgtgacagaagggagcatgagaagcatggctcaccagccagcctctgtggtctttgtaattagaagcttcagaactcactaatactactgtacctttcattggcgcattaccccataaaactttttgagacgaggtgagatctgagtataaagataggtcagaagtattttaaagggcttaatgtgccnnnnnnnnnnnnngctagagaccctttttgcaaacatttggtgaccacacatttgagggaagacgtggcgttaggtgaagcagaagcaaaccctgctcttaggggctcacctaggtgagtgcacagcctgtgacgctacagggagaggctgagtaaaccgagatccagcgttctgtatggcaggggtattgcttatcacagaggttctgaagagtaggaagtacataatgaagagggctttaaaaattgccaacaaagtgagtcaccagggctggcagtagtgtgacggggctgtcctgagctgttaggagagtagatgcggggagggctggtgacctccgtgggtttatatgtcggaaactcttctctccaaatcccaggcctggcttccagcaccatccagctgtgcccaagaagccaccctggtctgttctccaactcttttaaatggtgcccaacttttctaagtgagcttagcaatgagaagnnnnnnnnncatgaattctttttctggaaaatcagggagacatgggtaataataggtactaataaatatttatagatgagtgaatgaggaaataattacatcaaaaaggtcagtgacaattgataaatgacaaggaaatatttaattaggtaaaactaaatcattgctctctatactaggatagactttatctacttcatctgttcctaagtcagcatgttagttctggggaaggatcataagaaaggaaatactttttnnnnnnnnnntttggaaacatgtaacaaagcaagggtaaannnnnnnnnnnnnnnnnnnnnagtgctgtgactgtaaaagtgtactttccattaattattagccgagttaagagaatggtcacattgaagtactgtgtggactagaaatgtaccctgtcatcatgcaatgaaatattgttatcgttttaacatagctcatttatgtagaatgaattctggtggtttaccccaagtcacagttaggacgg

SEQ ID NO: 185562 - DNA, 2214 bp, Homo Sapiens
  misc_feature (2036)..(2045): n is a, c, g, or t
ttgggctgaggatgcttcactggcccccctggaaagccagcccatcaccttcacccctgaggagatggagaagtacagcaagctccagcaggctgctcagcaacacatccagcagcagcttctggccaagcaagtaaaggcctttccagcctcagctgccctggccccagccacaccagccctgcaacccatccacattcagcagccagctacagcctctgccacctccatcacaactgttcagcatgccatcctacaacatcatgctgccgcagctgctgccgccatcggcattcaccctcacccccatccccaaccacttgcccaggtgcatcatattccccagcctcatctgacccccatttctttgtcccacctcactcactcaatcatccctggccaccctgccacctttctcgctagccatcccatccacatcattcccgcctcagccatccatcctgggcccttcacctttcaccctgtcccacatgctgccctctaccccaccctacttgctccacggcctgctgcagcagctgccactgcacttcaccttcacccactacttcaccccatcttctcaggtcaggacctgcaacatccccccagccatggcacgtgagttgggggatgggatcctaggtagggccaggggaggagacccataaatgttcccttgggggtgttgagccattaataccagcaagtagaagctgggatgggcagtgtctgacagccaaagaattgagttttggcttgcacgggtgggtttagatttgaagtttgctttcagtttactatcagggatttctttttcctgtcctcctctcaatttgtccctccctcttctgtgtttctaagctagggaacaccagtaagtgctacccacccctctgcagcaacatctccaaactgtcaagtttagataatcccctcctccctctgcttttttcctctgctcttcccttctgtaaattttaaaacattttcctcccctctggccagtgggttgtcaccagagcacttgctgtgggcccatctggtcttgccttctcagcgccacagggaaggccaagctgttctagtggtggaagtgccaccattttggggtagtatctttgaccatctttggtgacgttacgttatcccaggtgaggtggaaagcgtctcacctggaacctgatataactcaggctgcaattccatccagttcccacatcaacggagccacacatttggcactgttatcttggtatccctcatcccagaagaggcatctccatatcccagaaaagaagatcctatcatgaataaaagctgtatggcccagagaggagctcatgtgtctaaagtgaagggtatattttcttctgttgtgttgatgtttccttcttaatttataggatttttttaatgtaaaaaattgcactgaactctataaacgtaaatgctgctttttgtagctcatataaaaaaggttccatatttgtagtatactgcaataatattttttacatccagctctttaagtgatcctcgttctggtggctttgtgtaaatatgtttgccctagttgaattaagaaactctaaaggttataaaatgaaaacaaaaaataaaatatttgttttctgctagatgcaaaactgactaagcatgtatattttaccaaacttatgtattttttgaagttatgaactataaaatgttaaaacattttttgctgggacaaaatgttaagtaatttgcagtatgtagtgcccccagtattgggatttttgagctaatgggcagcagtcagctgggggcttctgagggatgctcatctttaacagtctccctcatgtacttttgctgttttacacagagaaacaggtagaccccacagaggagaaggaggggattcaacagctttattgtctggaagcagtgagatttggtgattgtctggggggattcctgggtttccctgggtaccttgttccaggcagtcagtccatttgccttcctagtacttagccccctctgacaannnnnnnnnnaatgtgcctttttgggttggtagaaacggaagtagaagtaggctggaggatgagttgggacagtcttccttttgttgggaggtgagcacatttacagatattttgcttcatagtttccatgccctctgcccagctcagtttagacagtaaacgttcccttgtttctttt

SEQ ID NO: 185563 - DNA, 1136 bp, Homo Sapiens
tttgtacaaaaaagttggcagacatgcctataaatgggaggatgagagtgataggtgggcaaggggctgtgagagggactaattagccttcatatatcctaatcccccatttttgtatctcatggtcatccctgtagaccggacaggaacatgagcttatcgagagcatgcccctgttggaatggtttgctaacaactataaaaaatttggagctacgttggaaattgtcacagataaatcacaagaagggtctcagtttgtgaaaggatttggtggaattggaggtatcttgcggtaccgagtagatttccagggaatggaataccaaggaggagacgatgaattttttgaccttgatgactactaggtagtcgacatgggtccggcaaaacgtgcctcaccctccagcatccaacccaaggagcatacccatggtggaatccaaacagatccctgccttacaattggaacatttccagaacttaatccatgagcattggatattgaaaagaaaaccgaaacaaaaccagacccagccctacactttggtttgtcatggtgtcagcgcagcagcctacaactaagttcctaaacgccactttggactaatttaaaaaagaatcccagtttttacttttactggatggtgaaattggttgctcttgtattttatgaaaaaaaatgatttttttaaccttcatacatagaagcaaaaatactttaactgctgtaaaccttcaaaagttaatagaagtgagatcatactggtttgtttcttattttgattggagaaaaattaaattgctgcatttcgcagtgacccatttacatggcatttctcagcttagactgcgtaagaagaaatatatgtggtgaaatgttggaaccattttctctcttggtctctgtttaatgttgaaagggtgagctaataagaaggcactttcaacttcactccctcacgctaccccgtcccccctccagactggcagtttcaaagatgcaaattgcattgcaaatcaaactgactcatgaagcatttgggcccagtgcactgttttacttccatctgtttcaagacacatatttgccccgccgttgggaaccccttgtatcaagatctgaccagggtccc

SEQ ID NO: 185564 - DNA, 1661 bp, Homo Sapiens
caggactgggcccttagggaggaggaggcgagaagatggcggacgaccccagtgctgccgacaggaacgtggagatctggaagatcaagaagctcattaagagcttggaggcggcccgcggcaatggcaccagcatgatatcattgatcattcctcccaaagaccagatttcacgagtggcaaaaatgttagcggatgagtttggaactgcatctaacattaagtcacgagtaaaccgcctttcagtcctgggagccattacatctgtacaacaaagactcaaactttataacaaagtacctccaaatggtctggttgtatactgtggaacaattgtaacagaagaaggaaaggaaaagaaagtcaacattgactttgaacctttcaaaccaattaatacgtcattgtatttgtgtgacaacaaattccatacagaggctcttacagcactactttcagatgatagcaagtttggattcattgtaatagatggtagtggtgcactttttggcacactccaaggaaacacaagagaagtcctgcacaaattcactgtggatctcccaaagaaacacggtagaggaggtcagtcagccttgcgttttgcccgtttaagaatggaaaagcgacataactatgttcggaaagtagcagagactgctgtgcagctgtttatttctggggacaaagtgaatgtggctggtctagttttagctggatccgctgactttaaaactgaactaagtcaatctgatatgtttgatcagaggttacaatcaaaagttttaaaattagttgatatatcctatggtggtgaaaatggattcaaccaagctattgagttatctactgaagtcctctccaacgtgaaattcattcaagagaagaaattaataggacgatactttgatgaaatcagccaggacacgggcaagtactgttttggcgttgaagatacactaaaggctttggaaatgggagctgtagaaattctaatagtctatgaaaatctggatataatgagatatgttcttcattgccaaggcacagaagaggagaaaattctctatctaactccagagcaagaaaaggataaatctcatttcacagacaaagagaccggacaggaacatgagcttatcgagagcatgcccctgttggaatggtttgctaacaactataaaaaatttggagctacgttggaaattgtcacagataaatcacaagaagggtctcagtttgtgaaaggatttggtggaattggaggtatcttgcggtaccgagtagatttccagggaatggaataccaaggaggagacgatgaattttttgaccttgatgactactaggtagtcgacatgggtccggcaaaacgtgcctcaccctccagcatccaacccaaggagcatacccatggtggaatccaaacagatccctgccttacaattggaacatttccagaacttaatccatgagcattggatattgaaagaaaaccgaaacaaaaccagacccagccctacactttggtttgtcatggtgtcagcgcagcagccctacaactaagttcctaaaacgccactttgggactaatttaaaaaaggattcccagtttttacttttactgggatggtgaaatttggttgctcttgtattttatg

SEQ ID NO: 185565 - DNA, 2079 bp, Homo Sapiens
ttgggtctttgacaaaagccttgaggagacaatcatccagaaagccatctcaggcttcaggaagtgcgccatgatctccgcccactatggcctcagcgatgtgtttgacaatctcatcatctctctatgcaaattcacagctctcagcagtgagtctattgagaacctgcccagtgtatttggaagcaaccctaaagcccatattgcagccaagacagtattccatttggcccatcgtcatggtgacatcctgcgggagggctggaagaatatcatggaggccatgctgcagctcttccgagcccaactactgcccaaggctatgatagaggtagaagatttcgtggatcccaatggcaagatctctctacagcgggaagagacaccatcaaaccgaggagagtcaacagtgctgagctttgtgagctggctaacactgagtggtcctgagcagtctagtgttcggggcccatccactgaaaaccaagaggccaagagagtggccttagagtgtataaagcaatgtgacccagaaaaaatgatcacagaaagcaagttcctccagctggagtcactacaggagctcatgaaggctctggtctcagtgacaccagatgaagagacatatgatgaggaagatgctgctttctgcctagagatgctgctaaggattgtgttggagaacagggatcgtgtgggctgtgtgtggcagactgttcgagaccatctataccacctctgtgttcaggcacaagatttctgcttccttgtggagcgggcagtggtggggttgctacgcctggccattcggcttctccggagagaagagatcagtgctcaggtgctgctctccctgcgcattttgctactgatgaagcccagtgtgctatcccgagtcagccaccaggttgcgtatgggctccatgaactcctgaagaccaatgcagccaacatccactcaggtgatgactgggccacactcttcacactgctggagtgcatcggctcaggtgtgaagcctccagctgctctgcaggccacagccagggcagatgcacctgatgccggggcccagtcagatagtgagctcccatcctaccatcagaatgacgtgagcctggatcgagggtacacttccgactcagaggtctacactgaccatggcaggccgggcaagatacaccgatcagccacagatgccgatgtggtcaacagtggttggttagtggttgggaaggatgacgttgataactccaagccagggcccagccgcccaggcccttcacccctgatcaatcaatacagcctaacagtgggactggatttggggccacacgacactaagtctctgcttaagtgtgtggaatcgctgtccttcatcgtgcgtgatgctgcccacatcacacctgacaactttgagctctgcgtcaagactctccggatctttgtggaggccagtctgaatggcggatgcaagtcccaggagaaacgtggcaagagtcacaaatatgacagcaaagggaaccgcttcaagaagaaatccaaagagggatcaatgcttcgccggcctcgaacctccagccaacatgcctctcggggcgggcagagtgatgatgatgaggacgaaggcgtgcctgccagctaccatacggtgtctttacaggtcagtcaggacttgctagacctgatgcacaccctgcacacgcgggcagcctctatctacagctcatgggcggaggagcaacgccacctggagacaggtggccagaagattgaagctgattctcgcaccctctgggcccactgctggtgccctttactgcagggtattgcctgcctgtgctgcgatgcccggcgccaggtacggatgcaggcactgacctatctgcagcgagcactacttgtacatgatctgcaaaagctagatgccctggaatgggagtcctgttttaacaagtgctgtttcctctacttaccaagctcttggagaacatcagccctgcagatgtgggtgggatggaggagacccggatgagggcttccacattgctctctaagtcttcctgcagcacctgtctc

SEQ ID NO: 185566 - DNA, 1159 bp, Homo Sapiens
ttgggaaggacttgccctttcccccttggtagctacctccctttaccatactccccccatgccctctttcctattctcatggtcccactgccacctgcagtcagaggcgatccctgagtctctgaagaacatgcttctggtgatggacacagcggagattttccacagtgcagatgcacggggaggcggcccctcggccctctgggagatcacctggtggcgcattgactgttttctccctcacctacgagatgaactcttcaagcagaccgtcatccaggaccccatgcccatggagcctcaaggccaaaagcctctcgcctcagcccacctgacttccgctgctggcgacactaggacacctggccatccaccgcccccagagattccatctgagctgggggcctgtgactttgagaagcccgagagcccccgagccgccagcagcagctccccaggatcaccagtggcctcaagccccagcaggctgagccccacccccgacgggcctccacccttggctcagcccccactgatcctgcagcccttggcctccccactgcaggtgggcgtgccacctatgactctgcccatcatcctcaaccctgcgctcatcgaggccacctcaccagtgcccctcctggccacaccccgccccacagatcccatacccacctctgaggtcaactaaggcaggtcactcagagatcaggaccagtgcttcccaccaggctttccttgaccccacttctggctgtcctgcgggccacaagctcttcaggccaagtcagagctgctgttgctgccacttggatggggacctgaaaaagagaatgttgatagccccagctaagacccccaatcagctgtgggacctttttcctcctctgcgctccattcctgggggttcagcctgagagtgaactcagctgtcatctgcagcctctgcctccagcccggcagctctggggaggcatccgtgtgccggccctgcagtgcctgcccacggtcaggcattgaaaactaagcccaaccactctgcactttgtttcccactcccattagccctgggccacctcctccagttcttcctcttttactaattagttggtcagtttggagagttgactggcaccatggaagggtaggcagtgggggg

SEQ ID NO: 185567 - DNA, 1387 bp, Homo Sapiens
ttgggcgggagcccggccggagctgggtctggagacgccgtggcagcctgaacggagtgtgcgacggattgggaggtttgtctacagattttgagcgttcgaagttgacccctgactaagtatactttgctgctccctcagcctttgaaaaaatgtctgtcacatatgatgattccgttggagtagaagtgtccagcgacagcttctgggaggtcgggaactacaagcggactgtgaagcggatcgacgatggccaccgcctgtgcagcgacctcatgaactgcctgcatgagcgggcgcgcatcgagaaggcgtatgcgcagcagctcactgagtgggcccggcgctggaggcagcttgtggagaaagggccccagtacgggaccgtggagaaggcctggatggccttcatgtccgaggcagagagggtgagcgagctgcacctcgaggtgaaggcctcactgatgaacgatgacttcgagaagatcaagaactggcagaaggaagcctttcacaagcagatgatgggcggcttcaaggagaccaaggaagctgaggacggctttcggaaggcacagaagccctgggccaagaagctgaaagaggtagaagcagcaaagaaagcccaccatgcagcgtgcaaagaggagaagctggctatctcacgagaagccaacagcaaggcagacccatccctcaaccctgaacagctcaagaaattgcaagacaaaatagaaaagtgcaagcaagatgttcttaagaccaaagagaagtatgagaagtccctgaaggaactcgaccagggcacaccccagtacatggagaacatggagcaggtgtttgagcagtgccagcagttcgaggagaaacgccttcgcttcttccgggaggttctgctggaggttcagaagcacctagacctgtccaatgtggctggctacaaagccatttaccatgacctggagcagagcatcagagcagctgatgcagtggaggacctgaggtggttccgagccaatcacgggccgggcatggccatgaactggccgcagtttgaggagtggtccgcagacctgaatcgaaccctcagccggagagagaagaagaaggccactgacggcgtcaccctgacgggcatcaaccagacaggcgaccagtctctgccgagtaagcccagcagcacccttaatgtcccgagcaaccccgcccagtctgcgcagtcacagtccagctacaaccccttcgaggatgaggacgacacgggcagcaccgtcagtgagaagacgacactaagccaaaaatgtgagcagctacgagaagacccagagctatcccaccgactggtcagacgatgagtctaacaaccccttctcctcacggatgccaa

SEQ ID NO: 185568 - DNA, 2090 bp, Homo Sapiens
  misc_feature (1125)..(1133): n is a, c, g, or t
  misc_feature (1769)..(1826): n is a, c, g, or t
ttggcccacaacctatgaccccctctcatggtaggccagggactgggctttctccccactaagggcaaggccccagttttgaccaatcgcatggttctcctggcaggcctgctgtgtgccaaaaactcccacccaaggtccctcaggggatatttcactgaagaaccagttagaagtagaaacagctgtggggcttgggcccagcttaggagattgcccagatggcaagaggtcctgggctccttcttgaggggctgcctggcccgctccatcctactcccactaactacacctcagggcgggtgaggttccgacactgatcccagagatgccgtggatacgccagggtcccagggggaatctccccaagctcacactctctcccgcttatcgcctattctcacacctcttctcggtcccatcttctgcacccattgcccagtcttgctttctctttcccatattccttttctttttctcttgtgccaaactgacagaaaccgtcaccacactggtctttttctttaatgtctcattccccttgaggccagctgctatgccaggtggtgtctctgccaggctcctcaggcccagacagaggccagcccacaacctatgaccccctcccccaggacaccacctcccacccacagaccttccctttagctgttgacacaacttcccagctctgcaagtgtgccccctggatcaaggcgggtcccctcttgtttttttctttgctgccacgaggtggtccaagccttcagggtgggctcctatcaggctgggtgtgcgagtgtccatctgtccacatggatgtcgagggtggtttgtgtggagctgtgctcgtcagctgggtctgccctcttcccccttttctccttcttctctcctcatggactttttctgcaattgcagtcttaagcttcactctccaccacctggatggcatggcgcctgccaccaaacatcttcctggcctgcgctctgccctgccctgcctagcctctgctactcccacttcccaactccagggaatgcattacttttatttcaaaccctctgcctccttccttctttctcttcaaccccctccccaccttcaccttctcaaaaatggaaggnnnnnnnnnctgtgaatggggaatgctgactgacaaaccaacacaactttcagaggcttcagtgtctgttctctggacatttcttttcacctcctgagcaccaaagtcgcagggccagttgcaggccgctgattgccatgttgatttttaacctgatattctttttaattgttttaaatttttcataggggagttttggacaaaacagtcactggggagatcactgccatttttacacacttgacttttaaaaatacaacccacccaaccacaccactttcttatacatttgggacatgatcagagtttaaaagggaaccaacaaaacactataacttaaaaggatggggttttggattttgtataataataaaaacaatacagcatatggctagggaaggacatggtgtatataattgtaaaatactgttctaaattattcaggcctatagtttccattactggagtcctccattgtgtggccacacagtgtcgttgatttaaaggagccagtgcttcccctctccccaggtagttggtcagctgtggactctgtgacctttgtctaaacctgtgttgtaagatcttgggacttcctctctttctatgtctatctcttccccccaacactttctcttcttagtnnnnnnnnnnnnnnnnnnnnnnnnnnnnnnnnnnnnnnnnnnnnnnnnnnnnnnnnnnaaaatgctcttttagaacgggaaacggctcagatcctgctgtggcacggggcctatgtgtctctgtcgcgtctgctgtgaagcacatgatgctctatttattgtagagagtgactttatttgctttctagaattgtttataacagatggtataagagaggtaataaacagagaaaaatctatgcttgtaaagaatacaaaagttaattttacctactataatatgactgtctgaaacttatttttctctctgagaataaatgtt

SEQ ID NO: 185569 - DNA, 1217 bp, Homo Sapiens
  misc_feature (240)..(249): n is a, c, g, or t
ttggctcctcatggactttttctgcaattgcagtcttaagcttcactctccaccacctggatggcatggcgcctgccaccaaacatcttcctggcctgcgctctgccctgccctgcctagcctctgctactcccacttcccaactccagggaatgcattacttttatttcaaaccctctgcctccttccttctttctcttcaaccccctccccaccttcaccttctcaaaaatggaaggnnnnnnnnnnctgtgaatggggaatgctgactgacaaaccaacacaactttcagaggcttcagtgtctgttctctggacatttcttttcacctcctgagcaccaaagtcgcagggccagttgcaggccgctgattgccatgttgatttttaacctgatattctttttaattgttttaaatttttcataggggagttttggacaaaacagtcactggggagatcactgccatttttacacacttgactttttaaaaatacaaccaaccaaccaccacaacttcttatacatttgggacatgagccagagtttaaaagggaaccaacaaaacactataacttaaaaggatggggttttggattttgtataataataaaaacaatacagcatatggctagggaaggacatggtgtatataattgtaaaatactgttctaaattattcaggcctatagtttccattactggagtcctccattgtgtggccacacagtgtcgttgatttaaaggagccagtgcttcccctctccccaggtagttggtcagctgtggactctgtgacctttgtctaaacctgtgttgtaagatcttgggacttcctctctttctatgtctatctcttccccccaacactttctcttcttagtctctctctttatttttcaatctctgaatattttagtctctctctgagtctcattttttaaaatgctcttttagaacgggaaacggctcagatcctgctgtggcacggggcctatgtgtctctgtcgcgtctgctgtgaagcacatgatgctctatttattgtagagagtgactttatttgctttctagaattgtttataacagatggtataagagaggtaataaacagagaaaaatctatgcttgtaaagaatacaaaagttaattttacctactataatatgactgtctgaaacttattttctctctgagaaataaatgttctaatggggc

SEQ ID NO: 185570 - DNA, 1363 bp, Homo Sapiens
ttggcggagacctggagcccttggagctggtgtgggccaagtgccgaggctacccctcctaccctgccttgatcatcgatcccaagatgccccgggagggcctcctgcacaatggcgttcccatccctgtccccccgctggacgtgctgaagctgggagagcagaaacaggcagaggctggagagaagctcttccttgtcctcttctttgacaacaagcgcacctggcagtggcttccaagggacaaagtcctgcccttgggtgtggaagacaccgtggacaagctcaagatgctggaaggccgcaagaccagcatccgcaagtcagtgcaggtggcctatgaccgtgcgatgatccacctgagcagagtccgggggccccactccttcgtcacttccagctacctgtaagggcagggctgggcctgcatccgcttgccctgcctccatcccgcagggcacagagaagcctcttctgcccctgccagatgtatggccggcagcttccccctctcatggtaggccagggactgggctttctccccactaagggcaaggccccagttttgaccaatcgcatggttctcctggcaggcctgctctgtgccaaaaactcccacccaaggtccctcaggggatatttcactgaagaaccagttagaagtagaaacagctgtggggcttgggcccagcttaggagattgcccagatggcaagaggtcctgggctccttcttgaggggctgcctggcccgctccatcctactcccactaactacacctcagggcgggtgaggttccgacactgatcccagagatgccgtggatacgccagggtcccagggggaatctccccaagctcacactctctcccgcttatcgcctattctcacacctcttctcggtcccatcttctgcacccattgcccagtcttgctttctctttcccatattccttttctttttctcttgtgccaaactgacagaaaccgtcaccacactggtctttttctttaatgtctcattccccttgaggccagctgctatgccaggtggtgtctctgccaggctcctcaggcccagacagaggccagcccacaacctatgaccccctcccccaggacaccacctcccacccacagaccttccctttagctgttgacacaacttcccagctctgcaagtgtgccccctggatcaagcgggtcccctcttgtttttttctttgctgccacgaagtggtccaagccttcaaggtgggctcctatcagctgggtgtgcgagtgtccatctgtccacatggatgtcgagagtggtttgtgtgaagctgtgctcgtcagcttgggtctgccctcttcccctttt

SEQ ID NO: 185571 - DNA, 1297 bp, Homo Sapiens
ctttgtacaaaaaagttggcgctgcggcccaagaaaacgagtgtgagcgtggggcccagcccctgctgggactgcactgcgggcgggcctgggggtgggcagggcagagccccatggagctctcagggctgccccagcctgggcctctcttgcagatttcgactgggtctgggatgacttaaataagtcatcagccaccctgctgagctgtgacaaccgtaaggtcagcttccacatggagtacagctgcggcacagcggccatccggggcaccaaggagctgggggagggccagcacttctgggagatcaagatgacctctcccgtctacggcaccgacatgatggtgggcatcgggacgtcggatgtggacctggacaaataccgccacacgttctgcagcctgctgggcagggatgaggacagctggggcctctcctacacgggcctcctccaccacaagggcgacaagaccagcttctcgtcgcggttcggccagggctccatcattggcgtgcacctggacacctggcacggcacactcacctttttcaagaacaggaagtgtataggtgtggcagccaccaagctgcagaacaagagattctacccgatggtgtgctccacggcggcccggagcagcatgaaggtcacccgctcctgtgccagcgccacttccctccagtacctgtgctgccaccgcctgcgccagctgcggccagactcgggagacacgctggagggtctgccgctgccgccgggcctcaagcaggtgctacacaacaagctgggctgggtcctgagcatgagttgcagccgccgcaaggctccagtgtccgatccccaggcagcgacctccgcccaccccagcagtcgcgagcctcggccctgccagaggaagcgctgccgccggacctgactgacttcccagtggaactgccttcttgggctgggacagcccctttcctctgtcccttctttctctgtcccttccttccagccacactccagggcggagtttggatgaggcccgtccggagggagccatctcttgctcccgaggctgggacagtcctttctgtgggggctctagggcccctctgctgctgtgctgggtggggaagcggctgccctgagccccaggtcttgtgggaggctgcgaggacgagagcctggctggagcccgcgttgctgttcccacagggcctcggtttttcctaacttgctctgcatgctgtcagcggctgccccgccgtcatagacttaaaggactgccataaatgtagagttgatgtct

SEQ ID NO: 185572 - DNA, 1238 bp, Homo Sapiens
ttggtgttgtttggattttattatttcctaagttcttgctttggcttctggtcctgaactgggacagctgacatttcttggcttggtgggaatcattgatccacctagaactggtgtgaaagaagctgttacaacactcattgcctcaggagtatcaataaaaatgattactggagattcacaggagactgcagttgcaatcgccagtcgtctgggattgtattccaaaacttcccagtcagtctcaggagaagaaatagatgcaatggatgttcagcagctttcacaaatagtaccaaaggttgcagtattttacagagctagcccaaggcacaagatgaaaattattaagtcgctacagaagaacggttcagttgtagccatgacaggagatggagtaaatgatgcagttgctctgaaggctgcagacattggagttgcgatgggccagactggtacagatgtttgcaaagaggcagcagacatgatcctagtggatgatgattttcaaaccataatgtctgcaatcgaagagggtaaagggatttataataacattaaaaatttcgttagattccagctgagcacgagtatagcagcattaactttaatctcattggctacattaatgaactttcctaatcctctcaatgccatgcagattttgtggatcaatattattatggatggacccccagctcagagccttggagtagaaccagtggataaagatgtcattcgtaaacctcctcgcaactggaaagacagcattttgactaaaaacttgatacttaaaatacttgtttcatcaataatcattgtttgtgggactttgtttgtcttctggcgtgagctacgagacaatgtgattacacctcgagacacaacaatgaccttcacatgctttgtgttttttgacatgttcaatgcactaagttccagatcccagaccaagtctgtgtttgagattggactctgcagtaatagaatgttttgctatgcagttcttggatccatcatgggacaattactagttatttactttcctccgcttcagaaggtttttcagactgagagcctaagcatactggatctgttgtttcttttgggtctcacctcatcagtgtgcatagtggcagaaattataaagaaggttgaaaggagcagggaaaagatcccagaaccatgtctggctctggggagaggagtggacagcagctgggttgagatacatcccc

SEQ ID NO: 185573 - DNA, 1660 bp, Homo Sapiens
ttgggtttcaccaggaactctacccaaaagaggaaacagcaaggagaacatttgctttgtttgtaggagggaagtggtcgagctacaaacaaatctttaggcatctgaggaattgctaagtttctaatttcatatggttgctgacaaggaggtgcagacaaggaccctcttgctttcctcactatggatagtctgttgcctccatctagattctcttatttcaaaaaatatcctctccatgcaattaggagatatttatcgacgctgagaaaccaaagagccgaagaacaggttgcacgttttcaaaaaatacctaatggtgaaaatgagacaatgattcctgtattgacatcaaaaaaagcaagtgaattaccagtcagtgaagttgcaagcattctccaagctgatcttcagaatggtctaaacaaatgtgaagttagtcataggcgagcctttcatggctggaatgagtttgatattagtgaagatgagccactgtggaagaagtatatttctcagtttaaaaatccccttattatgctgcttctggcttctgcagtcatcagtgttttaatgcatcagtttgatgatgccgtcagtatcactgtggcaatacttatcgttgttacagttgcctttgttcaggaatatcgttcagaaaaatctcttgaagaattgagtaaacttgtgccaccagaatgccattgtgtgcgtgaaggaaaattggagcatacacttgcccgagacttggttccaggtgatacagtttgcctttctgttggggatagagttcctgctgacttacgcttgtttgagctgtggatctttccattgatgagtccagcttgacaggtgagacaacgccttgttctaaggtgacagctcctcagccagctgcaactaatggagatcttgcatcgagaagtaacattgcctttatgggaacactggtcagatgtggcaaagcaaagggtgttgtcattggaacaggagaaaattctgaatttggggaggtttttaaaatgatgcaagcagaagaggcaccaaaaacccctctgcagaagagcatggacctcttaggaaaacaactttccttttactcctttggtataataggaatcatcatgttggttggctggttactgggaaaagatatcctggaaatgtttactattagtgtaagtttggctgtagcagcaattcctgaaggtctccccattgtggtcacagtgacgctagctcttggtgttatgagaatggtgaagaaaagggccattgtgaaaaagctgcctattgttgaaactctgggctgctgtaatgtgatttgttcagataaaactggaacactgacgaagaatgaaatgactgttactcacatatttacttcagatggtctgcatgctgaggttactggagttggctataatcaatttggggaagtgattgttgatggtgatgttgttcatggattctataacccagctgttagcagaattgttgaggcgggctgtgtgtgcaatgatgctgtaattagaaacaatactctaatggggaagccaacagaaggggccttaattgctcttgcaatgaagatgggtcttgatggacttcaacaagactacatcagaaaagctgaatacccttttagctctgagcaaaa

SEQ ID NO: 185574 - DNA, 1866 bp, Homo Sapiens
  misc_feature (1573)..(1588): n is a, c, g, or t
ttggttttattatttcctaagttcttgctttggcttctggtcctgaactgggacagctgacatttcttggcttggtgggaatcattgatccacctagaactggtgtgaaagaagctgttacaacactcattgcctcaggagtatcaataaaaatgattactggagattcacaggagactgcagttgcaatcgccagtcgtctgggattgtattccaaaacttcccagtcagtctcaggagaagaaatagatgcaatggatgttcagcagctttcacaaatagtaccaaagtgtatcttgtattttaacaggttgcagtattttacagagctagcccaaggcacaagatgaaaattattaagtcgctacagaagaacggttcagttgtagccatgacaggagatggagtaaatgatgcagttgctctgaaggctgcagacattggagttgcgatgggccagactggtacagatgtttgcaaagaggcagcagacatgatcctagtggatgatgattttcaaaccataatgtctgcaatcgaagagggtaaagggatttataataacattaaaaatttcgttagattccagctgagcacgagtatagcagcattaactttaatctcattggctacattaatgaactttcctaatcctctcaatgccatgcagattttgtggatcaatattattatggatggacccccagctcagagccttggagtagaaccagtggataaagatgtcattcgtaaacctcctcgcaactggaaagacagcattttgactaaaaacttgatacttaaaatacttgtttcatcaataatcattgtttgtgggactttgtttgtcttctggcgtgagctacgagacaatgtgattacacctcgagacacaacaatgaccttcacatgctttgtgttttttgacatgttcaatgcactaagttccagatcccagaccaagtctgtgtttgagattggactctgcagtaatagaatgttttgctatgcagttcttggatccatcatgggacaattactagttatttactttcctccgcttcagaaggtttttcagactgagagcctaagcatactggatctgttgtttcttttgggtctcacctcatcagtgtgcatagtggcagaaattataaagaaggttgaaaggagcagggaaaagatccagaagcatgttagttcgacatcatcatcttttcttgaagtatgatgcatattgcattattttatttgcaaactaggaattgcagtctgaggatcatttagaagggcaagttcaagaggatatgaagatttgagaactttttaactattcattgactaaaaatgaacattaatgttaaagacttaagactttaacctgctggcagtcccaaatgaaattatgcaactttgatatcatattccttgatttaaattggcttttgtgattgagtgaaactttataaagcatatggtcagttatttaattaaaaaggcaaaacctgaaccaccttctgcacttaaagaagtctaacagtacaaatacactatctatcttagatagatatannnnnnnnnnnnnnnnaaatattgtactatttatggtggtggggctttcttactaatacacaaataaatttaatcatttcaaaggcattctatttggtttagaagttgattcccaggagtgccatatttcagctactgtatttcctttttcttgtaatgtaagcagctcagataccatgtgctatcatttttgtatcaagttttttgcacaggatgtgaccactgtcagatcactgttcttttctttctttttgtgattgaaaagcctatactacaatttgaagtaaatttttg

SEQ ID NO: 185575 - DNA, 609 bp, Homo Sapiens
ctttgtacaaaaaagttggttcaaaggcattctattaaaaggtttagaagttgattcccaggagtgccatatttcagctactgtatttcctttttcttgtaatgtaagcagctcagataccatgtgctatcatttttgtatcaagttttttgcacaggatgtgaccactgtcagatcactgttcttttctttctttttgtgattgaaaagcctatactacaatttgaagtaaatttttgtttttcttagtaagtgtaaatggttgctttatttttattttaaaaaggtatgtctttggtttggcagaattcatgcagggctatcaagtgttgttctagggtaacagtgtccataattaacgcttagtcatagagtcaaaaacatttaagactgattgggttgaagtttataataaattatattaacatgtcttcctttttgaggtaaagatatatactttgtcaaatatcattttgtcatcctctaaatataaatccaaatacctcagctaagtaattctattttattatttttactgttatgtatgtttttaatcatatttcttaggaagtataggctactggacttagaataaaaagtccccaaacc

SEQ ID NO: 185576 - DNA, 1601 bp, Homo Sapiens
ttggcccaggatcacacaagtaagagatggtgaagccagggatacaaatccaggcaatttgatgtcagaacctacattttttaaccactgtgcttaacctggcagctactaggtatccagtaaatgttaactttctcttccttttgagaagtttattttttaggtattgactatattaattttgcgttttattaagctttaagtaacatccaatttaaattttgctgtgagtgctgtttaacctacattttaatactttgtatatgttggttatagtttggctgtagcagcaattcctgaaggtctccccattgtggtcacagtgacgctagctcttggtgttatgagaatggtgaagaaaagggccattgtgaaaaagctgcctattgttgaaactctgggctgctgtaatgtgatttgttcagataaaactggaacactgacgaagaatgaaatgactgttactcacatatttacttcagatggtctgcatgctgaggttactggagttggctataatcaatttggggaagtgattgttgatggtgatgttgttcatggattctataacccagctgttagcagaattgttgaggcgggctgtgtgtgcaatgatgctgtaattagaaacaatactctaatggggaagccaacagaaggggccttaattgctcttgcaatgaagatgggtcttgatggacttcaacaagactacatcagaaaagctgaatacccttttagctctgagcaaaagtggatggctgttaagtgtgtacaccgaacacagcaggacagaccagagatttgttttatgaaaggtgcttacgaacaagtaattaagtactgtactacataccagagcaaagggcagaccttgacacttactcagcagcagagagatgtgtaccaacaagagaaggcacgcatgggctcagcgggactcagagttcttgctttggcttctggtcctgaactgggacagctgacatttcttggcttggtgggaatcattgatccacctagaactggtgtgaaagaagctgttacaacactcattgcctcaggagtatcaataaaaatgattactggagattcacaggagactgcagttgcaatcgccagtcgtctgggattgtattccaaaacttcccagtcagtctcaggagaagaaatagatgcaatggatgttcagcagctttcacaaatagtaccaaaggttgcagtattttacagagctagcccaaggcacaagatgaaaattattaagtcgctacagaagaacggttcagttgtagccatgacaggagatggagtaaatgatgcagttgctctgaaggctgcagacattggagttgcgatgggccagactggtacagatgtttgcaaagaggcagcagacatgatcctagtggatgatgattttcaaaccataatgtctgcaatcgaagagggtaaagggatttataataacattaaaaatttcgttagattcagctgagcacgagtatagcagcattaactttaatctcattggctacattaatgaactttcctaatcctctcaatgccatgcagattttgtggatcaatattattatgga

SEQ ID NO: 185577 - DNA, 2959 bp, Homo Sapiens
  misc_feature (1548)..(1560): n is a, c, g, or t
  misc_feature (2136)..(2145): n is a, c, g, or t
  misc_feature (2280)..(2289): n is a, c, g, or t
ttggattcagaccaggattcttttcttcatgagaattcgttacaccaagaagagagtcaaaaagaaaatatgccttgtggggaaacagcagaatttaaacaaaagcaaagtgttaacaaaggaaaacaaggaaaggagcaaaatcaggactcacagacagaggcagaagagctacgcaaactttggaaaacccatactatgcaacaaactaaacagcaaagggaaaatattcaacaagtgtcacaaaaagaagctaagcataaaattacatctgctgatggacacatagaaagttctgcacttttaaaagaaaagcaaaggcatcgattacataagttcttgtgtctcagagttggaaaaccaatgaggaaaacgtttgtatctcaagcaagtgctacaatgcaacagtatgcacagagagataagaaacatgaatattggtttgctgtgccacaagaaaggacagatcacttgtatgccttcttcattcagtggagtccagaaatatatgcagaagatactggcgaatataccagagaacctggatttatagtagtaaaaaagattgaggagtctgaaacaattgaggattctagtaatcaagcagcagccagagaatgggagattactacaagggaagacataaattcaaagcaggttgctacagtgaaagcagacctggagtctgaatcttttcgaccaaacctaagtgatcccagtgaacttttactgccagatcaaattgaaaagcttaccaagcatcttccaccaagaacaattggctatccatggactcttgtttatggtactggaaaacatggcacaagcttgaaaactctttatcgaacaatgacaggtttagacaccccagtgctgatggtgattaaagacagtgatggacaggtttttggtgcgttagcatctgagccactgaaagtgagtgatggcttttatggtactggagagacctttgtttttacattctgtccggagtttgaggtctttaagtggacaggagataatatgttttttatcaaaggagacatggattcactagctttcggtggtggaggaggagaatttgcgctttggcttgatggagatctctaccatggaagaagccattcttgtaaaacgtttgggaatcgtacactttctaagaaggaagatttctttatccaagatattgaaatctgggcttttgaataaataaaatgctctctgtcttagcaggagaatggcccaaacctgacatggacaagcattgtttggaaagttcaagaagcaatacagtgtaacatgtcacttgtgctttaaaattagtctgtatcaccatttattacagttataattttggagtttatttttcaaatcatgttcttgtcccagagttctttaggttaacactagggactgcgtccatgtactagtataacagcttgggtttgttagaatttgggcaacattttgattataatgacaacttcattttcacatgttactcagttccctaataggatggtgctcttttgttgaacctgtattgannnnnnnnnnnnnaactatattgattcgtttactagaacagtctaattggggcattgaggaaatgaagactggatacttctgtatctgtgaagttggcacaggtaacatttggacatgttcatcttattcttaggaaggaaaaaatcacttgccaaaataatacatacttcatagaccactgagttctagtttttattcacactacaacattctctttaacgatgttgcaggtattctcaatttccttttaagaaaaatgaaatgtgaggagaattctggttgtaatagatgacagtacatatgatctgcaggtttgggcatatgctttcatcattaaattatctgataaagttacaagtcacaaaggagaatgagaacttaatgattctattggatttaatatattagcaagaaaacatactatttacatatgtgtagcttagtaaggcattaacataagtacaaaaactatgaaacagatgcatatttcctcaacatactgtgtcaggtatactgttttataatttggttgttttagccttattgcacaccaactcccaaaatataggttactcttgttcaaaaggnnnnnnnnnnttgtgattttctttgagtggtatatgttattaattaccattagcatttgctcttataaagggcaatgattatagtagacaatattgtaactcagtagacttgttgaatatgcaaacttactgtcaagtgacctcnnnnnnnnnntgaaaagatagaatacactagtagttcttatcctcttttgtaggaaaccaataatagccattgtggcaataattcatcagttgattttaaagcttcatgttatgcaaaaaagaatcctgctgttatacatgtgacagtgactttgtgctgaaatttcagctattccagataaacattgtatatcttgtaaattaatgtttaaaggtgtagttttgttcttacagaaagtgttgattgccaggttgcttatagcactttaagttattctaaaaatgaaattataagccaaatatttggcttaagtagatttagttgtatagcacttacatatttagttcttttgaaagtttagataattatttaaagaaagcataatgctaatggaaaagaaaatctgatgttctattataatatgctattgctgaatatgaatagaaatacagggcatcatttccttgtctcattataagttagtaacaatatatagattaaatgtttacaatatagggaattgtaaataaatatatcagtttttttccccttcggtcttccacagcagtattattgtctttgtggagttgactaatgataatttaaaaatcctgtaatggatttctactaaaataaggtcatagtggcatataccaaataaaatcaaatacagaaatac

SEQ ID NO: 185578 - DNA, 1423 bp, Homo Sapiens
  misc_feature (1069)..(1081): n is a, c, g, or t
ttggctttgacagaggaagaatgcttttgaaaacagttcttacgtgattttatgtaacttaatttgccctggaaaggaaatgtctcgtctctggtatgggaaaaaagggagaagacatcaaccaattaatcataaatacactctgattactacaagggaagacataaattcaaagcaggttgctacagtgaaagcagacctggagtctgaatcttttcgaccaaacctaagtgatcccagtgaacttttactgccagatcaaattgaaaagcttaccaagcatcttccaccaagaacaattggctatccatggactcttgtttatggtactggaaaacatggcacaagcttgaaaactctttatcgaacaatgacaggtttagacaccccagtgctgatggtgattaaagacagtgatggacaggtttttggtgcgttagcatctgagccactgaaagtgagtgatggcttttatggtactggagagacctttgtttttacattctgtccggagtttgaggtctttaagtggacaggagataatatgttttttatcaaaggagacatggattcactagctttcggtggtggaggaggagaatttgcgctttggcttgatggagatctctaccatggaagaagccattcttgtaaaacgtttgggaatcgtacactttctaagaaggaagatttctttatccaagatattgaaatctgggcttttgaataaataaaatgctctctgtcttagcaggagaatggcccaaacctgacatggacaagcattgtttggaaagttcaagaagcaatacagtgtaacatgtcacttgtgctttaaaattagtctgtatcaccatttattacagttataattttggagtttatttttcaaatcatgttcttgtcccagagttctttaggttaacactagggactgcgtccatgtactagtataacagcttgggtttgttagaatttgggcaacattttgattataatgacaacttcattttcacatgttactcagttccctaataggatggtgctcttttgttgaacctgtattgannnnnnnnnnnnnaactatattgattcgtttactagaacagtctaattggggcattgaggaaatgaagactggatacttctgtatctgtgaagttggcacaggtaacatttggacatgttcatcttattcttaggaaggaaaaaatcacttgccaaaataatacatacttcatagaccactgagttctagtttttattcacactacaacattctctttaacgatgttgcaggtattctcaatttccttttaagaaaaatgaaatgtgaggagaattctggttgtaatagatgacagtacatatgatctgcagtttgggcatatgctttcatcattaaattatctgataaagttac

SEQ ID NO: 185579 - DNA, 1302 bp, Homo Sapiens
ttggcaggttcctcccccggaagttagaatgactgttcctcctttagcaacaagttctgctccagtggcggtgccttctactgccccagtgacttaccctatgcctcagacaccaatgggatgcccccagcctactcctaaaatggaaacccctgctattagaccaccccctcatggcacaactgcccctcacaagaattcagcttcagtgcaaaattcatctgttgcagtcctcagtgtcaatcacattaaaagacctcacagtgttccctcttctgtccagctaccttcgaccttaagtacacaaagtgcttgtcagaattcagtacatccagcaaataagcctattgctcccaatttcagtgcccccttaccatttgggccctttagcacattgtttgaaaacagccctacttctgctcatgccttctggggaggatctgttgtttcatctcagtcaacaccagaatctatgctatcaggaaaatcctcatatttgccaaattcagatcctttacatcagtctgatacttccaaagctccaggttttagaccaccattacagagacctgctccaagtccctcagattcttctgcacagtcagtatcctcgggagttcgtgcaccatctcctgccccatcatcagtaccgttagggtcagaaaagcccagcaatgtgtctcaggacaggaaagttccagtccctattgggactgaacgttctgcacgtatcaggcaaactggaacgtcagctccatctgttattgggagcaatttgtctacatcagtaggacatagtggcatctggtcctttgaagggattggtggcaatcaagacaaagtagactggtgtaaccctgggatgggaaatcctatgatccacagaccgatgtctgacccaggagtattttcacaacatcaagcaatggagcgagatagtacaggaattgtaactccttctggtacattccatcaacatgttcctgcaggctacatggactttcctaaagttgggggtatgcctttttctgtgtatgggaatgcaatgattcctccagtagcacctatccctgatggtgctggaggacccatatttaatggccctcatgctgcagacccttcttggaactcactgataaagatggtttccagctccaccgaaaataatggccctcaaacggtgtggactggaccctgggcacctcacatgaacagtgtgcgtatgaaccagctttggctgatgaggatcagcttgttatccccgcagattcctcttcatttggaggaaatcacaagtggccg

SEQ ID NO: 185580 - DNA, 1452 bp, Homo Sapiens
  misc_feature (140)..(169): n is a, c, g, or t
  misc_feature (1393)..(1401): n is a, c, g, or t
ttatgctcccaaatcattctactgatgtgcttgactgaagtgtgtaggctttttgcagaagatcttactaactgacctattttctgtgaacatttgtgactgcccattccccatcatcatccgttttaccttagttagcnnnnnnnnnnnnnnnnnnnnnnnnnnnnnnccctcttcccctttggacataactttctgttgaagctgttctttggctggttggttttagtactgtaaactgcttctgagcaaacacggaaatttagcaaaattatgtaaacttgatcctgaagttttagaatggcaaataaatgtacaattgtttacataacagaaaaggctaagcagaaagtaaatttcaatatgtcagtatagaggctctactttatgtagacttaaattaatgtgagatatgtaccttcatattcagaaatctggatgtttccttcatacattaaactattaataagcataacttttctactggtgtaatttaagtataaagtaaaataatgggcattatcattggatgtttccccacattggcttttaaaatacccatcttggctttctttttggtttatttgtagcaaggcacatatagaagaagaaatttctggcttttccatgttgttttattaccttttctcacttttaaaactaatacagacttatctcctcactcctttttctctccttacctttaccactaataccagtaaaattatctttctgatagtgaaaaggttctgtcaagattttcactgtaatggctgctacagagatggaccatcttcatcatcaccagtggtttcttctaattataaaatgtttaaactttctgagaatttaaaaagccaccactgttcccagtcagcatatacaagctcttaatattctgtttattaaataattcaatgtactattttatattggatgatattgattcttaacattggcttttcagtcatcaacagtcaacataaaaatttcaattttcagtaatttagtggaaaatatcttatttcttttttcaattttaaaggcttcctgcttttttacccttgtatattatcagtgaaaaggatcaacagttaatttgagccaagtaataaaagaaattctgcatttgtcacgaagacaatttatggtagacagataaatacacagattacagtgtaaagtctccatttaacctgtttataaaagatacaaggccacactaaactactcagtgggatttatatattccatccacttgaaacaataaacagtaatgtatccaagaagattatgtgtcctaccctgtctcatggaaaaattaattatatggttgaaatgtaaaagaaagtaagcataaaaatcgagtaatgtatatatcaatttgtcttcnnnnnnnnnaattagacataatatttcacactggtaaaacataaaaactaactaaaattc

SEQ ID NO: 185581 - DNA, 865 bp, Homo Sapiens
tttcctcctacaattgatcctgcccccgggggggccatgagccccgcctgctgactccttcctccaattctcaaacacaagcaacgattcaggtcctggggagaaccattcacgaatcctccgggacctggtccaccctccccctcatgccccgatgatcttagtaacccaaataagaatctgcctgaaacacgaatcttttttcctggctccaagggccaatgccaaagttcctccctccaccggggagggaggtgagacctgaatccctgaatgggtgttggggtgttcacgtgtcctgctgagcagcgcggggcggctgcctccaggtcaccacacctggcacacccggatcacctccctcagcgccttcagcccctccatgcttttgtccttcacggccacggcgaggaggactgctctgtttccagcttcttgagacacaaacgctaccaggttctttgcaaagacatggatgagaggctcatcctgccccagaaggacttttgtggtgagcacaggcttgctgacgtcactggccacgctgctgggctccagggagaccagggtgcccatcttcccaaactgggtcaccaccaccaggatgtgactgctgaaggccgtacacaccacctgggtggggaccccgcacaccacctccgtcttctgcttcgatatcaccaacggcgtgtcttccatggcggggctctgcagtggcagctttaatttaggttaaaaagaaaggggaaaaaaaggagtcaatcaaacagtacagccttggggctcccaaaaaagtagcacggggcattgaaacggaaacgcaaggaggcccattcaaaagaaggggccaggcgcggtggctcat

SEQ ID NO: 185582 - DNA, 1249 bp, Homo Sapiens
  misc_feature (184)..(198): n is a, c, g, or t
  misc_feature (895)..(921): n is a, c, g, or t
actttgtacaaaaaagttgggtaggtccaattcagttttcctacatgttccaaaattttatttaaattactgtgtccaaaattatgaggacagtgtcattcattcaccatagtttatatttttagttatatatcaaacttccttggcacctaggataagaacatttcttttgaagttatccaannnnnnnnnnnnnnnacttgacttgaaggaaagttggaaaatatggtggaaaaaatcttccgcattaaaagggggaaaaaacacaaccatttacgatctcagtcagcagatttactctactcaaggaaaaaaagaaacaatcttattggaagcagatgttgacactgtgtcagttattgaagacggaaggagttcacttgagccattgcagttacaaaggggtattgatggcagtttggattcctgattgatcacctttgcagccaagggaaagacagcagaaactgtatgggatcagaaatgaaatcagcctgccagtttaatggagaggctcctagaaactcattttttttctttcctgtaagataaaagacatctttcagaataagaaaggcttgtttgagagagaaattacagtttattctctgaaaatatttaaaggccaaagtgccctttaaatctattattaaagcattgaaactgttattaaaatcattatagaaaaattaggtaaaaattttagcctaactttcaacatccattcaaaaacgaatgttgaaaacaaacatataacctataaaaaagtgaatggctctggcaagtgggggcatgggtggagtccataaggaaacctcagtctcaataacttcataatgttacttttcatggtaacttggtcatggagattggtcacagcacagacatttagaannnnnnnnnnnnnnnnnnnnnnnnnnngaatcttgtagtgctctctgggaattgcaccatgtacacttttacaacctacagaaatcgtcattattgttaaagtatctcaacttttctatttcttttattgtctattgtgcttttttgtttaaaaatacttttatagttttaaagtattggtcaaagtagtattctcttgaagttctagtcaatttaatttgatccaataagtttttctgaatctcctttttaagttccaagaattctattataaataagtgtacttttaccaattccattgtataagccaaacagacaccttttagaaaggatagtatcatccatttgttttttt

SEQ ID NO: 185583 - DNA, 899 bp, Homo Sapiens
ttgtacaaaaaagttggcgtggataccgaaaaactctgcaggcaagttgctccagagcatattgcaggacaagcctgtaacgaatagttaaattcacggcatctggattcctaatccttttccgaaatggcaggtgtgagtgcctgtataaaatattctatgtttaccttcaacttcttgttctggctatgtggtatcttgatcctagcattagcaatatgggtacgagtaagcaatgactctcaagcaatttttggttctgaagatgtaggctctagctcctacgttgctgtggacatattgattgctgtaggtgccatcttcatgattctgggcttcctgggatgctgcggtgctataaaagaaagtcgctgcatgcttctgttgtttttcataggcttgcttctgatcctgctcctgcaggtggcgacaggtatcctaggagctgttttcaaatctaagtctgatcgcattgtgaatgaaactctctatgaaaacacaaagcttttgagcgccacaggggaaagtgaaaaacaattccaggaagccataattgtgtttcaagaagagtttaaatgctgcggtttggtcaatggagctgctgattggggaaataattttcaacactatcctgaattatgtgcctgtctagataagcagagaccatgccaaagctataatggaaaacaagtttacaaagagacctgtatttctttcataaaagacttcttggcaaaaatttgattatagttattggaatatcatttggactggcagttattgagatactgggtttggtgttttctatggtcctgtattgccaaatcgggaacaaatgaatctgtggatgcatcaacctatcgtcagtcaaacccttttaaaatgttgctttggctttg

SEQ ID NO: 185584 - DNA, 985 bp, Homo Sapiens
ttgggttaatagcctttgcgatatttaaatgtgtgggttaatttttttatccagtttaataactttttattcctccctctacttctttgctttctctttctgctctgaagccgtggatacagaaatctctgcaggcaagttgctccagagcatattgcaggacaagcctgtaacgaatagttaaattcacggcatctggattcctaatccttttccgaaatggcaggtgtgagtgcctgtataaaatattctatgtttaccttcaacttcttgttctggctatgtggtatcttgatcctagcattagcaatatgggtacgagtaagcaatgactctcaagcaatttttggttctgaagatgtaggctctagctcctacgttgctgtggacatattgattgctgtaggtgccatcatcatgattctgggcttcctgggatgctgcggtgctataaaagaaagtcgctgcatgcttctgttgtttttcataggcttgcttctgatcctgctcctgcaggtggcgacaggtatcctaggagctgttttcaaatctaagtctgatcgcattgtgaatgaaactctctatgaaaacacaaagcttttgagcgccacaggggaaagtgaaaaacaattccaggaagccataattgtgtttcaagaagagtttaaatgctgcggtttggtcaatggagctgctgattggggaaataattttcaacactatcctgaattatgtgcctgtctagataagcagagaccatgccaaagctataatggaaaacaagtttacaaagagacctgtattttctttcataaaagacttcttggcaaaaaatttgattatagttattggaatatcatttggactggcagttattgagatactgggtttggtgttttctatggtcctgtattgccagatcgggaacaaatgaatctgtggatgcatcaacctatcgtcagtcaaaccctttaaaatgtgcttt

SEQ ID NO: 185585 - DNA, 858 bp, Homo Sapiens
ctaatagccaactttgtacaaaaaagttggctttctcttctgctctgaagccgtggatacagaaatctctgcaggcaagttgctccagagcatattgcaggacaagcctgtaacgaatagttaaattcacggcatctggattcctaatccttttccgaaatggcaggtgtgagtgcctgtataaaatattctatgtttaccttcaacttcttgttctggctatgtggtatcttgatcctagcattagcaatatgggtacgagtaagcaatgactctcaagcaatttttggttctgaagatgtaggctctagctcctacgttgctgtggacatattgattgctgtaggtgccatcatcatgattctgggcttcctgggatgctgcggtgctataaaagaaagtcgctgcatgcttctgttgtttttcataggcttgcttctgatcctgctcctgcaggtggcgacaggtatcctaggagctgttttcaaatctaagtctgatcgcattgtgaatgaaactctctatgaaaacacaaagcttttgagcgccacaggggaaagtgaaaaacaattccaggaagccataattgtgtttcaagaagagtttaaatgctgcggtttggtcaatggagctgctgattggagaaataattttcaacactatcctgaattatgtgcctgtctagataagcagagaccatgccaaagctataatggaaaacaagtttacaaagagacctgtatttcttttcattaaagacttcttggcataaaatttgattatagttattggaatattcatttggactggcagttattgagatactgggtttgggtgttttctatggtctgtattgcc

SEQ ID NO: 185586 - DNA, 1355 bp, Homo Sapiens
actttgtacaaaaaagttggctggatatttcgaaaagcagaagtgctatgatcctacagcgctattatgattcgaaaaaccatcaaaagagatccattggcacaggaggtattcaagatttgaaggaaagaattagacagcgtaccaacttaccacttgggccaagtatcgatactcatggggagacttttctatcccaagaagtggtggttaatcttttacaagaaaccaaacaagcctttgaaagatgtcataggctctctgatccttctgacttaccaaggaatgccttcagaatttttaccattcttgtggaatttttatgtattgagcatattgattatgctttggaaacaggacttgctggaattccctcttcagattctaggaatgcaaatctttattttttggacgttgtgcaacaggccaatactatttttcatctttttgacaaacagtttaatgatcaccttatgccactaataagctcttctcctaagttatctgaatgccttcagaagaaaaaagaaataattgaacaaatggagatgaaattggatactggcattgataggacattaaattgtatgattggacagatgaagcatattttggctgcagaacagaagaaaacagattttaagccagaagatgaaaacaatgttttgattcaatatactaatgcctgtgtaaaagtctgtgcttacgtaagaaaacaagtggagaagattaaaaattccatggatgggaagaatgtggatacagttttgatggaacttggagtacgttttcatcgacttatctatgagcatcttcaacaatattcctacagttgtatgggtggcatgttggccatttgtgatgtagccgaatataggaagtgtgccaaagacttcaagattccaatggtattacatctttttgatactctgcatgctctttgcaatcttctggtagttgccccagataatttaaagcaagtctgctcaggagaacaacttgctaatctggacaagaatatacttcactccttcgtacaacttcgtgctgattatagatctgcccgccttgctcgacacttcagctgagattgaatttacaaaggaattcagtgtcagttcctttacagaggaatgtcttatacttcagcagccctcggttgatagaaagcacaggagataccttatgacacagcccacattttgtgaaacaatgactggaacaaaacagcagccatacttacctttgagttttatttaaagtttgggataccactagctatattttgcttttttccctcacattgaattttaattccattcttgaatgtagaaatttcagattctctaaaacta

SEQ ID NO: 185587 - DNA, 1060 bp, Homo Sapiens
  misc_feature (845)..(867): n is a, c, g, or t
actttgtacaaaaaagttggctaaacttgaataagatggaatggctgaacatgtggttagtcttttattttaagaagaattgagaattgatagatttggagatgagctttgcaaaggctgtttgcttttcatgtctatagggctgtcattgtcctttttcaaagcatttctgaagttattcctacttggatatagttaatggaattggcttaatttgatgacataataaatcacttataaaattttaaatatcaagtgaaaatttagaaaggccattactattctataaaccttataaacttgctctgggagaatgcattctaaattatatatagtgtttcagctcccattgtggtgttcatagtcttctaggaacagataaacttaagtattcaattcactcttggcattttttctttaatataggctttttagcctatttttggaaaactgcttttcttctgagaaccttattctgaatgtcatcaactttaccaaaccttctaagtccagagctaacttagtactgtttaagttactattgactgaattttcttcattttctgtttagtccagtgttaccaaggtaagctggggaatgaagtataccaacttctttcagagcattttaggacattatggcagctttagaaggctgtcttgtttctagccaagggagagccagcgcaggttttggatactagagaaagtcatttgcttgtactattgccattttagaaagctctgatgtgaattcaaattttacctctgttacttaaagccaacaattttaaggcagtagtttttactggccatttaagctctttgtacagtgtccatttgtnnnnnnnnnnnnnnnnnnnnnnntctcaaataaaacatgagataacattttaagacttccaaatcagagaagtgcttcaaattattttgtttggattaatttttaaaatgtaaagcatatacttgttgcttagttattttgtttattattttcatgtttgagttctgtgcaatattttctattatgtccgttgataggacagtgacaaaattcgta

SEQ ID NO: 185588 - DNA, 4240 bp, Homo Sapiens
  misc_feature (2190)..(2211): n is a, c, g, or t
  misc_feature (2466)..(2494): n is a, c, g, or t
  misc_feature (2511)..(2560): n is a, c, g, or t
  misc_feature (2660)..(2670): n is a, c, g, or t
ctttgtacaaaaaagttggtgttttgattccatatactaatgcctgtgtaaaagtctgtgcttacgtaagaaaacaagtggagaagattaaaaattccatggatgggaagaatgtggatacagttttgatggaacttggagtacgttttcatcgacttatctatgagcatcttcaacaatattcctacagttgtatgggtggcatgttggccatttgtgatgtagccgaatataggaagtgtgccaaagacttcaagattccaatggtattacatctttttgatactctgcatgctctttgcaatcttctggtagttgccccagataattttaagcaagtctgctcaggagaacaacttgctaatctggacaagaatatacttcactccttcgtacaacttcgtgctgattatagatctgcccgccttgctcgacacttcagctgagattgaatttacaaaggaattcagtgtcagttcctttacagaggaatgtcttatacttcagcagccctcggttgatagaaagcacaggagataccttatgacacagccaacattttgtgaaacaatgactggaacaaaacagcagccatacttacctttgaggttttatttaaagtttggataccactagctatattttgcttttttcccctcacattgaattttaattccattcttgaatgtagaaatttcagattctctaaaactacatgtcactgtttttatcctagaaaatgttgctgtcagaaggcaaaggaaatgttaccagtgttttcggttcttgtacttttaacatattccatttagaaattttgccattctgttttccattaataataggtgaaatacaggaaaactacatttgttattcctcagtttttaatgaccttttcagcatcaattgttaatcagattattttaggttttcgtaaataatttttttgcctctttcaaaaggttaacaattaagcatactttctgcagttggttgattggatttttttctgaggtacagcattaatactagtccaaaaaatgtcataaactgaactaaaatgatgaactattttatgtagacattaggagtggatcggaatacttctgctttctgggtaaaacttaaaagtttactatttcttatttggtaaatagattttaagccaattctagtaagaaattaataaaactaccttattttgtatttcacttaaggtggaggaccttaactaaaggaccatatttattcattattttaatattataagggaagtaaaaaaaagtgaggtatagtctaaatggtgcatataggaaatactgacagtgtttagcaacatgcagccctttgagatttctgtcgtaatgctaaacttgaataagatggaatggctgaacatgtggttagtcttttattttaagaagaattgagaattgatagatttggagatgagctttgcaaaggctgtttgcttttcatgtctataggtctgtcattgtcctttttcaaagcatttctgaagttattcctacttggatatagttaatggaattggcttaatttgatgacataataaatcacttataaaattttaaatatcaagtgaaaatttagaaaggccattactattctataaaccttataaacttgctctgggagaatgcattctaaattatatatagtgtttcagctcccattgtggtgttcatagtcttctaggaacagataaacttaagtattcaattcactcttggattttttctttaatataggctttttagcctatttttggaaaactgcttttcttctgagaaccttattctgaatgtcatcaactttaccaaaccttctaagtccagagctaacttagtactgtttaagttactattgactgaattttcttcattttctgtttagtccagtgttaccaaggtaagctggggaatgaagtataccaacttctttcagagcattttaggacattatggcagctttagaaggctgtcttgtttctagccaagggagagccagcgcaggttttggatactagagaaagtcatttgcttgtactattgccattttagaaagctctgatgtgaattcaaattttacctctgttacttaaagccaacaattttaaggcagtagttttactggccatttaagctctttgtacagtgtcaatttgtnnnnnnnnnnnnnnnnnnnnnntctcaaataaaacatgagataacattttaagacttccaaatcagagaagtgcttcaaattattttgtttggattaatttttaaaatgtaaagcatatacttgttgcttagttattttgtttattattttcatgtttgagttctgtgcaatattttctattatgtccgttgataggacagtgacaaaattcgtaagtgaatacttaatttaaaagtgttaacattaatgctcaataaacaaattccctgcagttgnnnnnnnnnnnnnnnnnnnnnnnnnnnnnagagccatccatcctgnnnnnnnnnnnnnnnnnnnnnnnnnnnnnnnnnnnnnnnnnnnnnnnnnncacagcacaggtcttctcattttcttttttagcaaaaaatacttgactatataaacaagactagaaatttatcctaaacagatggtctttctctgagggnnnnnnnnnnntgtgtcatgtgaggcaatatgcattctttgtattctgattttttaagtgttttcatatttatagccatcacaaaattttgcccaaagtgtatggctcagaagagatgatcaataactaaaatgtttttcgttttgcacatggtaaaattttaggtagagagtggagctttgtataattggtaactttaaccaacatttacgtaagtacggtctttgcagtattacacaataccgcatgagctaatatgcagtatttaggtaatgcattgaatgaagttgaaaaatatgctcttaacacactgtgcattgtttttctaaaattgagaaatatctgaaatacagaatacgaatttaataaaggaagcctaccttatgtaaattatgatgttgaaaatgacagtcaaccagagtagatgaagtgtccttatgaagaattattaaatagtagctggatggatctttagatggatgaccacctgaccattccaggacaatttttggtcccattttgaggattgccatagttgcaagtccttaggatcttccttgttttaaaaaactatcaaagtaggttaaattaaaatctaatttaaattaggttaatttatattacattgtagatcattcttttttcccccctctttcacttctaaatattttgctttctaaatactagccttctggttcacagtgaaataatttaattatcaatcagtagattgattccaagtggagaattcactgcttccctaaaatgcgtttttcttacctgtaatggtgaatatttacaaggatctggataaagagattttgatttttgaaatgccacaaaaccccttaaagtggtcaagtacctaaggtagtggctaaggcatgcttgaactgtgtttgagagacagcagttcagtcagtacataatttgttggtgactaacaaagctcacatctgggagattaactttttttaacgcaaaaatattctgcacattacccatatattgttgaattttacatacaaagcattttgtgctttcattcaattagtttaactatattcagtttctgtattatttctctctgatctatcctgtaattattctatactttagaagaaaagatcagttcatattgttagactgaataattctacatgaagttaaaagttagcaatttaaaaaattttgctgcataataaagataattatagttacatgtattgatttaagtctcacacactgtgctaataagtcctttgcacatattattggattctagagcaaccctaggatttgggtactattatttccatttgacagatgaaaaacctaatgcatagaaagataagtagaccagtcaaggtctacagctagtaaaatgctcagattgaaacctaaatcttttctcactcacttttaggttctatatgctattctccttacgtaacgttaaatagatcctttagtttgataggttcattagttttgcttaatcgttgcttccaatatgattcttattgtagtatttatattacaaagttggcatagagggtcaatatctaatttactgttgtg

SEQ ID NO: 185589 - DNA, 1038 bp, Homo Sapiens
ttggggcaaggatactgaccgcatgagcacgtgctcctcggccagcgagcagtccgtgcagtccacccagagcaacgggagtgaaagcagcagcagtagcaacatctccaccatgttggtgacacacgattacacggcagtgaaggaggatgagatcaacgtctaccaaggagaggtcgttcaaattctggccagcaaccagcagaacatgtttctggtgttccgagccgccactgaccagtgccccgcagctgagggctggattccaggctttgtcctgggccacaccagtgcagtcatcgtggagaacccggacgggactctcaagaagtcaacatcttggcacacagcactccgtttaaggaaaaaatctgagaaaaaagataaagacggcaaaagggaaggcaagttagagaacggttatcggaagtcacgggaaggactcagcaacaaggtatctgtgaagcttctcaatcccaactacatttatgacgttcccccagaattcgtcattccattgagtgaggtcacgtgtgagacaggggagaccgttgttcttagatgtcgagtctgtggccgccccaaagcctcaattacctggaagggccctgaacacaacaccttgaacaacgatggtcactacagcatctcctacagtgacctgggagaggccacgctgaagattgtgggcgtgaccacggaagatgacggcatctacacgtgcatcgctgtcaatgacatgggttcagcctcatcgtcggccagcctgagggtcctaggtccagggatggatgggatcatggtgacctggaaagacaactttgactccttctacagtgaagtggctgagcttggcaggggcagattctctgtcgttaagaaatgtgatcagaaaggaaccaagcgagcagtggccactaagtttgtgaacaaaagttgatgaagcgcgaccaggtcacccatgagcttggcatcctgcagagcctccagcacccctgcttgtcggcctcctcgacacctttgagacccccaccagct

SEQ ID NO: 185590 - DNA, 2047 bp, Homo Sapiens
  misc_feature (967)..(1017): n is a, c, g, or t
  misc_feature (1199)..(1208): n is a, c, g, or t
  misc_feature (1217)..(1293): n is a, c, g, or t
  misc_feature (1364)..(1378): n is a, c, g, or t
  misc_feature (1622)..(1631): n is a, c, g, or t
  misc_feature (1952)..(1961): n is a, c, g, or t
tttgtacaaaaaagttggctcacgccatcaaggaggtcccgcatgtagaagacccgggtattaacatcccagatcaaactgtaattaagaaaggccccgtgtccctgtccaagtccaacagcaatgccgtctccgccatccctattaacaaggacaacctcttcggcggcgtggtgaaccccaacgaagtcttctgttcagttccgggtcgcctctcgctcctcagctccacctcgaagtacaaggtcacggtggcggaagtgcagcggcggctctcaccacccgagtgtctcaacgcgtcgctgctgggcggagtgctccggagggcgaagtctaaaaatggaggaagatctttaagagaaaaactggacaaaataggattaaatctgcctgcagggagacgtaaagctgccaacgttaccctgctcacatcactagtagagggagaagctgtccacctagccagggactttgggtacgtgtgcgaaaccgaatttcctgccaaagcagtagctgaatttctcaaccgacaacattccgatcccaatgagcaagtgacaagaaaaaacatgctcctggctacaaaacagatatgcaaagagttcaccgacctgctggctcaggaccgatctcccctggggaactcacggcccaaccccatcctggagcccggcatccagagctgcttgacccacttcaacctcatctcccacggcttcggcagccccgcggtgtgtgccgcggtcacggccctgcagaactatctcaccgaggccctcaaggccatggacaaaatgtacctcagcaacaaccccaacagccacacggacaacaacgccaaaagcagtgacaaagaggagaagcacagaaagtgaggctctcctcccgccccgcccctcccacgcctcaccagccccccgcgcgcccaccctccggcgggtgacagctccgggatcagcaacccttnnnnnnnnnnnnnnnnnnnnnnnnnnnnnnnnnnnnnnnnnnnnnnnnnnncttgggtccccccgagtctccgggactgccctctcgactgtcagtggggcagcctctccgactctgcacccgcctcgacctccccacccgctcccacacccctgtgccctcatgtggagcctaagagaacagaacaggccgtgaagccagcagagaaaagttctgccaagtttgtgaacccnnnnnnnnnnaaacaaaannnnnnnnnnnnnnnnnnnnnnnnnnnnnnnnnnnnnnnnnnnnnnnnnnnnnnnnnnnnnnnnnnnnnnnnnnnnnttatatgcgcttcatgggactgagtcaccaccttcccttacatacttcagttcagattgtagccatacttnnnnnnnnnnnnnnngccaaaagatgatgacaacatttttatcagtattgtgaataaacttgaacacaaatacacgaagttccatgtcatgtcttcagttgtagaagtttttcctctttaaggtaaagcgaccaacttgaactttctctggcaacacgattcgcagttatataagggaatcagtgttcacgtctctgtatatatttatttatgtgtaatttaatgggaattgtaaatatggtgagtctgttttaagccnnnnnnnnnnatttatctgatcttgtttacctcttgtttagtgggttttgaatcttccctattagttcttcatgtggttcatggtactgatttagaaatccagtgtttgggggatttttttctctgggattcatgaatttagccctgttgtagcatgttaaaggtgacaaacagctggacaaatttttaaaaagtaaaataaaattttatctataattagtattattacatttagcttttcattgaaccgaaagaaaaaaagtgatattggaccctggaaagattttgaaacttgagtggtttgataacccttctatgtattgtagggagnnnnnnnnnngtttattttattccactgtcctcccttaaagcatcatttgagcaataaatgaatattgtctttaaaccaagggttagggaattttc

SEQ ID NO: 185591 - DNA, 920 bp, Homo Sapiens
ccctgcaggcagatttaatcctatttgtccagttttctcttaaagatttcctccatttttagacttcgccctccggagcactccgcccagcagcgacgcgttgagacactcgggtggtgagagccgccgctgcacttccgccaccgtgaccttgtacttcgaggtggagctgaggagcgagaggcgacccggaactgaacagaagacttcgttggggttcaccacgccgccgaagaggttgtccttgttaatagggatggcggagacggcattgctgttggacttggacagggacacggggcctttcttaattacagtttgatctgggatgttaatacccgggtcttctacatgcgggacctcctcgatggcgtgaggtaaggagtggatcgagaggtctccgagtcctgagctgagcgcgtgtgggccgtgcaggaggtcctcgtgccgcctgtagtccctgcgaggatccaggcccgacagctggtgaggcagcccccggtgcgtgtgcaggagcccagactcctggctctgcctctggccgggccagcctgggtgctgcggctgcggctgggcgtgcagggggttcaggctgtaggggtcgttgacgtgggagtaaggatcttgcgactgggggtagataggctggtagggtggggggaagtatgggggctggaagtcggcattgggggtgtgggacagcggcggggcgctcgtgtagggagattgacctacagtgcccagctggggcaaccgtgccgtcccgttgctggtgccgtcgtgacggtcctcgcagtcctcgtacttgatattatccgtcaatttccaaagcattttcatggatcggcgtgaacggatatgcccctctcggtctcgcacccaagtggagctactctctggccaacttttttgtacaaagt

SEQ ID NO: 185592 - DNA, 1171 bp, Homo Sapiens
ttggcaactcctcccacagcaccaacccagcatggtcccactgaagtcctactacgccctcccctccccagccttttccagaaaccatactgggctcagatcagagctccgaagcggtcaaagtgagctgagcaggacaggcccagcctttctccactgccacgtccctcatgcacatcactcatctcctgctgcaggccaaggccaaaattgggctagtcctggccagggaaatcagaagctcttcttgggtgagattgagcctcctgttgctccctggagttccggaggctgggctgcagcccactcagcttgcgggcaaaatacgtgctctcctctctccttgtcagctgagcaaacccagggaatagccctcctctccccaggaaacttctctgaaatcttagacttagccagtcttaggcctacgatgccacacaaaggttgttcagggagaagggggtgcaggaggcagagggtgccccgcagggagctggtggctccagccccactagagctcctaaagatcacacagcagctgctcctgacagggatgctcatgcccagaaagcaagcccaggagaggaaggcagagtgtgacagagcagagccagggccaggcgcaccaggagaggcgtttctggggctccagagaagtgccacgggaggcagaagtccagaactgcccatatagatgcccttctacatcctggagcccaaatcagtcatgtgggtgggaagttcccagggcagtggtcacatcgtgaaaattagcaggaaaggcggggcctttcttgtcatagctatttctgaggatgaaatgggagacatatgcccagcacctgatgtaagtttatataatgtaatattatgtacctaccactaagaaatacatgaaccgtgccatgaggacagtaagtgttcataaagcaacatgaagcaagaaacagtgcagggtgcccagtgcacacactagagagaaattgtgaacattaagacaaggagaattggtgtctttctaaaacatacttatttaaaaacacatacccactttactaatgtggaattacacagtttgtaacaagaaaacagtctctcccattctctagtactgctcccctacccagcagtcacttccagttcattcagctatttttaaaatgtgcttata

SEQ ID NO: 185593 - DNA, 1381 bp, Homo Sapiens
ttggctctttttagcctgctagacttcagataatagtaatttgctaacacttgagtgcttatgcttggtgtgccaaacattgttctaagcacttaatatgtgttaatacatttacttctcacaactcattgaagtaggtgggatgtaatattaatccattttacagatgaaattaagatagcatttaaataacttgtccaaaggcacacagttaataactggcatggaaacagatataaaagccagtgaattattcattttctgtagttgaatgaagaaattttgttgtattgaataatgtttgagacagaagagaccattggctagtatttagcaattatcatagttatttgatttatattaaaaagcatttgtctttccactaaaacataaagggaataagggcctagagttatatgagttaatagtaattatagtcaagctggggttaaaaatttgttgtagatgatgcatacttggggataattaagagtaccatctaattttctgtcactttagaaaggaacttggggcaactttgttgactatgtggagaaagccagatgttctttactcagtaatacctgttacttctctttttttccttttagcactgaacctaccagatgtatttgggttggtcgtcctcccattggaactgaaactacggatcttccgacttctggatgttcgttccgtcttgtctttgtctgcggtttgtcgtgacctctttactgcttcaaatgacccactcctgtggaggtttttatatctgcgtgattttcgagacaatactgtcagagttcaagacacagattggaaagaactgtacaggaagaggcacatacaaagaaaagaatccccgaaagggcggtttgtgatgctcctgccatcgtcaactcacaccattccattctatcccaaccccttgcaccctaggccatttcctagctcccgccttcctccaggaattatcgggggtgaatatgaccaaagaccaacacttccctatgttggagacccaatcagttcactcattcctggtcctggggagacgcccagccagtttcctccactgagaccacgctttgatccagttggcccacttccaggacctaaccccatcttgccagggcgaggcggccccaatgacagatttccctttagacccagcaggggtcggccaactgatggccggctgtcattcatgtgattgatttgtaatttcatttctggagctccatttgtttttgtttctaaactacagatgtcaactccttggggtgctgatctcgagtgttattttctgattgtggtgttgagagttgcactcccagaaaccttttaagagatacatttatagccctaggggtggtatgac

SEQ ID NO: 185594 - DNA, 1356 bp, Homo Sapiens
ttgggaaagatatgtacgaccaagtgctgaagtttggtgcttacattgtggatggcttgagggagtgctgccagcctgtgctggtttacattcctccccaggctgagctgcggggtggctcctgggtggtgattgactcctccatcaacccccggcacatggagatgtatgctgaccgagaaagcaggggatctgttctggagccagaagggacagtagaaatcaaattccgcagaaaggatctggtgaaaaccatgcgtcgggtggacccagtctacatccacttggctgagcgattggggaccccagagctaagcacagctgagcggaaggagttggagaacaagttgaaggagcgggaggaattcctaattcccatttaccatcaggtagccgtgcagtttgctgacttgcacgacacaccaggccggatgcaggagaagggtgttattagcgatatcctggattggaaaacatcccgtaccttcttctactggcggctgaggcgtcttctgctggaggacctggtcaagaagaaaatccacaatgccaaccctgagctgactgatggccagattcaagccatgttaaggcgctggtttgtggaagtggaaggaacagtgaaggcttatgtttgggacaataataaggatctggcggagtggctagagaaacagctgacagaggaggatggtgttcactcggtaatagaggaaaacatcaaatgcatcagcagagactacgtcctcaagcaaatccgcagcttggtccaggccaatccagaggttgccatggattccatcatccatatgacgcagcacatatcacccactcagcgagcagaagtcatacggatcctctccacaatggattccccttccacgtaggaagagcttcctgcctgtccctgccctgtctctggagaaaagggctagagctgccttttacaactgtaaccactgtaatgagaaggcacaggagacccagcactggagtcaaatggcattttacttcctctcgtttcaggttatgcatgacatcctgggatgtaagatcacagaatccccctccagcccaccagtcacacctaccccattcagtatttattaccctggccaggcctagtcctccactccctgcacaggactgagaaggcaatgaaaggtacaaacatgtaccatgaggtcttactaaccaaagtagggctgcccctcctgtcctgacagccccttggcctcccagcatggggaagcgtgaggagttgcccagcagtgagcagcccccctcactcctggccccatgagccgcagccacaggcagcagaggagggctaagagaggaggaagcctcaagtcc

SEQ ID NO: 185595 - DNA, 1246 bp, Homo Sapiens
ttggatcctgtgtagcggctgcagagggtgccgccgccctaggcgaagtagggccgtcctgagcgaaagaaccgcccccagcaggagcaccaccacggtttagcaaagaatcccagaccccgcccgggaaggcagccgcaccatggagtcttccagttcatctaactcttatttctccgttggcccaaccagtcccagcgctgtcgtgctcctctactcgctttccaaggaatcccttcaatctgtggatgtcctccgagaggaagtgagtgagatcttagatgaaatgagtcacaaactgcgtcttggaccttcggttttgtgccttcaccctgagcaaagtatttaaacaaattttctcgaaggtgtgtgtaaatgaagaaggtattcagaaactacaaagagccatccaggagcatcctgttgttctgctgcctagtcatcgaagttacattgacttcctcatgttgtcttttcttctatacaattatgatttgcctgtgccagttatagcagcaggaatggacttcctgggaatgaaaatggttggtgagctgctacgaatgtcgggtgcctttttcatgcggcgtacctttggtggcaataaactctactgggctgtattctctgaatatgtaaaaactatgttacggaatggttatgctcctgttgaatttttcctcgaagggacaagaagccgctctgccaagacattgactcctaaatttggtcttctgaatattgtgatggagccattttttaaaagagaagtttttgatacctaccttgtcccaattagtatcagttatgataagatcttggaagaaactctttatgtgtatgagcttctaggggttcctaaaccaaaagagtctacaactgggttgctgaaagccagaaagattctctctgaaaattttggaagcatccatgtgtactttggagatcctgtgtcacttcgatctttggcagctgggaggatgagtcggagctcatataacttggttccaagatacattcctcagaaacagtctgaggacatgcatgcctttgtcactgaagttgcctacaaaatggagcttctgcaaattgaaaacatggttttgagcccctggaccctaatagttgctgttctgcttcagaaccgggccatccatggactttgatgctctggtggaaaagactttatggctaaaaggcttaacccaggcatttggagggtttctcatttggtctgataataaac

SEQ ID NO: 185596 - DNA, 1723 bp, Homo Sapiens
  misc_feature (186)..(197): n is a, c, g, or t
  misc_feature (199)..(445): n is a, c, g, or t
  misc_feature (594)..(623): n is a, c, g, or t
  misc_feature (798)..(858): n is a, c, g, or t
  misc_feature (1296)..(1355): n is a, c, g, or t
ttggctatgaagtctttgttgcaccatggacttttctcaaagaatctcaagggtaccaatcctggcaggaagtctctcccgatatcacccctaaatccaaatgaggatatcatcttttctaatctcttttttcaactggctgggacattttcggaagggggaagtctctttttttactcttatcannnnnnnnnnnngnnnnnnnnnnnnnnnnnnnnnnnnnnnnnnnnnnnnnnnnnnnnnnnnnnnnnnnnnnnnnnnnnnnnnnnnnnnnnnnnnnnnnnnnnnnnnnnnnnnnnnnnnnnnnnnnnnnnnnnnnnnnnnnnnnnnnnnnnnnnnnnnnnnnnnnnnnnnnnnnnnnnnnnnnnnnnnnnnnnnnnnnnnnnnnnnnnnnnnnnnnnnnnnnnnnnnnnnnnnnnnnnnnnnnnnnnnnnnnnnnnnnnnncttttgactcttttatctgagttttattgacccctctaattctcttacccagaatatttatccttcaccagcaactctgactctttgacgggaggcctcagttctagtccttggtctgctggtgtcattgctgtaggaatgaccacggnnnnnnnnnnnnnnnnnnnnnnnnnnnnnngcctgtaccaggtcattcttaagatttctcctgactccagtgagctggaattctaaatgctggtctaggagctgtctccaggatggtgcaggatggctttgcggaaaggagatgggtttggaggccaacaaacctgcttgtcaatattgcctttgcctcttggcagcccttgaannnnnnnnnnnnnnnnnnnnnnnnnnnnnnnnnnnnnnnnnnnnnnnnnnnnnnnnnnnnngtcccaggggtatatttagaccctgtttcctttcaggagggtccccagctggtccagggcctgggaaatttctacttatcctcattacccaggtccctcctttggaccctgtaaagggtcagggtgaatcagatgggggactgagcaagtagctatgaccgcagatcatgtaaggaagggactgacaagaagctcccagatgctggggagaatgaagagctaaaatagatcctaggtgctggatgctttgtcatccatgcgtgcacatatgggtgctggcagagcccccaaggactctggcctctcgagttctcctatcttctccattctagatgcttcccttgtatccagtgatgtgctggagctggctttgccaagcttgtgagagctggttgctacattttcaggatttttacaagttggtaaacacagccattnnnnnnnnnnnnnnnnnnnnnnnnnnnnnnnnnnnnnnnnnnnnnnnnnnnnnnnnnnnntactcaaaattcattacttaattttactacctgttactattatctgtgcttttgaggctatttctacatagtaactcttatggagacctaggggagacaccgcgcatctcttcctgattccccactcaatgacatcatgttagtctttggttgcttaactggctgtggggagtgtttttgtatcacaaagattagagaggactacacatcacggcttgatttattgtttgttgattttctagacttcagaacatgctggataaaatgtcagtaatgcaaattaaactttaaagtatgtcttgtttgtagccaatacatggtgtatagcaccaaaaaatggagggattattcttccagtagttgaacac

SEQ ID NO: 185597 - DNA, 2856 bp, Homo Sapiens
  misc_feature (1257)..(1269): n is a, c, g, or t
  misc_feature (1271)..(1517): n is a, c, g, or t
  misc_feature (1666)..(1695): n is a, c, g, or t
  misc_feature (1870)..(1930): n is a, c, g, or t
  misc_feature (2364)..(2424): n is a, c, g, or t
ttgggtgaaggtggcagctaccctgaccgccatggggctggtggaccgtgcaggccgcagggctctgttgctagctggctgtgccctcatggccctgtccgtcagtggcataggcctcgtcagctttgccgtgcccatggactcaggcccaagctgtctggctgtgcccaatgccaccgggcagacaggcctccctggagactctggcctgctgcaggactcctctctacctcccattccaaggaccaatgaggaccaaagggagccaatcttgtccactgctaagaaaaccaagccccatcccagatctggagacccctcagcccctcctcggctggccctgagctctgccctccctgggccccctctgcccgctcgggggcatgcactgctgcgctggaccgcactgctgtgcctgatggtctttgtcagtgccttctcctttgggtttgggccagtgacctggcttgtcctcagcgagatctaccctgtggagatacgaggaagagccttcgccttctgcaacagcttcaactgggcggccaacctcttcatcagcctctccttcctcgatctcattggcaccatcggcttgtcctggaccttcctgctctacggactgaccgctgtcctcggcctgggcttcatctatttatttgttcctgaaacaaaaggccagtcgttggcagagatagaccagcagttccagaagagacggttcaccctgagctttggccacaggcagaactccactggcatcccgtacagccgcatcgagatctctgcggcctcctgaggaatccgtctgcctggaaattctggaactgtggctttggcagaccatctccagcatcctgcttcctaggccccagagcacaagttccagctggtcttttgggagtggcccctgcccccaaaggtggtctgcttttgctggggtaaaaaggatgaaagtctgagaatgcccaactcttcattttgagtctcaggccctgaaggttcctgaggatctagcttcatgcctcagtttccccattgacttgcacatctctgcagtatttataagaagaatattctatgaagtctttgttgcaccatggacttttctcaaagaatctcaagggtaccaatcctggcaggaagtctctcccgatatcacccctaaatccaaatgaggatatcatcttttctaatctcttttttcaactggctgggacattttcggaagggggaagtctctttttttactcttatcannnnnnnnnnnnngnnnnnnnnnnnnnnnnnnnnnnnnnnnnnnnnnnnnnnnnnnnnnnnnnnnnnnnnnnnnnnnnnnnnnnnnnnnnnnnnnnnnnnnnnnnnnnnnnnnnnnnnnnnnnnnnnnnnnnnnnnnnnnnnnnnnnnnnnnnnnnnnnnnnnnnnnnnnnnnnnnnnnnnnnnnnnnnnnnnnnnnnnnnnnnnnnnnnnnnnnnnnnnnnnnnnnnnnnnnnnnnnnnnnnnnnnnnnnnnnnnnnnnncttttgactcttttatctgagttttattgacccctctaattctcttacccagaatatttatccttcaccagcaactctgactctttgacgggaggcctcagttctagtccttggtctgctggtgtcattgctgtaggaatgaccacggnnnnnnnnnnnnnnnnnnnnnnnnnnnnnngcctgtaccaggtcattcttaagatttctcctgactccagtgagctggaattctaaatgctggtctaggagctgtctccaggatggtgcaggatggctttgcggaaaggagatgggtttggaggccaacaaacctgcttgtcaatattgcctttgcctcttggcagcccttgaannnnnnnnnnnnnnnnnnnnnnnnnnnnnnnnnnnnnnnnnnnnnnnnnnnnnnnnnnnnngtcccaggggtatatttagaccctgtttcctttcaggagggtccccagctggtccagggcctgggaaatttctacttatcctcattacccaggtccctcctttggaccctgtaaagggtcagggtgaatcagatgggggactgagcaagtagctatgactgcagatcatgtaaggaagggactgacaagaagctcccagatgctggggagaatgaagagctaaaatagatcctaggtgctggatgctttgtcatccatgcgtgcacatatgggtgctggcagagcccccaaggactctggcctctcgagttctcctatcttctccattctagatgcttcccttgtatccagtgatgtgctggagctggctttgccaagcttgtgagagctggttgctacattttcaggatttttacaagttggtaaacacagcnnnnnnnnnnnnnnnnnnnnnnnnnnnnnnnnnnnnnnnnnnnnnnnnnnnnnnnnnnnnnttatactcaaaattcattacttaattttactacctgttactattatctgtgcttttgaggctatttctacatagtaactcttatggagacctaggggagacaccgcgcatctcttcctgattccccactcaatgacatcatgttagtctttggttgcttaactggctgtggggagtgtttttgtatcacaaagattagagaggactacacatcagggcttgatttattgtttgttgattttctagacttcagaacatgctggataaaatgtcagtaatgcaaattaaactttaaagtatgtcttgtttgtagccaatacatggtgtatagcaccaaaaaatggagggattattcttccagtagttgaacactgtcatccgtttcagctgacagctgctcaaatcatttaagaaggagttctgacattcattt

SEQ ID NO: 185598 - DNA, 568 bp, Homo Sapiens
cccactttgtacaaaaaagttgggagacggttcaccctgagctttggccacaggcagaactccactggcatcccgtacagccgcatcgagatctctgcggcctcctgaggaatccgtctgcctggaaattctggaactgtggctttggcagaccatctccagcatcctgcttcctaggccccagagcacaagttccagctggtcttttgggagtggcccctgcccccaaaggtggtctgcttttgctggggtaaaaaggatgaaagtctgagaatgcccaactcttcattttgagtctcaggccctgaaggttcctgaggatctagcttcatgcctcagtttccccattgacttgcacatctctgcagtatttataagaagaatattctatgaagtctttgttgcaccatggacttttctcaaagaatctcaagggtaccaatcctggcaggaagtctctcccgatatcacccctaaatccaaatgaggatatcatcttttctaatctcttttttcaactggctgggacattttcggaagggggaagtctctttttttactcttatca

SEQ ID NO: 185599 - DNA, 885 bp, Homo Sapiens
  misc_feature (643)..(653): n is a, c, g, or t
tttgtacaaaaaagttggcaaaaaaattatacccaaaatatcattacttaattttactacctgttactattatctgtgcttttgaggctatttctacatagtaactcttatggagacctaggggagacaccgcgcatctcttcctgattccccactcaatgacatcatgttagtctttggttgcttaactggctgtggggagtgtttttgtatcacaaagattagagaggactacacatcagggcttgatttattgtttgttgattttctagacttcagaacatgctggataaaatgtcagtaatgcaaattaaactttaaagtatgtcttgtttgtagccaatacatggtgtatagcaccaaaaaatggagggattattcttccagtagttgaacactgtcatccgtttcagctgacagctgctcaaatcatttaagaaggagttctgacattcattttcattgttttacttttgtcttcctcactagtgtaaacaaaaatttcaaccagcattcatgccgaacctatacccattcttcagtgcctagctgtacagttatcagggatttttatttgtagtctaattttgtcaaatcatggccaaatcgcagtgatagttgactttggatacaaggtttggcnnnnnnnnnnntattaacaaaatattctgtaagaatcaattgtctatatggaatttaggataaagaatatttacaataaagaatatttacaataaagagtttattattatttgtaagttgtgtgcaacaaacataccctttatctctgtaaaatttatacacacaaaaattaacaaaagattctgtaagaatttaattggctatatggaatttaggatagaatatttacataaagagtattta

SEQ ID NO: 185600 - DNA, 1703 bp, Homo Sapiens
  misc_feature (170)..(182): n is a, c, g, or t
  misc_feature (1658)..(1668): n is a, c, g, or t
tttgaaattccataataaatgttcattttttttattattataatgacaagacaaagtttttcatatcacccattacactcatgctagggataacaatacttcctctattataaatgctacttgacctttatttactatgcttggcataactgggcatgcttaataaaatnnnnnnnnnnnnncattcaaatttttttcttttactaatcgaagtacctaattttatacaatttgcacacttttaatgttagtaacagaaacaatgaaattattttacttcttgatacttaagagtttaactccaagacatgcactacaaccacataatagatttttgtcatcaatatgatggtcctggcatcttatatattaagttcacactttaaattaagtactacttgctaaaacgaaaacaggtaaaaacaatgaacagacggttcacgttaagaggaatacgaaaagccaataacaatactgacataacaatcttatttgtaatgaaagaaatacaaattttaaaaatgacataccattttttaattacattggcaaaaattaaaccaaaaagaatacctacaattgaccaaggagtattctggcagggggagggaagtcacatacatatagtactaattagaggggtaaattgtataattaaagccctatgaaccagtcaaaccaatcattccacttttagaaactttctcaaggacataattaagcatgtaactcaaaatgtacaaggacattcactctgccactgcttgtagtaataaactgcagataatcaaaatgtctaacacagaaaaaagtgagtaaattatggtaaacctttcttatgggaaggcagtgggcttccaattccattcttcacacctagcttagcttctttcttttcaacagagtctacttctaacagagaccaaaaatgtcagacattgcctttctctgtaacctgatctaagtcaatggaaactgaggggaaatcttctggaggcttttgttaaaaatcttcctcatggataaaacaaatgagagacgaaatggccttttctgcctttgagatacaattttacaaagatgtaaaactggaagttatagcagcagctcttgtgatcgagaggtggaatagcctaaggcaaaacaaaccaactgaggtcaaggcaaaaaaagtgtgtctttaatgacacccctgaaccctgtgttatgtcaaacaatttcctaggttacttaggccaattatatttggacactgttacctctggccaaaagcatcctaacttgtattagctatacaacagagtacattagaaccacaaaaagttatgttacagaggtatatttatgaacagtagatgtgcagttaaaaagaatttacaaaacagtacgtttccatgtttttaaaaaaatcaaatatgtcaatatggattcatttgccaagaaaaaggtctgaaaagatactcaaggttttaagagtagttatctttgaaagatagcatttaaatgtttccttttgcttatgtgcattttctatttttttctacagttagcatgtatcactttaagattccgccatccttcctatcaattcaatgcaatttaggaaagaaagaggtaaacatgtattccagtgagctatcttgaaccagaagtctgcnnnnnnnnnnnaatgggaaaagtttccaacttttttgtacaaagtt

SEQ ID NO: 185601 - DNA, 1750 bp, Homo Sapiens
  misc_feature (1085)..(1095): n is a, c, g, or t
ttggggcgaggtccgctttcagtgtatggttttccctgccaaacggttctgcttggtgccatccatggagggcgtgcgctgggccttttcctgcggcacttggctgccgagccgagccgaatggctgctggcagtgcgatcgattcagcccgaggagaaggagcgcattggccagttcgtctttgcccgggacgctaaggcagccatggctggtcgtctgatgataaggaaattagttgcagagaaattgaatatcccttggaatcatattcgtttgcaaagaactgcaaaaggaaaaccagttcttgcaaaggactcatcgaatccttacccgaatttcaactttaacatctctcatcaaggagactatgcagtgcttgctgctgaacctgagctgcaagttggaattgatataatgaagactagttttccaggtcgtggttcaattccagaattctttcatattatgaaaagaaagtttaccaacaaagaatgggaaacaatcagaagctttaaggatgagtggactcagctggatatgttttataggaattgggcacttaaggaaagcttcataaaagccattggtgttggactaggatttgaattgcagcggcttgaatttgatctatctccattaaacttggatataggccaagtttataaagaaacacgtttattcctggatggagaggaagaaaaagaatgggcatttgaggaaagcaaaatagatgagcaccattttgttgcagttgctcttagaaacccgatggatctagacatcaggatgttccatctcaggatgattccaaaccaacccagaggcaatttactattctcaactttaatgatttaatgtcatctgccgttcccatgacacctgaagatccttcattttgggactgtttttgcttcacagaagaaattccaatacgaaatggtacaaagtcatgatgattccctgagtaacaaagggaaatgaaaactgtttgtgatcttccgtattcactgaaaaataaatgcttgtttagtatcaaattttatttcacgaaagtttttttaaagaacagaaacttttccaattnnnnnnnnnnngcagacttctggttcaagatagctcactggaatacatgtttacctctttctttcctaaattgcattgaattgataggaaggatggcggaatcttaaagtgatacatgctaactgtagaaaaaaatagaaaatgcacataagcaaaaggaaacatttaaatgctatctttcaaagataactactcttaaaaccttgagtatcttttcagacctttttcttggcaaatgaatccatattgacatatttgatttttttaaaaacatggaaacgtactgttttgtaaattctttttaactgcacatctactgttcataaatatacctctgtaacataactttttgtggttctaatgtactctgttgtatagctaatacaagttaggatgcttttggccagaggtaacagtgtccaaatataattggcctaagtaacctacgaaattgtttgacataacacagggttcaggggtgtcattaaagacacactttttttgccttgacctcagttggtttgttttgccttagctattccacctctcgatcacaagagctgctgctataacttccagttttacatctttgtaaattgtatctcaaaggcagaaaggccatttcgtctctcatttgttttatccatgagaagatttttaacaaaa

SEQ ID NO: 185602 - DNA, 1642 bp, Homo Sapiens
  misc_feature (1081)..(1131): n is a, c, g, or t
ttggcctcccgcccagccagcccgggcccgcgggattgttagatggaacacggctccatcatcacccaggcgcggagggaagacgccctggtgctcaccaagcaaggcctggtctccaagtcctctcctaagaagcctcgtggacgtaacatcttcaaggcccttttctgctgttttcgcgcccagcatgttggccagtcaagttcctccactgagctcgctgcgtataaggaggaagcaaacaccattgctaagtcggatctgctccagtgtctccagtaccagttctaccaggtacgtgactctggcctgatcccagggacctgcctgctcccagaggtgacagaggaagatcaaggaaggatctgtgtggtcattgacctcgatgaaacccttgtgcatagctcctttaagccaatcaacaatgctgacttcatagtgcctatagagattgaggggaccactcaccaggtgtatgtgctcaagaggccttatgtggatgagttcctgagacgcatgggggaactctttgaatgtgttctcttcactgccagcctggccaagtatgccgaccctgtgacagacctgctggaccggtgtggggtgttccgggcccgcctattccgtgagtcttgcgtgttccaccagggctgctacgtcaaggacctcagccgcctggggagggacctgagaaagaccctcatcctggacaactcgcctgcttcttacatattccaccccgagaatgcagtgcctgtgcagtcctggtttgatgacatggcagacactgagttgctgaacctgatcccaatctttgaggagctgagcggagcagaggacgtctacaccagccttgggcagctgcgggccccttagcctgccctgcttccaagcgacggccatcccagtaggggactttcccacactgtgcctttacgatcagcgtgacagagtagaagctggagtgcctcaccacacggcccggaaacagcgggaagtaactggaaagagctttaggacagcttagatgccgagtgggcgaatgccagaccaatgatacccagagctacctgccgccaannnnnnnnnnnnnnnnnnnnnnnnnnnnnnnnnnnnnnnnnnnnnnnnnnntttgccatgaactgtggccccagtgtatagtgtttcagtgggggagaagctgaaagaccaagactcttcccaagttagcttgtctcctctcctgtcaccctaagagccactgagttgtgtagggatgaagactattgaagactccattgccaaaccatggcctttcctcagtgttgtaaggcctatgccaaggataaaggaagggtatgcctttgggtactccaggcacacacctttctgaaatccttctccagccagctgctgcagacaaaagatcacatttctgggaagatgagaacttgtttccagaccagcatccagtggccatcaggtcttgtggcccaaaggctatgcttgcctccggctgagtgcctgggataggccttttctatgtctccccaaggctggggtgctgagcctgcctttcctcaccacctagccatagtctcaacctgtggggaaaggaggttttctccctgcccgggaagaggacagataactgatttccgtt

SEQ ID NO: 185603 - DNA, 1115 bp, Homo Sapiens
caactttgtacaaaaaagttggcaggaggagaagtctccattgttttctgtacaacgtgaagggctacctgaagatggcaccctctaccgaataaacagatttagctcgatcacagcacatccagagcgctgggatgtgtccttcttcacggggggaccgctctgggctctggactggtgcccagtgccagagggggcaggagcctcgcaatatgtggctcttttctccagccctgacatgaatgagacacacccactgagccagcttcattcgggtcctgggctgctccagctctggggccttgggaccttgcagcaagaaagctgtcctggcaacagggcccactttgtctatgggattgcttgtgacaacggctgcatctgggacctcaagttctgccccagtggagcatgggaacttccaggcacccctcggaaggctcctctcctgccccggttgggtctcttggctctggcctgctcagacgggaaagtactgctattcagtctaccccatccggaggccctgctggctcagcaacccccagatgcagtgaagcctgccatatataaggtacaatgtgtggcaactctgcaggtggggtctatgcaagctacagacccctctgagtgtggtcagtgccttagcctggcctggatgcctaccaggccccaccaacacctagctgctggatattataatggcatggtggttttctggaaccttcccactaactcacccctgcagcggatacggctctctgatggctccttaaagctctaccccttccagtgtttcctagcccatgaccaggctgtgcgtacccttcaatggtgcaaagctaacagccatttccttgtctctgcggggagtgaccggaaaatcaaattctgggaccttcaacgtccttacgaacccataaactctatcaagcgcttcttgagtacagaactggcctggctgcttccctacaatggtgtcactgtggctcagacaactgctatgcctcttatggactctgtgggattcattatattgacgctggttcgaatccattttgtccgtggactcgcctccccactgggccaccgtatgcagcttgaaagccgagccc

SEQ ID NO: 185604 - DNA, 1472 bp, Homo Sapiens
  misc_feature (528)..(544): n is a, c, g, or t
  misc_feature (550)..(599): n is a, c, g, or t
ttggctattcagatgctatcgtttggctaaaagaacatgatgtaaagaaagaagatggaactttctatgaatttggagaagatatcccagaagctcctgagagactgatgacagacaccattaatgaaccaatcttgctgtgtcgatttcctgtggagatcaagtccttctacatgcagcgatgtcctgaggattcccgtcttactgaatctgtcgacgtgttgatgcccaatgttggtgagattgtgggaggctcaatgcgtatctttgatagtgaagaaatactggcaggttataaaagggaagggattgaccccactccctattactggtatacggatcagagaaaatacggtacatgtccccatggaggatatggcttgggcttggaacgattcttaacgtggattctgaataggtatcacatccgagacgtgtgcttataccctcgatttgtccagcgttgcacgccataaccattttctccagaagcgtggaggaaagattatgaaaggaacaggctctttnnnnnnnnnnnnnnnnngccagnnnnnnnnnnnnnnnnnnnnnnnnnnnnnnnnnnnnnnnnnnnnnnnnnnactaccataaaaactatctcaaatcacctgaacatcaagtgatattaaggttgtcatcttaagaaaaaatatccatttttttcttaagttcgggaaacaaagttcggggaaaatacctggcatgaaactgtagttagggatacatttcagcattttactcactttatccaagttattcattttattcaagttatatgtatgtataattcaacaattttagattatggtgtaagatactccagtaacttatctttctgtccttttaagtgtaccttgaattctttgatttattttattgcatcaatgaattaaaacaaaaatcttgggggaagaaattggcaatatcgtataaaaatctgctcatattagaacacagtataattcagcagtaaacactagaatcaaatgaatagccttttgtatcagttattaatcttttctaactctgcttagctgctaataatcctgaggcatagaaattgaagaatttgtaaaaatagaattgccttaaaggatttgaagtaagaacataattttggggagagttttttagtgattcacagtatccctcttagcattaatttaaggtaaagaggcagattgattttccctctttcctggtaattcctaagtaattaagaataaataagttccaaaagaaattgtagctggaatcttaataacaattgtgagtggctgtttgagttgcccccaccatgtccttagatctaatctgtgctaccttattaactcacagcaggcttactgaatggcttcatttcagatttagttgatttctccaccaaatgcatgtcatgtattctcaataagctgtattcccagcagtcaataaatgaacacccgtaaaaactc

SEQ ID NO: 185605 - DNA, 1426 bp, Homo Sapiens
  misc_feature (215)..(241): n is a, c, g, or t
ttggctggctctggttttctatgcagatgattcattggattgggggtgagtgttttgtttttctgggggcagtgtgagctttgagggttggaatattgggaggcattccttagtttcctcaactagcctggaaagttaggagtctagggtaattaccccccaatgagtctagcctactattcactgctttgtgtgcatttttttctccctctttnnnnnnnnnnnnnnnnnnnnnnnnnnngtagatagtgctaaatattttagctcatgaaacttggttaggatggctgggggtacaagtccccaaactacctcttgttacagtagccagggagtggaatttcgtcaaccggtacttttaaggttaggatgggacgggaaaagtgaagcaggatattagctccttataccttctcccttccatttctgagatctcacattccatctatcacagggttttcaaagagatgctgagggtaacaaggaactcacttggcagtcagagcatcatgctttgaggtttggggtgctcaggctgggagggtagaatgccattccagaggacaagccacaaaaatgccttaatttgagctcgtatttacccctgctgataagtgacttgagagttcccggttttttcctcttgtccttccctcccttctgtccttccatgtgtggggaaagggtgtttttggtagagcttggtttccaaagcgcctggctttctcacttcacattctcaagtggcagtttcattatttagaatgcaaggtggacatcttttggatatctttttctatatattttctaaagctttacatatgagagggtatagggaggtgtttataaaacacttgagaacttttttccttaatatcagaaagcaaaaaaataaaaccacaattgagatttgcctttcaaaccctcaggtttgcctctaaccaggtgtccctggtcaccatcagagtactggaatacgggaaccgaggagaccttggtccttttgtttttgttctggactcttgggagtggaaatgagaatgagtttattcctactggagcttagttccaatgcatttggctccagaaagaccccagtgccttttgacaatggccagggttttacctacttcctgccagtctttcccaaaggaaactcattccaaatacttcttttttcccctggagtccgagaaggaaaatggaattctggttcatactgtggtcccttgtaacctcaggtctttaatgtgatcactttcaaatttaaaagatccaggtggaaatatttttactatagtaataattctacaaaatacctgaattcttaacactgttatatttcagtataagtgggtggctttttcttttcatgtcctttgatctggttttatttcttgtaattcagccacctgaattttgttga

SEQ ID NO: 185606 - DNA, 963 bp, Homo Sapiens
  misc_feature (196)..(205): n is a, c, g, or t
  misc_feature (535)..(546): n is a, c, g, or t
ttggcttcccctttctcctcgtatgtgtgtttacctaaactatatgccataaacctcaagttattcattttattttgttttcattttggggtgaagattcagtttcagtcttttggatataggtttccaattaagtacatggtcaagtattaacagcacaagtggtaggttaacattagaataggaattggtgttnnnnnnnnnntttgcaagaatattttattttaattttttggatgaaatttttatctattatatattaaacattcttgctgctgcgctgcaaagccatagcagatttgaggcgctgttgaggactgaattactctccaagttgagagatgtctttgggttaaattaaaagccctacctaaaactgaggtggggatggggagagcctttgcctccaccattcccacccaccctccccttaaaccctctgcctttgaaagtagatcatgttcactgcaatgctggacactacaggtatctgtccctgggccagcagggacctctgaagccttctttgtggccnnnnnnnnnnnncatcctgtggtttttctaatggactttcaggaattttgtaatctcataactttccaagctccaccacttcctaaatcttaaaaactttaattgacagtttcaattgaaggtgctgtttgtagacttaacacccagtgaaagcccagccatcatgacaaatccttgaatgttctcttaagaaaatgatgctggtcatcgcagcttcagcatctcctgttttttgatgcttggctccctctgctgatctcagtttcctggcttttcctccctcagccccttctcacccctttgctgtcctgtgtagtgatttggtgagaaatcgttgctgcacccttcccccagcaccatttatgagtctcaagttttattattgcaataaaagtgctttatgccggcttttctcacaaaaaaagaaaa

SEQ ID NO: 185607 - DNA, 1536 bp, Homo Sapiens
ttggacttgatctatgaaagttgtttatgtgagtctatatatatatattccatagtcatgtgttctcttttgacatgggaagtcttaggcaggtttataacacacttggctcttagtggggaaagattacctgccatcatcttgaagcgaatttaggggaagaaagaatattgcaaatgacaacataggtatttcagaaaaaaggaaaaatctgaatgaaagagtaattgagatgttgatacagagatgacttcatattaattctgaactagagagagagacactaccttaaataaggatggaaagaaaaatactaaatttgggaaaatgacgcttagtttttgaaacatttaggaattactaggtaaaataaaattcaatgactttcatcagtcctaagtgtgtcaaatgtgagagttaagaatgagggactagggaaatgtggcagtcccttggtgaggaagctagtatgagaggaaggatgtttttgaacgtgtctgtcatagtgattttcatgcaaaattgtctgcctgttttaaaacatggtagattgcagtgcagctttaacatgctttcctctgcaggctccatctactctttgaagcttctgcccagcttgcattgtttctaggagaacctgcgtcatacctttatctatagccttcccctaggtcttcagaagcatcaagttttaactgtggacattggatttggtggaacagcaatcatgactgttggcaagagtagcaagatgctgcagcacattgactatagaatgagatgtatcctgcaagatggccgaatcttcattggcacctttaaggcttttgacaagcatatgaatttgatcctctgtgattgtgatgagttcagaaagatcaagccaaagaatgcgaagcaaccagagcgtgaagaaaagcgggttttgggtctggtgttgctgcgtggggagaacttggtatccatgactgtggaggggccaccccccaaagatactggcattgctcgggtaccacttgctggagctgctggaggccctggggttggtagggcagctggtagaggagtaccagctggtgtgccaattccccaggcccctgctggattggcaggccctgtccgaggagttgggggaccatcccagcaggtaatgactccacagggaagaggcactgtagcagctgctgctgttgctgcgactgccagtattgctggagccccaacacagtacccaccaggacggggcactccgcccccacccgtcggcagagcaaccccacctccaggcattatggctcctccacctggtatgagaccacccatgggcccaccaattgggcttccccctgctcgagggacgccaataggcatgccgcctccgggaatgagaccccctccaccaggcattagaggtccacctcccccaggaatgcgtccaccaagaccttagcatactgttgatccatctcagtcactttttcccctgcaatgcgtcttgtgaaattgtgtagagtgttgtgagctttttgttccctc

SEQ ID NO: 185608 - DNA, 1126 bp, Homo Sapiens
  misc_feature (164)..(173): n is a, c, g, or t
ttggtcctgattccaagaaaaaaatatatcaagatgcttatagggcggagtggcaggtatataaagaagagataagcagatttaaagaacagctaactccaagtcagattatgtctttggaaaaagaaatcatggacaaacatttaaaaaggaaagctatgacnnnnnnnnnngagttaacactgcttggaaaaccaaaaagacctcgttcagcttataacgtttatgtagctgaaagattccaagaagctaagggtgattcaccgcaggaaaagctgaagactgtaaaggaaaactggaaaaatctgtctgactctgaaaaggaattatatattcagcatgctaaagaggacgaaactcgttatcataatgaaatgaagtcttgggaagaacaaatgattgaagttggacgaaaggatcttctacgtcgcacaataaagaaacaacgaaaatatggtgctgaggagtgttaaaagtagaagattgagatgtgttcacaatggataggcacaggaaaccagttaggtctcaatacctgaagctatcgtaaaattaagaaaggataaagttggtaaaccttttatatttagtatctttttattcagctcatggacttctgccagcataatacttgctttggaaaacccagataaaggttcatgcaaactttattttgtgtttaggaactactgaggatcagagtaatccaagcaaatgtgaatcattttacctttgacaaaggtaaatcagactatgaagttttttttatacaggatgatgactatggaaagagtactcttgtttccttatattatggaggcaggagtttcgttttcaaattgttacaaattgtagaagccacggtgttctgtgatataagtgtgtgtttttcataaagcaggcagaactcatctaggtaaattacagttcctaggtataattcacattgtattcagagttgatggttgtacatataagtgattgctgggttttagttgcaactttgtataaaggggactgagaaatttataaacttttttcttactgtcttttttctaaagtaaaaacaaagaattatgtgccaaatttatgcctattattttatgttgcatagaataaattttta

SEQ ID NO: 185609 - DNA, 862 bp, Homo Sapiens
ttggcgcagctccagaggtgaacaatattttcatcaaacaagaacttcctacaccagatcttcatctttctgtccctacccagcagggccacctgtaccagctactgaatacaccggatctagatatgcccagttctacaaatcagacagcagcaatggacactcttaatgtttctatgtcagctgccatggcaggccttaacacacacacctctgctgttccgcagactgcagtgaaacaattccagggcatgcccccttgcacatacacaatgccaagtcagtttcttccacaacaggccacttactttcccccgtcaccaccaagctcagagcctggaagtccagatagacaagcagagatgctccagaatttaaccccacctccatcctatgctgctacaattgcttctaaactggcaattcacaatccaaatttacccaccaccctgccagttaactcacaaaacatccaacctgtcagatacaatagaaggagtaaccccgatttggagaaacgacgcatccactactgcgattaccctggttgcacaaaagtttataccaagtcttctcatttaaaagctcacctgaggactcacactggtgaaaagccatacaagtgtacctgggaaggctgcgactggaggttcgcgcgatcggatgagctgacccgccactaccggaagcacacaggcgccaagcccttccagtgcggggtgtgcaaccgcagcttctcgcgctctgaccacctggccctgcatatgaagaggcaccagaactgagcactgcccgtgtgacccgttccaggtcccctgggctccctcaaatgacagacctaactattcctgtgtaaaacaac

SEQ ID NO: 185610 - DNA, 2766 bp, Homo Sapiens
ttggcggcggcatctttctcgaggagctctcctgggcggctgaagaaggagcttcttctccggagtgcgccggcggtggcgcctgcggacctaactagctccaggttaggccgagctttgcgggaaagcagcggacttgaaaatactggaaatctgtccggatccaaattattttgcaagccagatgagtaaccagagggcatgaaaggttgagaacatttgacttccctgcaaaccttggtatagatcacttccttttctgtaggaaaggaaaggcaccaaagagcacaatgagtacaagaaagcgtcgtggtggagcaataaattctagacaagctcagaagcgaactcgggaagcaacctccacccccgagatctccttggaagcagaacccatagaactcgtggaaactgctggagatgaaattgtggacctcacttgtgaatctttagagcctgtggtggttgatctgactcacaatgactctgttgtgattgttgacgaaagaagaagaccaaggaggaatgctaggaggctgccccaggaccatgctgacagctgtgtggtgagcagtgacgatgaggagttgtccagggacagagacgtatatgtgactacccatactcccagaaacgccagggatgagggcgctacaggcctcaggccctcaggtactgtcagttgtcccatctgcatggacggatactcagagatcgtgcagaatggacgtctcatcgtttccacagaatgcggccatgtcttctgtagccagtgcctccgtgattccctgaagaatgctaatacttgcccaacttgtaggaaaaagatcaaccacaaacggtaccaccccatttatatatgaagtattcagagccccccaggagagacggatggacagacagacagccaggttctccagtggtatctgcctccattttcctgagatcaaaaagactgtttcgaaaccaacatctgatatgtaaactgctcttttgtttccaaccccttccttttgttatctccagtttgatgctatggcgctggacccagggccctcccaggccatctctgttcctctggggtggtccagttctagagtgggagaaagggagtcaggcgcattgggaatcgtggttccagtctggttgcagaatctgcacatttgccaagaaattttccctgtttggaaagtttgccccagctttcccgggcacaccaccttttgtcccaagtgtctgccggtcgaccaatctgcctgccacacattgaccaagccagacccggttcacccagctcgaggatcccaggttgaagagtggccccttgaggccctggaaagaccaatcactggacttcttcccttgagagtcagaggtcacccgtgattctgcctgcaccttatcattgatctgcagtgatttctgcaaatcaagagaaactctgcagggcactcccctgtttcctaagaacgaaaaagtgcaataaaggccattcgttacctacttttcagcagcccacaagatgtagcactattagtgtccccctcagaggcttaatgttgcctgtggagcagtgcccatcccagcccgtttctgcccaccagttgttctcaggaaccttacccatgctccagcgtccttcacctggcacaggacatgcaagataaatagggcaggcacgtgtttgggtgtcctctcttttctgataaaatccatcccgtgtttgccacacgccctccagtcctcagttcccactgcctaacgtctgcccccgtgtagatactgagaggtggtggcagtaattgtggccttatcagccgctcagttccaggcttttgcccaggtcactgttgccccatgttcggagaacctggcccacctgtcttggctttctcatccttcccaacccagtgccgtttatttcagaagcttcctggccactgggcttggatgcttcgggcttctgactgctccataggttttgactggtgaaacaggggcccagatgacaacctctccttcgctccacaggtacgcgggagcctcaggttctctcaggggcagcaaagtggcccaagctgcccctgacagcacagggcctgggggtggctaacgagagaggccttacagtgccggcatgcctcctcttccactgtcgtccttcctcagagggcctcacgccaaacaaacggccttttcgtgtgaaacatcttcagggcgggaaaggggccacttctggctttgttagcaataactgaccttcagtttacccttctgaaggagcagggactcagcacagaattcactttagacggggctgaaggagtgtccctcctctatgtgaaaagaaaattgttttattcttcattctgactttttaactgtttggctcacttccagttagtttgaatgaaaataataattttctacttggagttgaagagggcagaatccgcagctctcatcattgtgatgtgtagcatgtctgccctctgactggacatcattgccattaactttcttctgggcatcacggcaatgtcacgatgcccagacttggagcaaggcaaccttggagtcagtccactcataaaatatggtaacacccttttaaaatttaagttttgtccttaaagacaacttcactggttaattataaaagttgtgttacttcgtcctaattaattgatagaaagatttaaaaatgtgttttgtttctaccattctcaaaactgcgaactaaggaaaggttgggaatgaaaaaaa

SEQ ID NO: 185611 - DNA, 1506 bp, Homo Sapiens
ggagatcatctcgctcttttgctttatatgctacgtcatgaaaaatctcatctgtcatgatggtggccatggatctgccaatctcatggtactgctgacctttccctactggacccaataagataaacaaaaatcttgttgggattggcacttctgttaggcgtgagagaagaacagctggagacagcctcacaaaggcaacaatgggacggtccaaaatatccacctctccaaccaggacattggaggcctcggccccagtaggaatttttttcatgaaatgaaggtctaccttgcttaaatccacaggactatgttcacaattcactccattttttacttcaagatttgtagttggaacagactgaggagacacggtttgaccatgtttatccatcaaatgaggatcagactgcttcttgccaacctcagcaaaggagcgaacaatgggaatgaggttgtttctcttcttttcattctgatgatgatgctttttgagaagggcttcccgcactttaaccctcatgctgtcattcaggtcactggacagttcttgctgatccaggatcaggtctgaaatttcttctatgctatttgcatgcatatccaggaggactgttccattaataaggcagctccttagctcaaacaggctgtgcaatgaaagggttgccacataaggcttgctccagcgttctcccccatcttcaacatcttcttcaaacttcagccacctggctgtttccttccactcagcatcttctccctctttcatacagatctcatccagctctgtaaacagctcatgaggcacatgctcttcatcttcctcggtgccaagaatgaactgaacacgctgagatggtgtgtcgtgggccagggcttccaggccttcctccccctggctggctcctttgccccgccctcgtctccggtgcttctggccatgagtgcggtgatgccgatggctctgccggccaagcggcatccgaactcccacatacagagttctgtgacctggaaagaagcagaaggtctgtggagagaactcctttagttttaaaaaacaacaacaacaaaaagcctagcatagttaagagaaaaaaatatcacagttctttggtctggtcacagctctggaacaacaaaacttcaaagacttccaggagtaaagatatagagattttggagttgaaggtctcttcctttgtcctgcacatgcctgcaaacttcacagggatcttgtgaagactgaaagaaataatgtgatttccaaactgtaaaggctgattcagatgttattgttatgacaatgacaatgacaatttgactgagtgatttttttaaaaggcaatacagttgctctatgacaagtgtggcaggtcttggcagggaggcagtttagaaaagtcgttaagagcacaggtaaggctcaaatcagcccacctgggtccaaaactcaattccatcattcacttgccatgtgaccttgaacaatttatccaa

SEQ ID NO: 185612 - DNA, 988 bp, Homo Sapiens
ttggctctccactgtccccttgtggaccagcttccactcactgtcacgtcccccctcctgcgtcttcactgggtctcaggctgccagcagctctctggtgcatcgtctcaacaccaccaagtttgtaggacctgcccaagttctagtagtattcaaaacttcaaacggcagtcatttgttctcctcggctctgtggcaaggatagccctttggagggggactcttgacctcggctgttagggatctgaacttggttttcccgtcagaagaatcagcaggacagatcgtagtgccttattccattgtcctcccctggccaggcctcctggctcagctggaagtgcatggcttctttctccctatctgtgtcctctgtcacttgctctttcactctctctctcattcccagagagccacgggggagggatcaccctcacccccaacaccctcttcctgagggctgtagccaggtccgcatctccccaccaccaccagggcactcactcgcagctatagcccaggacagaaaaactgtgctttggacaggtgcacactctctgcctcttacctctagccaggaggatgcctcagtctgttcattcgagactggccccgtctgaaccttctctgggcactggggactaaggttgcaggccttagcctcgtctcgtcccagaggcattggatcaggagaatgggaatttttttcctcccacctggacatagtttgcccctgtggctgcctttctgagggagtatactaaatgtttacttaagaaacaccctgtttacagccagaggagaaacacccaacactgagtggagatttgactctggacagggcctggcctccttagtggcactgccggggggccccagagcgaatgagggcagagatgcccgggcggggcaaacgccctccgctccctctgctcccaaccctgtggtgctaggaccactccccgccttccctacggcctcctcgccc

SEQ ID NO: 185613 - DNA, 1402 bp, Homo Sapiens
  misc_feature (1122)..(1145): n is a, c, g, or t
ttgggcagtaactacatcaatgctgctcttatggacagctacaggcaaccagctgctttcatcgtcacacaataccctctgccaaacactgtaaaagacttctggagattagtgtatgattatggctgtacctccattgtgatgttaaacgaagtcgacttgtcccagggctgccctcagtactggccagaggaagggatgctacgatatggccccatccaagtggaatgtatgtcttgttcaatggactgtgatgtgatcaaccggatttttaggatatgcaatctaacaagaccacaggaaggttatctgatggtgcaacagtttcagtacctaggatgggcttctcatcgagaagtgcctggatccaaaaggtcattcttgaaactgatacttcaggtggaaaagtggcaggaggaatgcgaggaaggggaaggccggacgattatccactgcctaaatggtggcgggcgaagtggcatgttctgtgctataggcatcgttgttgaaatggtgaaacggcaaaatgttgtcgatgttttccatgcagtaaagacactgaggaacagcaagccaaacatggtggaagccccggagcaataccgtttctgctatgatgtagctttggagtacctggaatcatcttagttgggtgagactctttaaagtgcatccatgaagaaacctgtccatctattgagccagcagctgttgtacctgttacacttgtgcagaaagattttaatgtggggggtgggagacttttacatttgagaggtaaaagtattttttttatgaagttgtgtatcttaataaaaagaactgaattagtttttattactatattaaagcatcaacatttcatgccacataaattatatttaataagaaccagattgaaatgagaacgtattggtgtttgtacagtgaacatgccaccttttttctcatggtttcagtagagcagctaccacatgttgcatgagttcatactttctacgtggcatttttctccctttctaaaatgaaagctgatgaatcttaaaaggaagaagaaaagaaaagctgtgcaaattcatagtaaagttcgttttttatatgtttccagtgtagcagatctcnnnnnnnnnnnnnnnnnnnnnnnnactggcttattttcttttaatgtgcaatgatggctggatcatttaaagttctttttagaaaataacataagccaaagactcaagtgtaaatatgtctatatggagaaagcacattatatttattggttacttacattccttttttgatggctaaaatactaccaccacacaatcatcttttttttcctgaagaaagctttttctttagctaaaatcaattgtaaacgatttttgtagattattttttgtatgtttta

SEQ ID NO: 185614 - DNA, 1834 bp, Homo Sapiens
  misc_feature (614)..(657): n is a, c, g, or t
  misc_feature (679)..(782): n is a, c, g, or t
  misc_feature (803)..(818): n is a, c, g, or t
  misc_feature (820)..(918): n is a, c, g, or t
ttgggccattcatgggggaatctgcccccatgacccagacccctcccgttaggcttcacctccaacactgaggatcaaatttcaacatgagatttggaggaggtcaaacaaactaaactgtagcagtgtttcataaaattgtttgcctgactcaggttgctagtaagccagcagagggatatttgcctcctaaatctttggcagaggcaggagtaaggaagccatttctggagtccttgctactaatttggaaaactgagcttctttctttcattgctttttcccttaagagacaagtccttactatattgccctgtctctcaagggaagacatcaagactggacttgaactcctgggctcaagccatcccccaaccttggcctctcgagtagatgggattataggcatgtgccacggtgcctgacttgagtttcttattctagaacacttggagcctgaactctgaccaggcccctcacttgagcctttgctttctgctccttgtaaactgccatattgggtgcacttgccctgccacagtaatgctatatatttctgagcattgtttttctctagataattttatatttttgagtataccccacttccaagnnnnnnnnnnnnnnnnnnnnnnnnnnnnnnnnnnnnnnnnnnnnagacagggtctcactgtgtccnnnnnnnnnnnnnnnnnnnnnnnnnnnnnnnnnnnnnnnnnnnnnnnnnnnnnnnnnnnnnnnnnnnnnnnnnnnnnnnnnnnnnnnnnnnnnnnnnnnnnnnnagtgcaccaccatgcctggcnnnnnnnnnnnnnnnngnnnnnnnnnnnnnnnnnnnnnnnnnnnnnnnnnnnnnnnnnnnnnnnnnnnnnnnnnnnnnnnnnnnnnnnnnnnnnnnnnnnnnnnnnnnnnnnnnnnatgagtgaccatgcctagctcacttccaggtttaacagacaaaataaacttactctagtttccatctctatcattttataataaccgtagcccacattgtagtagtttttcagctctttactaagtcccaccaattcatgttttcacccttaaaatctttctcactgatactctctctggacagaaaaaaggtgaaataagcctactataaggaatatatgacatgctaaaattttatttttaaacggttcttcaagtcagattaaagtaataatagcaaattatgtgattatccatgtcccagcctctctccaaaaaaatagtaaacaagatgtcttcttcttttcccaaagatacacatacacacatgtacaaatttttttatcagataataatagctaatatttaatgagtacttaccttagtttgtcccctttacaacagctttacatctgtgtgattgatacagttcatattcccattttataactgagaaaactggtgcacagagaggataagcaacttgccaaaggtcacacagttaataagtggatgctggggtatgaaccaggtagtctgcccccatagctctgccccccagagctgtactgtctcccatgagggtacttctccatggagcagcctgaggcgatccctttattctgggcttctctcagaaatggattcccacacagtattcaaagcaaatttccccagaggaaatcctattggaagaacttaaaaactcagaatctttttctttgtccagagagttgaggaagcttaggctaaatgatacatgtttttaaaaagaaatcagattataaattttagttttttggtgattcattaaattctttactattatagttattttcgaagtgttcatcttttgagcgaagtttgttccaaagaa

SEQ ID NO: 185615 - DNA, 1945 bp, Homo Sapiens
ttggtgcctatgtgtcccctagtggttatcgtttagttagtgaaacagaatggaatctcttgcagaaagaggtacataatgctggaaataaacttggtagacgttgtgatatgtgttccaattacgaaaaacagttacaaggaattcagattcaggaggctgaaacgagagaccaggtgaaaaaactacagctgatgctaaggcaagctaatgaccagttagagaagacaatgaaagataagcaggagctggaagacttcataaagcaaagcagcgaagattcgagtcaccagatctctgcactcgtcctaagagcccaggcctccgagatcttacttgaagagttacagcaggggctttcccaggcaaagagggatgttcaggaacagatggcggtgctgatgcagtcacgggaacaggtttcagaagagctggtgaggttacagaaagataatgacagtctccagggaaagcacagcctgcatgtgtcattacagcaagcagaagacttcatcctcccagacactacagaggcactgcgggagttggtattaaaataccgtgaggacatcattaatgtgcggacagcagcagaccacgtagaagaaaagctgaaggctgagatacttttcctaaaagagcagatccaagcagaacagtgtttaaaagaaaatcttgaagaaactctgcaactagaaatagaaaactgcaaggaggaaatagcttctatttctagcctaaaagctgaattagaaagaataaaagtggaaaaaggacagttggagtccacattaagagagaagtctcaacagcttgagagtcttcaggaaataaagatcagtttggaagagcagttaaagaaagagactgctgctaaggctaccgttgaacaactaatgtttgaagagaagaataaagctcagagattacagacagaattagatgtcagtgagcaagtccagagggattttgtaaagctttcacagacccttcaggtgcagttagagcggatccggcaagctgactccttggagagaatccgggcaattctgaatgatactaaactgacagacattaaccagcttcctgagacatgacaccctcatggcaggattctagcctgcactttgggtttttaactcatctttagagcaacagtaattattatttaactcttaactgaagaaagagaagtcacaacaaaaggaagactggagaaatgcttacttctagagggagaagactgtgcggcacaggaaacagcaaacagcggggtgatctgcagcccagagaccttcaaatgcgaacactataaactccaggcttgattccaacaggcgtgggatcagatttggtgatggaaaaagcgctgtttccttgcctgctttctccaagacagattttcggaacacatttccctaccctaaagcgacatcccagtagtgtttggaattttctgttcatagatattggaagagagaatttgctttatctgttgtctagagctcatcagtaacagtattcagttagcagacagaagtgtagtatgctgtatgaatattttatattaaaatatgaaggtttgagagcaggccattggctactgactgtattttgttttccttttaccattttatcttatcttgctttggaggaccttaaatgctactgaaacttacctgagaaccataggactgtggcaaacaaaaccaattcatgaagtgaattaatgatgaggatctgaaaacttggctggggctatatatactggaagttgaaggttaaaggaaaagcacaagaaactttggaagcactttttctgcatacttagatgatcttcatgggcccacagggtaccaggataaagccgaactggtaccatctactcttttgaagtgttttagtctagttattggatcagtgaaaaacattagtatacgttttt

SEQ ID NO: 185616 - DNA, 1612 bp, Homo Sapiens
ttgggtggcgattggtgttggcggtctggctcagctgggcagggggtaactttactgatttgggggtggtttttagtttaatttttcttttctagcttcccatcgacggtcagtgcgcacgttgtaatcagctgaggccatgtcaggagacggagccacggagcaggcagctgagtatgtcccagagaaggtgaagaaagcggaaaagaaattagaagagaatccatatgaccttgatgcttggagcattctcattcgagaggcacagaatcaacctatagacaaagcacggaagacttatgaacgccttgttgcccagttccccagttctggcagattctggaaactgtacattgaagcagagattaaagctaaaaattatgacaaggttgaaaagctatttcagagatgccttatgaaggttttgcacattgatttatggaagtgttatctttcatatgtccgagaaaccaagggtaaactaccaagttacaaagaaaaaatggctcaagcatatgactttgcactggataaaattggaatggaaattatgtcctatcagatttgggtggattacatcaatttcctaaaaggcgtggaagctgtaggatcttatgcagaaaatcaaagaataacagctgtccgaagagtttatcaacgaggttgtgttaatccgatgatcaacattgaacagctctggagagactataacaagtatgaagagggtatcaatattcatttagctaaaaaaatgattgaagatcggagtagagattatatgaatgctagacgtgtagcaaaggaatatgagacagtaatgaaaggcttggaccgtaatgctccctcggtgcctcctcagaatactcctcaagaagctcaacaagtagatatgtggaagaaatatatacagtgggaaaagagcaaccctcttcgtacagaggatcagacccttataacaaaaagagttatgtttgcttatgaacagtgcctgcttgtgctgggccatcaccctgatatttggtatgaagctgcccagtatcttgagcagtcaagtaaactgctcgcagaaaagggagatatgaataatgccaaattatttagtgatgaagctgctaatatatatgaaagagccataagcactttattgaagaagaatatgcttctttattttgcatatgcagattatgaagagagtcgcatgaagtatgaaaaggttcacagtatatataacagacttctggcaattgaggatattgaccctaccttggtatatatccaatatatgaaatttgcacggagagcagaaggcatcaaatctggaagaatgatatttaaaaaagcaagagaagataccagaacccgccaccatgtctatgttactgcagcactcatggaatattactgtagtaaggacaaatctgttgcctttaagatttttgagctggggctaaaaaatatggagacattccagagtatgtcctgacctatattgactatctttctcacctcaatgaggacaataatacccgagttttgtttgaacgagttttaacatctgggaagccttcctcctgagaagtctggagaaatctgggcccgatttctagcattt

SEQ ID NO: 185617 - DNA, 962 bp, Homo Sapiens
acccccacctccagcatctctcctaccctttcacaccacagcttagatatccctgctccccctccacacagaaaaccagaagtgtggggggaagaaagtttgggggccccctcccgtggcaggttaagggactgtaccctcaaacccttaaaattgtgccatttaaaaagacaatagacccttcctcaatcagttcacccaatgagaggacagctctctctgggctcaatagtcctggagaggggcaagcatccccgttttccagcaagtcccatacacacattggcagtgactagtacccccaccctaaattcagggggggcagtcagaggagctgggcagtgatggggcaacaccccccaaattggggaggagggttttcagtccaacccccagcaggggtgaggccagagatttcaggcaggaattggggggattctctgccctgccccactcctccccaaggcagtgatgacccccacacacacactggtagccacccctctcacaagagatcaattgtggccaacccccaactctcctggtgggaggaggaggtggatcaggcagatgggagggaaaccccatgggaatgtcagttgagtaccccacatgaaaactggggagcaggaatgtagggagaaacccgaagtggcagaattattggtccatcataacatactgaacttcaagacacttacataccagctgggggagggagaggagggtacaagaggtttggaaaatgagggtaagggaggcaaactggactagaggggctaggaggaggcaatgctggggaccagagcagcctggttccccaaaagcccaggctccccaccacctgcgagtaatgtcgtgcaaatgaaaatgtgatacaagaactaatggggactaactcctcagtaaaaaaagaaacacaggttgagagaagagtgatggaacaaaaagaaatggaccaa

SEQ ID NO: 185618 - DNA, 932 bp, Homo Sapiens
ttggctcaggtgctgacttgctgaagatgtcccgagatgatttggtccagatctgtggtcccgcagatgggatccggctcttcaacgccatcaaaggccggaatgtgaggccaaagatgaccatttatgtctgtcaggagctggagcagaatcgagtgcccctgcagcagaagcgggacggcagtggagacagcaacctgtctgtgtaccacgccatcttcctggaagagctgaccaccttggagctgattgagaagatcgccaacctgtacagcatctccccccagcacatccaccgagtctaccggcagggccccacgggcatccatgtggtggtgagcaacgagatggtgcagaacttccaagatgaatcctgttttgtcctcagcacaattaaagctgagagcaatgacggctaccacatcatcctgaaatgtggactctgagcagcagtggacctcatacctgtctccagctcccagccctgtggatccccgtggatgtagacattgccccactgtaagctgtggcctcaccaggcaagctgaggccaggagggaccctgcccagtctgtgaaagctacagagcaccaaccagcagaagcctgtggacaccaagtacggtgtacagaaagccagtggctcctttctcccttcctcttggcctccagattttgaatggttccttgttcttttctattggtccaaccctgacgttctaaaagggcaaacagtggagacgtctgctctgaaacccctcatcccttagttggaagctgattgggtatcttggtgctgcctgtattggtcccttctgaccactctcctgcctccagagaaagctctgcttcaccctggaagctggtacctttacctcctcctctgggagttggctgcatggccagcactgccgacttgatgggagcagtttg

SEQ ID NO: 185619 - DNA, 3188 bp, Homo Sapiens
  misc_feature (43)..(55): n is a, c, g, or t
  misc_feature (2704)..(2728): n is a, c, g, or t
ttgggatcaaagggtctgagtctgccacctacgtgcccgtggnnnnnnnnnnnnnagcctggcaaccagagatcaaaccggagcctgcctggcacgaccaggatgagacatcgagtgtgaagagtgatggggctggtggggcgcgggcttccttccgtggccgtggacgggggcgtggtcgcggccggggacgcggccggggtggcactcgaacccattttgactaccagtttggctaccgaaagtttgatggtgtggaggggcctcgtacgcccaagtacatgaacaacatcacctactactttgacaatgtcagcagcaccgagctttacagtgtggatcaggaactgctcaaagactacatcaagcgccagattgaatactacttcagcgtggacaatttagagcgagacttcttcctgcgaaggaaaatggatgctgatggtttcctacccatcacccttattgcttccttccaccgagtgcaggcccttaccactgacatttcactcatctttgcggccctaaaggacagcaaggtggtggagatcgttgatgagaaagttcgtaggagggaggaaccagaaaagtggcctcttcccccaatagtggattattcacagactgatttctcccagcttctcaactgccctgaatttgttccccgtcagcactaccaaaaggagacagagtcggcacctggctctcctcgtgcagtcaccccagtgccaaccaaaacagaggaggtcagcaacctaaagacactacccaagggcctgtctgccagcctgcctgacctggattctgagaactggattgaagtgaagaagaggcctcggccatccccagcacggcccaagaagtcagaggagtccagattttcccacctgacctctctgcctcagcagctgccttcccagcagctgatgtccaaggatcaagatgagcaagaggaactggattttctgtttgacgaggagatggagcagatggatgggcggaagaaacaccttcactgcctggtctgatgaggaatctgactatgagattgatgacagggatgtcaacaagatcctcattgtcacccagacaccacattacatgcgccggcacccagggggggaccgcacaggcaaccacacctcgcgtgccaagatgagcgccgaactggccaaggtcattaatgatggcctcttctactatgagcaggacctgtgggctgaaaagtttgaacctgagtattcccagatcaagcaagaagtcgagaacttcaaaaaggtcaatatgatcagccgggagcagtttgacacactgacccctgagccccctgtggatcccaaccaggaagttcctcctgggccacctcggttccagcaagttcctacggatgccctggccaacaagttgtttggtgctcctgagccctccaccatcgcccgctctctaccaaccactgtcccagagtcaccaaactaccgcaacaccaggacccctcgcactccccggacaccacagctcaaagactcaagccagacatcacggttttacccagtggtgaaagaaggacggacactggatgccaagatgcctcgaaaaagaaagacaagacacagttcaaacccacccttggagagccatgtgggctgggtgatggattcccgtgagcacaggccccgtactgcttccatcagctccagcccctcagaagggacgcctacagttggcagctatggctgtacccctcagtcattgcccaagttccagcatccttcccatgaactgctcaaggaaaatggcttcacacaacacgtctaccataagtatcgtaggcgctgccttaatgagcggaaacgcttgggcattggccagtctcaggagatgaacacactcttccgcttctggtccttcttcctccgagatcacttcaacaaaaagatgtatgaggagttcaagcagctggctctggaggacgccaaagaaggctacagatatggtttggagtgcctttttcgatactacagttatggcctggaaaagaagttccggctggacatattcaaggattttcaggaggaaacggtgaaggactatgaagctggccaactgtatgggctggagaagttctgggccttcttgaaatattccaaagccaaaaatttggacattgaccccaaactgcaagaatacctcggcaaattccgacgtcttgaagacttccgagtagatccccccatgggtgaggagggcaaccacaagcgacactcagtggtagcaggaggtggcggcggtgagggcaggaagcggtgcccctcccagtcttccagcaggcctgctgccatgatcagccaaccccctacaccacccaccggccagcctgtccgggaagatgccaaatggacaagccagcactcgaacacacagactttgggaaagtgaaaagctccttagccctggggcttgaggggggaaaggggtagggtgggtaagagtccatgggggtgcccagtcccaggagaggggacaatgaagggacaggcctggagttactaggacaggcctttgtgctgagtagcaatgtatacaccatttgggctatcagaggtacccctgggcaggagcctctacatccccttccccctcctctctccatgactcttgacatcctagcttcttctaaggggggagggaaaggggggagattttnnnnnnnnnnnnnnnnnnnnnnnnncaagttttaaattattgatagttcatctggattaccaaaatcactctgcagccctgcccgaggctagtaggctgcaaccctggtccccacccctaacctcctgctccccctcaagccaactatgcagcccacaagaaggccctgcgggcccccccattgcccagcactgtctcatagaaggctctggtggtacctctgggccccaggagcatcagccccttgatcatctggggtttgtcatcaccatattttctccctgctgttcccaccatgcccttctgccatcttctgggagaaggaaaccaaaggatctaaaactggggtttgggggaaggtttcagcctctccccactccccttgccccacaccctttactccccagcccagagagacgctgcttttaccaggaaagactattgaaagatgttttattttatttttctctgacctttccatcctt

SEQ ID NO: 185620 - DNA, 1704 bp, Homo Sapiens
ttggcctgaagcacctgagatgctagctgggtatacaatagtgccactcatccaatttaagaataataccatacaataaagttcagaatatatggcaaaaactacaaatagtcatgcatgtgggctaggaatagtcatgcatgtgagctaggaatgctgtcaatgagtttgttgacatggatccttttccttatagagtttgtgatcctacgagatgagaaatggggtggaaacaaaacctacacagcttacgtggacctggaaaaggactttgctgctgaggttgtacatcctggagacctgaagaattctgttgaagtcgcactgaacaagttgctggatccaatccgggaaaagtttaatacccctgccctgaaaaaactggccagcgctgcctacccagatccctcaaagcagaagccaatggccaaaggccctgccaagaattcagaaccagaggaggtcatcccatcccggctggatatccgtgtggggaaaatcatcactgtggagaagcacccagatgcagacagcctgtatgtagagaagattgacgtgggggaagctgaaccacggactgtggtgagcggcctggtacagttcgtgcccaaggaggaactgcaggacaggctggtagtggtgctgtgcaacctgaaaccccagaagatgagaggagtcgagtcccaaggcatgcttctgtgtgcttctatagaagggataaaccgccaggttgaacctctggaccctccggcaggctctgctcctggtgagcacgtgtttgtgaagggctatgaaaagggccaaccagatgaggagctcaagcccaagaagaaagtcttcgagaagttgcaggctgacttcaaaatttctgaggagtgcatcgcacagtggaagcaaaccaacttcatgaccaagctgggctccatttcctgtaaatcgctgaaaggggggaacattagctagccagcccagcatcttccccccttcttccaccactgagtcatctgctgtctcttcagtctgctccatccatcacccatttacccatctctcaggacacggaagcagcgggtttggactctttattcggtgcagaactcggcaaggggcagcttaccctccccagaacccaggatcatcctgtctggctgcagtgagagaccaacccctaacaagggctgggccacagcagggagtccagccctaccttcttcccttggcagctggagaaatctggtttcaatataactcattcaaaaatttatgccacagtccttataattggaaaaatactggtgcccaggttttcttggagttatccaagcagctgcgcccctagctgggatctggtacctggactaggctaattacagcttctccccaacaggaaactgtgggatttgaaaaggaaagggaagggaaaacagagaacctagtggtctaccaagtggttggcaactttcccaatgtctgcttactctgaggcttggcactgggggccagggcctgccccagggctcctggaatttctcttgatccagctaggctgggacactccctaaatcagctgcgtgttgttagcatcaggcagaatgaatggcagagagtgattctgtcttcatagatggtggggtacttctccataaggcatctcagtcaaatccccatcactgtcataaattcaaataaaatgtctgaacaagg

SEQ ID NO: 185621 - DNA, 1588 bp, Homo Sapiens
ttgggctggactcgcgtgacagttcccggcacgcggcggcgacggtgacccaggaaggggctctggtgccgggctgagcgggggaagcaggggtagcggagccatgggggacgctcccagccctgaagagaaactgcaccttatcacccggaacctgcaggtaacaattctgtttgcggacctccacgcatacctggataacatgaaagccccatgggaacttctagaactccgagtcagttactatgagaatgtgatcaaagcaatgctggagagcattggtgtgcccttggagaagctcaagttcatcaaaggcactgattaccagctcagcaaagagtacacactagatgtgtacagactctcctccgtggtcacacagcacgattccaagaaggctggagctgaggtggtaaagcaggtggagcaccctttgctgagtggcctcttataccccggactgcaggctttggatgaagagtatttaaaagtagatgcccaatttggaggcattgatcagagaaagattttcacctttgcagagaagtacctccctgcacttggctattcaaaacgggtccatctgatgaatcctatggttccaggattaacaggcagcaaaatgagctcttcagaagaggagtccaagattgatctccttgatcggaaggaggatgtgaagaaaaaactgaagaaggccttctgtgagccaggaaatgtggagaacaatggggttctgtccttcatcaagcatgtcctttttccccttaagtccggtaacactctctgttttcttcctagaggccaggctagaatagaaaagttcgtgctgtgatcatacttgtgatttgtcacagactcttccttcagggactggctgccctgattctctgctctgatttcttatatattaaagtatgaatgatgttgggatgtaatttaattgtccatatattcgttaccaggctaggttctgagggaatactggagtgggcagaggtgttagaagtaagggtgggggcagacatgttgaactagaggaatacaacaaaatagatataagccacaagccttcccctgaagcagctgagatgctagctgggtatacaatagtgccactcatccaatttaagaataataccatacaataaagttcagaatatatggcaaaaactacaaatagtcatgcatgtgagctaggaatgctgtcaatgagtttgttgacatggatccttttccttatagagtttgtgatcctacgagatgagaaatggggtggaaacaaaacctacacagcttacgtggacctggaaaaggactttgctgctgaggtaacatgaaaggaaaaggaatcctttcatgaagatctgtattttgttattttttgctgactgttagaacttgtttagaacaacttgttctgtgtaaaagtgagctgcctgctatttttgctctacttttggtaatctcactagtgtccattttccttcaaattgcagttttggttaaagtttcttgtcagttagcttttctgacttagaaatttgttaatgcagatgggatttctatccctccggggcccttcctt

SEQ ID NO: 185622 - DNA, 1761 bp, Homo Sapiens
ttggctttttccggccgctgccggaggggtccaggccgagtaagcggagcgccgagcccagctgatgcaacctggctggactcgcgtgacagttcccggcacgcggcggcgacggtgacccaggaaggggctctggtgccgggctgagcgggggaagcaggggtagcggagccatgggggacgctcccagccctgaagagaaactgcaccttatcacccggaacctgcaggaggttctgggggaagagaagctgaaggagatactgaaggagcgggaacttaaaatttactggggaacggcaaccacgggcaaaccacatgtggcttactttgtgcccatgtcaaagattgcagacttcttaaaggcagggtgtgaggtaacaattctgtttgcggacctccacgcatacctggataacatgaaagccccatgggaacttctagaactccgagtcagttactatgagaatgtgatcaaagcaatgctggagagcattggtgtgcccttggagaagctcaagttcatcaaaggcactgattaccagctcagcaaagagtacacactagatgtgtacagactctcctccgtggtcacacagcacgattccaagaaggctggagctgaggtggtaaagcaggtggagcaccctttgctgagtggcctcttataccccggactgcaggctttggatgaagagtatttaaaagtagatgcccaatttggaggcattgatcagagaaagattttcacctttgcagagaagtacctccctgcacttggctattcaaaacgggtccatctgatgaatcctatggttccaggattaacaggcagcaaaatgagctcttcagaagaggagtccaagattgatctccttgatcggaaggaggatgtgaagaaaaaactgaagaaggccttctgtgagccaggaaatgtggagaacaatggggttctgtccttcatcaagcatgtcctttttccccttaagtccgagtttgtgatcctacgagatgagaaatggggtggaaacaaaacctacacagcttacgtggacctggaaaaggactttgctgctgaggttgtacatcctggagacctgaagaattctgttgaagtcgcactgaacaagttgctggatccaatccgggaaaagtttaatacccctgccctgaaaaaactggccagcgctgcctacccagatccctcaaagcagaagccaatggccaaaggccctgccaagaattcagaaccagaggaggtcatcccatcccggctggatatccgtgtggggaaaatcatcactgtggagaagcacccagatgcagacagcctgtatgtagagaagattgacgtgggggaagctgaaccacggactgtggtgagcggcctggtacagttcgtgcccaaggaggaactgcaggacaggctggtagtggtgctgtgcaacctgaaaccccagaagatgagaggagtcgagtcccaaggcatgcttctgtgtgcttctatagaagggataaaccgccaggttgaacctctggaccctccggcaggctctgctcctggtgagcacgtgtttgtgaagggctatgaaaagggcaaccagatgaggagctcagcccaagagaaagtcttcgagaagttgcaagctgacttcaaatttctgaggagtgcatcgcacagtggaagcaaaccaccttcatgaccaagctgggcttcatttcctgtaatcgctgaaagggggaacatttagctagcagccc

SEQ ID NO: 185623 - DNA, 3140 bp, Homo Sapiens
acaaaaaagttggacacagtttcaatgccgaagatattaattatgtagttcctagagtctcgtcaaattatgtagatgaagaacttctagattttttgcaagatgaaacttgccagcaaaacagtagaactttaggtgagattcctacattagttttcaaaaaaacatctaaactagaatccgtctgtggtattcagctagaacaaaaaacagaaaacaaaaattttgaaactacacaagtatgtaatgaaagtccacatggagatggctacagctcaggggttattaaagacatttggacaaagatggcagacacaaattctgtggctacagtagaaatagaaagaactgatgctgagttgttttcggcagatgtaaataactactgctgctgtctagatgctgaagctgaactggagacccttcaggagcctgataaggctgtgcggaggtcagagtaccatctgtgggagggacagaaagagagcctggagaaaagagcatttgcttctagtgagctatcaaacgtggatggtggtgattatacaacaccctctaaaccctgggatgtagcccaagataaagaaaacacattcattcttggaggagtttatggagaactcaaaaccttcaatagtgatggggagtgggcagtcgtaccacctagtcacacaaaaggaagtctgttacagtgtgcagcttctgatgttgtgacgatagctggtacagatgtctttatgaccccaggaaacagttttgctcctgggcacaggcagttatggaaacccttcgtgtcatttgaacagaatgatcagccgaagagtggggaaaatgggttaaataagggattttcttttatcttccatgaagacttactaggagcttgtggcaactttcaagtcgaagatcctggacttgaatactcattttcttcctttgacttaagcaatccattttcacaagttcttcatgtagaatgctcatttgaacctgaagggattgcatctttcagccccagttttaaaccgaaatcaatcctctgttctgattcagacagtgaagtgtttcaccccaggatatgtggtgttgacagaacacaatacagggctattcggatctctcctcggactcactttcgcccaatttctgcatccgaactgtccccaggaggaggaagcgagtcagaatttgaatctgagaaagatgaagcaaatattcccattccttctcaagttgatatatttgaagatccgcaggcagatctcaaacctttggaagaagatgcagagaaagaaggccattactatggaaaatcagagcttgagtctggaaaattccttcccaggttaaaaaaatctgggatggaaaagagtgctcagacatcactggattcccaggaggaatcaactgggattctttcagtaggaaagcaaaatcagtgtttggaatgtagcatgaatgaatccctggaaatagatttagaaagctcagaagcaaattgtaaaataatggcacaatgcgaggaagaaattaataatttttgtggttgcaaagcagttgtcagtttcctgcttatgaagataatccagtttcttcgggacagctggaagagttccctgtattgaacactgatatacaaggaatgaatagaagtcaagaaaaacagacctggtgggaaaaagccttgtactctcctctttttcctgcatcagagtgtgaaggtgtcttctgtttatgaagcaagatgtacaggagagagagattctggagcaaagtcagatggcttccgcggaaagatgtgctccagcgccagctccacctcggaagagacaggctcagaaggcggaggcgagtgggtgggccctagtgaagaggagctcttttctcgaactcatctctaaacctgcaaaatagtacaaattattgtttaaaaatgatatgtgatggaaaattactcttcagtgagacctgttaatctaaaacaacaacttaggtttcctcttcaattaactgattcagattggtaataattatctttctcttcttgcttattttagagttgaggacagctatcctgttaaagattttttttcccagctgttaaattcttggctatttgaaatagactagattgtgttgtcaaatcaagaatgggtgtgcatgtgcttgtcttagaagtatcactgctttttgcatcttaactgcagttaattttccttccgactgcggttatatcactatgaccttactagcattgcagtgtcaacaaccacttctgctcttcagagacttcagctttggagcatttaggctttgttctccaagaactgggatatccattcttaccctacagtggcttgatgcctttctgaaggcgagagggaagcctgggtgactcagcggtggtctccattcagcaaaatctcatgtacatttccagtaggaaccgcagaggtgtgcttttcaagactcaccaaatactgtgttttctctcttaggatttcttttcccctaaagtatcacggaagatactatggttcgtgactttcttgctaactgaagaagccaaggatttggggtgtggggtcgtatgcgagacacagtggggtaagggtgcataccccaccccttacctgctctcatactgcagttacatttacaccaaaaccccatgcagggttctttgtggtgagtgttccatacgtgctaaggaccttagttgcagattgttactttctggtgacctatgttgaattgaaacccccaaaacttgaaattgtgaacatttgacatgcagtaaaggccacctcatcacccagagaaatctttggctgctgcagctagccgcttcttggctgtgatgtagtatagcttcgatctcattttgtgtttgagagaatgttctgggcaagttctgtgtgtggtgggttggggcgggtagagtcatgagttttccacatccctgtgtggtggttttgctgactgtcgctccgtgggactggctcccgtttctccttggtgagcccggggagccggcgcatcttgtgagtcgcgtctgtgcatggcgatccgctcctccggctctcatggcattgtgccacaggcaggggccaggaggagcagtatgtgcacagccgaaa

SEQ ID NO: 185624 - DNA, 2837 bp, Homo Sapiens
  misc_feature (1248)..(1281): n is a, c, g, or t
  misc_feature (1836)..(1847): n is a, c, g, or t
ttgggaaaattgtgccattttataatggaggcaactgcgtaactgatgagtttgaagaaggcatccaagatatcattctgaggctgacacatgttaaaactggaggaaaaatctccttgcggaaagcaaggtatcacactttaaccaaaatctgtgcggtgcaagagataatcgaagactgcatgaaaaagcagccttccctgccgctttccgaggatgcacatccttccgttgccaaaatcaacttcgtgatgtgtgaggtgaacaaggcccgaggggtcctgattgcacttctgatgggtgtgaacaacaatgagacctgcaggcacttatcctgtgtgctctcggggctgatcgctgacctggatgctctagatgtgtgcggccggacagaaatcagaaattatcggagggaggtagtagaagatatcaacaaattattgaaatatctggatttggaagaggaagcagacacaactaaagcatttgacctgagacagaatcattccattttaaaaatagaaaaggtcctcaagagaatgagagaaataaaaaatgaacttctccaagcacaaaacccttctgaattgtacctgagctccaaaacagaattgcagggtttaattggacagttggatgaggtaagtcttgaaaaaaacccctgcatccgggaagccaggagaagagcagtgatcgaggtgcaaactctgatcacatatattgacttgaaggaggcccttgagaaaagaaagctgtttgcttgtgaggagcacccatcccataaagccgtctggaacgtccttggaaacttgtctgagatccagggagaagttctttcatttgatggaaatcgaaccgataagaactacatccggctggaagagctgctcaccaagcagctgctagccctggatgctgttgatccgcagggagaagagaagtgtaaggctgccaggaaacaagctgtgaggcttgcgcagaatattctcagctatctcgacctgaaatctgatgaatgggagtactgaaataccagagatctcacttttgatactgttttgcacttcatatgtgcttctatgtatagagagctttcagttcattgatttatacgtgcatatttcagtctcagtatttatgattgaagcaaattctattcagtatctgctgcttttgatgttgcaagacaaatatcattacagcacgttaacttttccattcggatcattatctgtatgatgtggtgtnnnnnnnnnnnnnnnnnnnnnnnnnnnnnnnnnnaatcagaaaacaaaatagaggcagcttttgtagattttaaatgggttgtgcaagcattaaaatgcaggtctttcagaatctagaactaggcataaccttacataatactaggaaaattatgagaaaggggaaatttttggttaaataagagtaaggttcaaacacaagcagtacatgttctgtttcattatgctcgatagaaggcttttttttcacttataaggcctgattggtcctacccagcttaacggggtggggtttttttgtttgttcagacagtctgttcttttgtaaacatttttagttggaaaaacagcatctgcattttccccatcctctacgttttagagaggaatcttgtttttgtgtgcaacataagaaaattatgaaaactaatagccaaaaaacctttgagattgcattaaagagaagggataaaggaccagcaataataccttgtaagttgcttttgtttgtaaaatctgagcttatagttttccttagtgagtaaattcataaggatgggaacatttaaattaagttaatgggcctttnnnnnnnnnnnnggaaacactcatacctgtagttggaggatgaatactggagacgggttaccaatgtcaggttatactaaaactaaatcagaaagtctgaatgtagcacataatggttctcttctgttgtccaaggctgtaaaatggacagccttgtcacacctccccggtgctgttttacaacgtgagggtagacgctgtcagtaacccagagggaccaggccttcctaggttttctaggcagtcagctgttaaccactcacttagtaaatgtcataactacacctgctccaggaccaatcagtgaaacctgctcggaattaaaggcttcctctgggtgcctgctgaacaactgagctcatgtcatgggcatgtggtggtttctctgttgcctgaaagagccattaaagtcagtcgtgcgtgaagcatctctcttctaaaggatgtgtatttccataaatgctttctgaggatccggtacaaaatgatttcccaaagttctgaagtgccttgagaacatgtgggtccgagtgttataacagactcctcccccgggtcaccttttgcctggtcatcctgttagagtacatctttggaaatccagggtaatattctctttcagagatgctcattgtgtaactctgtgtagggagatagtcactttaaacagctcaaagtagctagctaaaggagtagccttaaatacctaaaagatgacagaagcatagcccttaacaaatcttcagcttgtctctcagtatttcccaatcatgaaaatcccttgctatgtctttcctactagaaatgttctagaatcgctggacggtggggtcagagggcagtcggtatttaggccgtgagcttcccatactactgcaggtccaactcctggcaaccgcgggctcaaggcaggtcattggaatccacgttttggccacagtagttgtaggattgcttttctgtatcataattttagaatgctcttaaaatcttgaggaagag

SEQ ID NO: 185625 - DNA, 672 bp, Homo Sapiens
ctttaaaagccaactttgtacaaaaaagttgggtcatgggcccgtggtggtttctctgttgcctgaaagagccattaaagtcagtcgtgcgtgaagcatctctcttctaaaggatgtgtatttccataaatgctttctgaggatccggtacaaaatgatttcccaaagttctgaagtgccttgagaacatgtgggtccgagtgttataacagactcctcccccgggtcaccttttgcctggtcatcctgttagagtacatctttggaaatccagggtaatattctctttcagagatgctcattgtgtaactctgtgtagggagatagtcactttaaacagctcaaagtagctagctaaaggagtagccttaaatacctaaaagatgacagaagcatagcccttaacaaatcttcagcttgtctctcagtatttcccaatcatgaaaatcccttgctatgtctttcctactagaaatgttctagaatcgctggacggtggggtcagagggcagtcggtatttaggccgtgagcttcccatactactgcaggtccaactcctggcaaccgcgggctcaaggcaggtcattggaatccacgttttggccacagtagttgtaggattgcttttctgtatcataattttagaatgctcttaaaatcttgaggaagag

SEQ ID NO: 185626 - DNA, 2047 bp, Homo Sapiens
ttgggtttggtaccccaggactcgctggtcaggaaagccctgcaggacatgagtgttaggcccgacgcctggcccttggcagcttgggaggtggctggggctgcttttgcctttgccagagacagctccaactgaggacctctccaacgggcccatccacagtccttccttcccctagtgtctgggaagacaggcgcgatgatggactccccgttcctggagctgtggcagtccaaggcagtgtccatcagggagcagctgggactcggggaccggcccaacgactcctattgctacaactcggccaaaaacagcaccgtgctccagggggtcacctttggtggcatccccactgtcctgctcatagacgtcagctgcttcctgttcttaatcttggtgttttctattataagaagaagattctgggactatggccgcattgccctggtgtcagaagcagacagcgagtccagatttcagagattgtcatcgacttcctcctcaggtcaacaagactttgaaaatgagctgggatgctgtccctggctgactgccatcttccgtctgcatgatgaccagatcctggaatggtgtggggaggacgccatccactacctgtccttccagaggcacatcatcttcctgttggtggtggtcagctttttgtccctgtgtgtcatcctgcctgtcaacctctcaggggacttgctggacaaagacccgtatagttttgggaggacaacaatagcaaacctacagactgacaatgacctcctttggctgcacaccatctttgctgtcatttacctcttcctcactgtgggtttcatgcggcaccacactcagtccattaagtacaaagaggagaacctggtgaggcggaccctgttcatcacaggactccccagagatgccaggaaggagactgtggagagccacttccgggacgcgtatcccacgtgtgaggtggttgatgtgcagctgtgctacaacgtggccaaactgatctacctgtgcaaggagaaaaagaagactgagaagagcctgacctattacacaaacctgcaggtgaagacaggccagcggaccctcatcaaccccaagccctgtggccagttttgctgctgtgaagtgctgggctgtgagtgggaagacgccatctcttactacacacggatgaaggacaggctgctggagaggatcacagaggaagaacgccacgtccaggaccagcccctgggaatggccttcgtcaccttccaggagaagtccatggccacctacatcctgaaagatttcaatgcctgcaagtgtcagagccttcagtgcaaaggtgagccccagccgtcctcccatagcagggagctctatacctccaagtggacagtcacctttgctgctgaccctgaggacatctgctggaagaacctctctatccagggcctccgctggtggctacagtggctgggcatcaacttcaccctcttcctggggctatttttcctgaccacaccctccatcatcctgtccaccatggacaagtttaatgtcaccaaacccatccatgcgctgaataacccgatcatcagccagttcttccccaccctcctgctctggtccttctcggccctgctcccctccattgtctactactctacactgctggagtctcactggaccaagtcgggggaaaaccagatcatgatgaccaaagtctacatattcttgatcttcatggtgctgatcctgccctccctgggtctcaccagtctagattttttcttccggtggctctttgacaaaacttcctcggaggcctccatcaggttggagtgcgtcttcctgcctgaccagggtgccttctttgtgaactatgtcatcgcctcggccttcatcggcaatggcatggagctgctgcggctgccaggtctcatcctctataccttccgcatgatcatggccaaaacggctgctgaccgcagaatgtcaagcaaaaccaggccttccagtacgagtttggaagccatgtatgcatggatgctgtgtg

SEQ ID NO: 185627 - DNA, 1457 bp, Homo Sapiens
acaaaaaagttggagccccctcagtgtgcaggcttagagggactaggctgggtgtggagctgcagcgtatccacaggccccaggatgcaggccctggtgctactcctctgcattggagccctcctcgggcacagcagctgccagaaccctgccagccccccggaggagggctccccagaccccgacagcacaggggcgctggtggaggaggaggatcctttcttcaaagtccccgtgaacaagctggcagcggctgtctccaacttcggctatgacctgtaccgggtgcgatccagcacgagccccacgaccaacgtgctcctgtctcctctcagtgtggccacggccctctcggccctctcgctgggagcggagcagcgaacagaatccatcattcaccgggctctctactatgacttgatcagcagcccagacatccatggtacctataaggagctccttgacacggtcactgccccccagaagaacctcaagagtgcctcccggatcgtctttgagaagaagctgcgcataaaatccagctttgtggcacctctggaaaagtcatatgggaccaggcccagagtcctgacgggcaaccctcgcttggacctgcaagagatcaacaactgggtgcaggcgcagatgaaagggaagctcgccaggtccacaaaggaaattcccgatgagatcagcattctccttctcggtgtggcgcacttcaaggggcagtgggtaacaaagtttgactccagaaagacttccctcgaggatttctacttggatgaagagaggaccgtgagggtccccatgatgtcggaccctaaggctgttttacgctatggcttggattcagatctcagctgcaagattgcccagctgcccttgaccggaagcatgagtatcatcttcttcctgcccctgaaagtgacccagaatttgaccttgatagaggagagcctcacctccgagttcattcatgacatagaccgagaactgaagaccgtgcaggcggtcctcactgtccccaagctgaagctgagttatgaaggcgaagtcaccaagtccctgcaggagatgaagctgcaatccttgtttgattcaccagactttagcaagatcacaggcaaacccatcaagctgactcaggtggaacaccgggctggctttgagtggaacgaggatggggcgggaaccacccccagcccagggctgcagcctgcccacctcaccttcccgctggactatcaccttaaccagcctttcatcttcgtactgagggacacagacacaggggcccttctcttcattggcaagattctggaccccaggggcccctaatatcccagtttaatattccaataccctagaagaaaacccgagggacagcagattccacaggacacgaaggctgcccctgtaggttccatgcatacaataaaagagctttatcccta

SEQ ID NO: 185628 - DNA, 937 bp, Homo Sapiens
ggtcaaattctgggtcacttcaggggcaggaagaagatgatactcatgccttccggtcaaagggcagctgggcaatcttgcagctgagatttgattccaagcccatagcgtaaaacagccttagggtccgacatcatggggacccctcacggtcctctcttcatccaagtagaaatcctcgagggaagtctttctggagtcaaacttttgttacccactgccccttgaagtgcgccacaccgagaaggagaatgctgatctcatcgggaatttcctttgtggacctggcgagcttccctttcatctgcgcctgcacccagttgttgatctcttgcaggtccaagcgagggttgcccgtcaggactctgggcctggtcccatatgacttttccagaggtgccacaaagctggattttatgcgcagcttcttctcaaagacgatccgggaggcactcttgaggttcttctggggggcggtgaccgtgtcaaggagctccttataggtaccatggatgtctgggctgctgatcaagtcatagtagagagcccggtgaatgatggattctgttcgctgctccgctcccagcgagagggccgagagggccgtggccacactgagaggagacaggagcacgttggtcgtggggctcgtgctggatcgcacccggtacaggtcatagccgaagttggagacagccgctgccagcttgttcacggggactttgaagaaaggatcctcctcctccaccagcgcccctgtgctgtcggggtctggggagccctcctccggggggctggcagggttctggcagctgctgtgcccgaggagggctccaatgcagaggagtagcaccagggcctgcatcctggggcctgtggatacgctgcagctccacacccagcctagccaacttttttacacaaagttggcttttat

SEQ ID NO: 185629 - DNA, 977 bp, Homo Sapiens
aagcacatatggaaattccagcgtcctggtgctcctctgtgtagacttcctccctttctcctacagggcagccagtcctctccacaggtgggccaccccaagtcctggcaaccatctcagtctttcctttcctgattccccaatggtagcgggaccacttttactctgccagctgtaaggatctatctgaaacagctggtgggacatgtgtaaagctgatagagtcccattctctggccagcaaatactcccaatagtctttcctaagagtggctagggcccagctgcagggagctgtctggcacagtggcagtgaagtctggcctaggggaccaaggattccatccactccctggagtagcagcccaagaacctgcctccacaaggtactggtttctcaacagaaagcatccattctctcagagctgtgcagagatggtgaaaatctaggcaggaagaaagcagcccctgtactcaagggcctctgtcctgggaatggagtcttctttccagcagcctgacacacagaagctctcaggacgaaggcaggtagtttccaggcaatcaatttagagtaaatgtattatttggccatcttaacaacaagggaagatagggtattgaaaagggaggaaaggggagcaaggcaggcagtgggaggtggggtagagtggtagatagtgtgctggccaaggaccctctacctctgctgtgtggccctgggccaagttatcacttctctggacccttggccctgtagttctctgctctgtccagctctcaggggcctagggatctacagttcttgggatgctataaaccaatgtaaccatgcccactaagtggcccaccaaaccctatttgggtttcctaggctgcagctcggcctgtgactcaaaaaagggggagcaaaaaataaatcacttggctgaggtgacagagattcttcttttttaatgagttggactcaaagccaa

SEQ ID NO: 185630 - DNA, 1165 bp, Homo Sapiens
  misc_feature (142)..(175): n is a, c, g, or t
ttggctagaggggcgcgacaaggaccagatgctgcaggagaaagacaagcagatcgaggcgctgacgcgcatgctccggcagaagcagcagctggtggagcggctcaagctgcagctggagcaggagaagcgagcccagcannnnnnnnnnnnnnnnnnnnnnnnnnnnnnnnnngtgaagcaggagaacagcttctccagctgccagctgagccagcagcccctgggccccgctcacccattcaaccccagcctggcagccccagccaccaaccacatagacccttgtgctgtggccccggggcccccgtccgtggtggtgaagcaggaagccttgcagcctgagcccgagccggtccccgccccccagttgcttctggggcctcagggccccggcctcatcaagggggttgcacctcccaccctcatcaccgactccacagggacccaccttgtcctcaccgtgaccaataagaatgcagacagccctggcctgtccagtgggagcccccagcagccctcgtcccagcctggctctccagcgcctgccccctctgcccagatggacctggagcacccactgcagcccctctttgggacccccacttctctgctgaagaaggaaccacctggctatgaggaagccatgagccagcagcccaaacagcaggaaaatggttcctcaagccagcagatggacgacctgtttgacattctcattcagagcggagaaatttcagcagatttcaaggagccgccatccctgccagggaaggagaagccatccccgaagacagtctgtgggtcccccctggcagcacagccatcaccttctgctgagctcccccaggctgccccacctcctccaggctcaccctccctccctggacgcctggaggacttcctggagagcagcacggggctgcccctgctgaccagtgggcatgacgggccagagcccctttccctcattgacgacctccatagccagatgctgagcagcactgccatcctggaccaccccccgtcacccatggacacctcggaattgcactttgttcctgagcccagcagcacccatggggcctggaacctggcctgatggccacctgggacagcatggactggctggagctgtcgtcaggtgggtcccgtgctgagccta

SEQ ID NO: 185631 - DNA, 975 bp, Homo Sapiens
  misc_feature (196)..(211): n is a, c, g, or t
aaaatcaattggtcagtcaaggttactggtgatttcctaaatgaaatctacatgcactagtatcttaaggtgccaactaacatagattaatgcccatcaataacgctgctaggtatcaactgctgtttctgaagaatcaacccacaaatgacctaaccgataatctatcacactaggtgcttttactatcttgagnnnnnnnnnnnnnnnngagttttagagaaatagtccttttaatatgacttagaaactgcttttctctggctttgtttcactcttcttcctcttccccttccccttcaccttcctccatcgtttccacaatgagctctgctgtgcaggtggcttctccaagactgttgacagccttgcaggtgtacttggcatcgtcatccccgcaaacatcactaataattaaagagcagttcccgtcctcatcgtagtctatctggaagtggcgggactccctgattgactggtcatctttgaaccagacaacctcggggtctgggtatccttcaatcttgcagtcaaatctagcagcacttccctccacaacttctaaatcgcgaatggtcttagagaaatagggttttacatgaggcttttcctcagcaacagcctcaaggaaagcttgggacacatcttcttcagattctagtttttctgcattgagcgggctggttggtgaccctgttgaggatttcctgccactgagccctgagatcattgccatagaggacagtcttccaatggctctcacagcattgcccgttttctggaaaatagacacgagggttggactcaggcgttgtccctggttccagctgggtagtgcgaggggctgcagggagtagagcccagccccagagaagcagctgttccctggaacaaggacctcctgagagccgaggttctgccagaggagcgccaacccaaccttgctctgctcagcactgtcagtgtgtcagccaa

SEQ ID NO: 185632 - DNA, 1165 bp, Homo Sapiens
  misc_feature (247)..(276): n is a, c, g, or t
  misc_feature (294)..(323): n is a, c, g, or t
  misc_feature (513)..(523): n is a, c, g, or t
ttggcccagctcaaactttgaaagcatgtccctgggcagcttcagttcgtcgtcggcgctcgaccgggacctggattttaacttcgagcccggctccggctcgcacttcgagttcccggactactgcacgcccgaggtgagcgagatgatctcgggagactggctcgagtccagcatctccaacctggttttcacctactgaagggcgcgcaggcagggagaagggccggggggggtaggagaggannnnnnnnnnnnnnnnnnnnnnnnnnnnnnggacagacgaagagtttnnnnnnnnnnnnnnnnnnnnnnnnnnnnnntaagcagggctggcttcgcccgcgttctcgtcgtcggatcaaggagcgcggcggcgttttggacccgcgctcccatcccccaccttcccgggccggggacccactctgcccagccggagggacgcggaggaggaagagggtagacaggggcgacctgtgattgttgttattgatgttgttgttgatggcnnnnnnnnnnngcgacttcgagtttgctcccctttgcttgaagagaccccctcccccttccaacgagcttccggacttgtctgcacccccagcaagaaggcgagttagttttctagagacttgaaggagtctcccccttcctgcatcaccaccttggttttgttttattttgcttcttggtcaagaaaggaggggagaacccagcgcacccctccccccctttttttaaacgcgtgatgaagacagaaggctccggggtgacgaatttggccgatgggatgttttgggggaacgccgggactgagagactccacgcaggcgaattcccgtttggggcttttttttcctccctcttttccccttgccccctctgcagccggaggaggagatgttgaggggaggaggccagccagtgtgaccggcgctaggaaatgacccgagaaccccgttggaagcgcagcagcgggagctaggggcgggggcggaggaggacacgaactggaagggggttcacggtcaaactgaaatggatttgcacgttggggagctggcggcggcggctgctgggcctccgccttcttttctacttgaaatccgtgaggtgagacttcccatacctcggaggcgcggaggagaggagactgtttgatgtg

SEQ ID NO: 185633 - DNA, 1416 bp, Homo Sapiens
  misc_feature (1289)..(1297): n is a, c, g, or t
ttggctttaaatcagtcagtagtactttacctttcaaggcattagtaaattacttgcaaatagttttaaaaggaaaatacgacctttgttataggcagtcttctctttaagacaatacttttccacttgttttccttttccatattatatatgtgtattcatatagctgtatacatattcagttgatcattttataaacatatgaaggcataaagatatacagaagaaaaattattaaacaactcattttaagattcaaattaactaattcctgcatatatgacattccttacataagcgaacactaaacaaaaatggctagaaatgtctttttctttcttttctctctttgttgtttaaggtattaagcacgaattattacatgagactggcagatagctattaatcctcttacagatttgagaaagttgattctcaaatatttatgcaccttctccttcattgttttctttaaatctgtcctcttaaaaagcttcttaagagctcagttaatgcttttgacttaactaggagaaaaaggcatgataatacaggcaagatggcattgttagcaattctggtagtggtttggaatgaatcctaagaggcagggatcttaaggacaaggaagagaagagagagagggagggatctttgatctctttctctggtaatcttaatgcataattttactaaaacatgttctcaattcattcatattattaagctcttcctgcagttgatatctgagcagagtaagatttgtatttccatttttacttttttgaaagagaatatatggacagattattagtacaatttgggcactgtggttttaagaatatctgagtaaaataacaatatgaaataataaacagaagctctaacgtcaggtaacaaatagacagcaagaaaggttttgcaccatcctcttacggcctagagagttgacaagttgcttgtagttttaaaaaaataataaagtatacccttctggtatatcatcaagagcttaagaatcttggctttcatatttaaaatgcttttggggagacatatattaaaattttagccaagatgatagacatgtctcaattatatatgtgtgtgtatgtttttaaagctaaaaacattacttttagatccctagaatgaaaatttttttctcatctatgcaattcccatatggttttttttaaatcatattttattcattttctccctttagcaattttcattttatttctcataatttgaacagagacagttctcatacatgatcagatgcnnnnnnnnncttcttaccatcatttatgcatgacataggtaatgtgactaatttctccagttgattcaagaaactcattactttgcctcaaattatatgtaaaatatttgttttacttaggttacagt

SEQ ID NO: 185634 - DNA, 1410 bp, Homo Sapiens
  misc_feature (403)..(466): n is a, c, g, or t
  misc_feature (500)..(508): n is a, c, g, or t
ttggaatatatggacagattattagtacaatttgggcactgtggttttaagaatatctgagtaaaataacaatatgaaataataaacagaagctctaacgtcaggtaacaaatagacagcaagaaaggttttgcaccatcctcttacggcctagagagttgacaagttgcttgtagttttaaaaaaataataaagtatacccttctggtatatcatcaagagcttaagaatcttggctttcatatttaaaatgcttttggggagacatatattaaaattttagccaagatgatagacatgtctcaattatatatgtgtgtgtatgtttttaaagctaaaaacattacttttagatccctagaatgaaaatttttttctcatctatgcaattcccatatggttnnnnnnnnnnnnnnnnnnnnnnnnnnnnnnnnnnnnnnnnnnnnnnnnnnnnnnnnnnnnnnnngaacagagacagttctcatacatgatcagatgcnnnnnnnnncttcttaccatcatttatgcatgacataggtaatgtgactaatttctccagttgattcaagaaactcattactttgcctcaaattatatgtaaaatatttgttttacttaggttacagttatcagaaaggtagtttttttcttctattaaaatataacattgtgaaagaaaataaaatttatgctattctttgctttgtttttataaatgaatttttcatagaatttacagtatattcaaaggaagaaagataaaattattggtcatcatttgtaccttagaagtacaagaatttaagtaaaagaaatgttcatttttgttttaaaatttgttttccatgtgaagtttttattgagccaactttcatacatatcttgctagcctaaagtctaaatatttgtgttggcatcagaaaaacaaatgaggcagaattgctatgtgtggttgatcttcagataaattgactgatcacagttatttttgtatcagtctatgttattaggaaaaattgtttagttgttttctcccctgattaatggtgatattcaagtatgatacaaaaagaattgtaccaccaaatatttttgtgaggtctgctgttttccatattcattttatgctactgcctttaagaaagaactagtgtatccttgaaatagcacacaagtgttttaaaattcataattgcaaaacaaatctgtgactaacttaaatgtcttccgatctaaaggtgtaaaaatattggatacttcatatttcacttgctgccaggaaaaacaaaattctcaatcttttgtaaatgggaggaggacttttggcatacatttttactcttttaataacgaccaccgacacctataccggtcctaataacaaattatggaatttctttgtgggtttaa

SEQ ID NO: 185635 - DNA, 1458 bp, Homo Sapiens
  misc_feature (570)..(627): n is a, c, g, or t
ttggcaacaaatgggagcgagaaagtcaagaaacgactagagaacttctgaaagttaaagacagattaattgaagtagaaagaaataatgctacactgcaagcagagaagcaagcgttgaaaactcaactgaagcaacttgagacacagaacaataatttgcaggctcagattcttgcacttcagaggcagacagtgtcattacaagaacagaataccactcttcaaacacagaatgccaagcttcaggttgaaaattccacccttaattcccaaagtacctcactcatgaaccagaatgcccaactcctaatccagcagtcttccttagaaaatgaaaatgaatctgtaatcaaagagcgagaagacctaaaatctctctatgattctctgatcaaagatcatgaaaagctggaacttcttcatgaacgtcaggcttcagagtatgaatctcttatctctaaacatggaactctgaagtctgcccacaaaaatcttgaggtggaacatagagaccttgaagaccgttacaatcagttattaaaacagaaaggacagttggaagatttgnnnnnnnnnnnnnnnnnnnnnnnnnnnnnnnnnnnnnnnnnnnnnnnnnnnnnnnnnncagtagctgcagaatacaagaaactttgtggtgaaaatgataggctgaatcatacctatagtcaacttttaaaagagactgaagttttacaaactgaccataaaaatttgaaaagtcttctgaataattccaaactggaacaaacaagattagaagctgaattttcaaaactaaaggaacaataccaacaattggatattacatcaaccaagctgaataaccagtgtgagttgctaagccaacttaaaggaaatttagaagaagaaaatcggcatctactagatcaaattcagacattaatgctacagaacagaacacttttggagcagaatatggaaagcaaggatctttttcatgttgaacaaagacagtacattgataagttaaatgaattaagacgtcagaaggagaaactagaagagaaaattatggatcaatacaaattttatgacccatctcctcctagaaggagaggcaactggattactctaaaaatgagaaaattgataaagtctaagaaagatattaatcgggaacgccagaaatctctaacattaacacccacccgctcagactccagtgaaggatttcttcagctccctcatcaagacagtcaagatagttcttcagtaggttcaaactctttagaagatggccagaccttggggaccaagaaaagcagcaccatgaatgacctggtgcagtccatggtcctagcagacagtggacaggtagtactgagaatttggaggttcctgatgatatttcaacgggtaaaaggagaaaagaattgggagctatggccttctctactacagccatcaacttttc

SEQ ID NO: 185636 - DNA, 2133 bp, Homo Sapiens
  misc_feature (1246)..(1254): n is a, c, g, or t
  misc_feature (1701)..(1717): n is a, c, g, or t
  misc_feature (2022)..(2048): n is a, c, g, or t
ttggcgtcacctcctcacgctgcggctgtcgcccgtgtcccgccggcccgttccgtgtcgccccgcagtgctgcggccgccgcggcaccatggctgtgtttgtcgtgctcctggcgttggtggcgggtgttttggggaacgagtttagtatattaaaatcaccagggtctgttgttttccgaaatggaaattggcctataccaggagagcggatcccagacgtggctgcattgtccatgggcttctctgtgaaagaagacctttcttggccaggactcgcagtgggtaacctgtttcatcgtcctcgggctaccgtcatggtgatggtgaagggagtgaacaaactggctctacccccaggcagtgtcatttcgtaccctttggagaatgcagttccttttagtcttgacagtgttgcaaattccattcactccttattttctgaggaaactcctgttgttttgcagttggctcccagtgaggaaagagtgtatatggtagggaaggcaaactcagtgtttgaagacctttcagtcaccttgcgccagctccgtaatcgcctgtttcaagaaaactctgttctcagttcactccccctcaattctctgagtaggaacaatgaagttgacctgctctttctttctgaactgcaagtgctacatgatatttcaagcttgctgtctcgtcataagcatctagccaaggatcattctcctgatttatattcactggagctggcaggtttggatgaaattgggaagcgttatggggaagactctgaacaattcagagatgcttctaagatccttgttgacgctctgcaaaagtttgcagatgacatgtacagtctttatggtgggaatgcagtggtagagttagtcactgtcaagtcatttgacacctccctcattaggaagacaaggactatccttgaggcaaaacaagcgaagaacccagcaagtccctataaccttgcatataagtataattttgaatattccgtggttttcaacatggtactttggataatgatcgccttggccttggctgtgattatcacctcttacaatatttggaacatggatcctggatatgatagcatcatttataggatgacaaaccagaagattcgaatggattgaatgttacctgtgccagaattagaaaagggggttggaaattggctgttttgttaaaatatatcttttagtgtgctttaaagtagatagtatactttacatttatnnnnnnnnntcaaattttgttctttattttgtgtgtgcctgtgatgtttttctagagtgaattatagtattgacgtgaatcccactgtggtatagattccataatatgcttgaatattatgatatagccatttaataacattgatttcattctgtttaatgaatttggaaatatgcactgaaagaaatgtaaaacatttagaatagctcgtgttatggaaaaaagtgcactgaatttattagacaaacttacgaatgcttaacttctttacacagcataggtgaaaatcatatttgggctattgtatactatgaacaatttgtaaatgtcttaatttgatgtaaataactctgaaacaagagaaaaggtttttaacttagagtagccctaaaatatggatgtgtttatataatcgcttagttttggaactgtttttgagtaacagaggacagctgnnnnnnnnnnnnnnnnngcaagtttgttgacctacatgggttaatatggatactaaaaatattacattaatttaagaagaaactagccttgtggagtatatagatgcttttcattatacacacaaaaatccctgagggacattttgaggcatgaatataaaacatttttatttcagtaacttttccccctgtgtaagttactatggtttgtggtacaacttcattttatagaatattaagtggaagtgggtgaattttactttttatgttggagtggaccaatgtttatcaagagtgacaaataaagttaatgatgattccnnnnnnnnnnnnnnnnnnnnnnnnnnncccaactttcttgtacaaaggtgtgcggccgccaacttttttgtacaaagttggcgtcttttaaggtaagcattgctcatcaatt

SEQ ID NO: 185637 - DNA, 1575 bp, Homo Sapiens
  misc_feature (201)..(310): n is a, c, g, or t
  misc_feature (1409)..(1431): n is a, c, g, or t
ttggctctgactctcctaccccgggcctgtctctgcagaggtcaggggaggcgggggcccagcacacgtccccagtggcagcgggagcggcagctacgggttcgcggagcccccgaccccccaagggctagaggagcgctcggcggaccaaagaaagcccgcgagcggctgcgcgcccaccaataggtgcggggctcggannnnnnnnnnnnnnnnnnnnnnnnnnnnnnnnnnnnnnnnnnnnnnnnnnnnnnnnnnnnnnnnnnnnnnnnnnnnnnnnnnnnnnnnnnnnnnnnnnnnnnnnnnnnnngtctcgcactccgagagccgcagcggcagcggcgcgtcctgcctgcagagagccaggccggagaagccgagcggcgcagaggacgccagggcgcgcgccgcagccacccaccctccggaccgcggcagctgctgacccgccatcgccatggcccgcgggaaagccaaggaggagggcagctggaagaaattcatctggaactcagagaagaaggagtttctgggcaggaccggtggcagttggtttaagatccttctattctacgtaatattttatggctgcctggctggatcttcatcggaaccatccaagtgatgctgctcaccatcagtgaatttaagcccacatatcaggaccgagtggccccgccaggattaacacagattcctcagatccagaagactgaaatttcctttcgtcctaatgatcccaagagctatgaggcatatgtactgaacatagttaggttcctggaaaagtacaaagattcagcccagagggatgacatgatttttgaagattgtggcgatgtgcccagtgaaccgaaagaacgaggagactttaatcatgaacgaggagagcgaaaggtctgcagattcaagcttgaatggctgggaaattgctctggattaaatgatgaaacttatggctacaaagagggcaaaccgtgcattattataaagctcaaccgagttctaggcttcaaacctaagcctcccaagaatgagtccttggagacttacccagtgatgaagtataacccaaatgtccttcccgttcagtgcactggcaagcgagatgaagataaggataaagttggaaatgtggagtattttggactgggcaactcccctggttttcctctgcagtattatccgtactatggcaaactcctgcagcccaaatacctgcagcccctgctggccgtacagttcaccaatcttaccatggacactgaaattcgcatagagtgtaaggcgtacggtgagaacattgggtacagtgagaaagaccgttttcagggacgttttgatgtaaaaattgaagttaagagctgatcacaagcacaaatctttcccactagccatttaataagttnnnnnnnnnnnnnnnnnnnnnnncctactagtcttgaacaaactgtcatacgtatgggacctacacttaatctatatgctttacactagctttctgcatttaataggttagaatgtaaattaaagtgtagcatagcaacaaaaatatttatttctactgtgaatgac

SEQ ID NO: 185638 - DNA, 702 bp, Homo Sapiens
  misc_feature (101)..(121): n is a, c, g, or t
  misc_feature (252)..(339): n is a, c, g, or t
ttggcagatgatgactttgtacagccccggaagaaacgcctcaaaagcattgaagaacgccagttgcttaaataatatgcagcaccactagcttgtgctgnnnnnnnnnnnnnnnnnnnnncaaaaaaacatttgtcagtaatttaacatcactacaaaaagaagagtttgtgactattctcatctctgttttggacgtttactagactttgatttccttaatagcccatttctgttaacctcttatcactnnnnnnnnnnnnnnnnnnnnnnnnnnnnnnnnnnnnnnnnnnnnnnnnnnnnnnnnnnnnnnnnnnnnnnnnnnnnnnnnnnnnnnnncattgaaaacaaagacattcttcccacttcttggatttttaaaccacagtctggagtgatagctactgtagaaaggaaatagactttgtatgaactctttaagttgaaaagtaaaaaatatatgtggtttggatgtgtgctttaattcagctttagaaattaataccactacccgtgaattatatggcctgacaatatgaattaggtgtactgtactgaagaacagtactccacaaacatgggtggtaacaagagttccatcccaggaggccaaacggtgcaacagaagggtaggttagatgctattaagaaggcacttaatagtacatcatgtaagatggcaactgtattaaagaaaaatcc

SEQ ID NO: 185639 - DNA, 1270 bp, Homo Sapiens
  misc_feature (787)..(807): n is a, c, g, or t
  misc_feature (938)..(1025): n is a, c, g, or t
cccactttgtacaaaaaagttggatccttccccccaaaacacctcttcatgttggaaaaacaaggaaagaggatgaccccaatgaggactggtgtgcagtttgtcaaaacggaggggaactcctctgctgtgaaaagtgccccaaagtattcaatctttcttgtcatgtgcccacattgacaaattttccaagtggagagtggatttgcactttctgccgagacttatctaaaccagaagttgaatatgattgtgatgctcccagtcacaactcagaaaaaaagaaaactgaaggccttgttaagttaacacctatagataaaaggaagtgtgagcgcctacttttatttctttactgccatgaaatgagcctggcttttcaagaccctgttcctctaactgtgcctgattattacaaaataattaaaaatccaatggatttgtcaaccatcaagaaaagactacaagaagattattccatgtactcaaaacctgaagattttgtagctgattttagattgatctttcaaaactgtgctgaattcaatgagcctgattcagaagtagccaatgctggtataaaacttgaaaattattttgaagaacttctaaagaacctctatccagaaaaaaggtttcccaaaccagaattcaggaatgaatcagaagataataaatttagtgatgattcagatgatgactttgtacagccccggaagaaacgcctcaaaagcattgaagaacgccagttgcttaaataatatgcagcaccactagcttgtgctgnnnnnnnnnnnnnnnnnnnnncaaaaaaacatttgtcagtaatttaacatcactacaaaaagaagagtttgtgactattctcatctctgttttggacgtttactagactttgatttccttaatagcccatttctgttaacctcttatcactnnnnnnnnnnnnnnnnnnnnnnnnnnnnnnnnnnnnnnnnnnnnnnnnnnnnnnnnnnnnnnnnnnnnnnnnnnnnnnnnnnnnnnnncattgaaaacaaagacattcttcccacttcttggatttttaaaccacagtctggagtgatagctactgtagaaaggaaatagactttgtatgaactctttaagttgaaaagtaaaaaatatatgtggtttggatgtgtgctttaattcagctttagaaattaataccactacccgtgaattatatggcctgacaatatgaattagtgtactgtactgaagaacagtactccacaaacatgggtgg

SEQ ID NO: 185640 - DNA, 1668 bp, Homo Sapiens
  misc_feature (1518)..(1538): n is a, c, g, or t
ttggctacagatggctttcttggctcaacaagccataaaacagtggcagatcagcagtggacagggaaccccatcaactaccaacagcacatcctctactccttccagccccacgattactagtgcagcaggatatgatggaaaggcttttggttcacctatgatcgatttgagctcaccagtgggagggtcttataatcttccctctcttccggatattgactgttcaagtactattatgctggacaatattgtgaggaaagatactaatatagatcatggccagccaagaccaccctcaaacagaacggtccagtcaccaaattcatcagtgccatctccaggccttgcaggacctgttactatgactagtgtacaccccccaatacgttcacctagtgcctccagcgttggaagccgaggaagctctggctcttccagcaaaccagcaggagctgactctacacacaaagtcccagtggtcatgctggagccaattcgaataaaacaagaaaacagtggaccaccggaaaattatgatttccctgttgttatagtgaagcaagaatcagatgaagaatctaggcctcaaaatgccaattatccaagaagcatactcacctccctgctcttaaatagcagtcagagctctacttctgaggagactgtgctaagatcagatgcccctgatagtacaggagatcaacctggacttcaccaggacaattcctcaaatggaaagtctgaatggttggatccttcccagaagtcacctcttcatgttggagagacaaggaaagaggatgaccccaatgaggactggtgtgcagtttgtcaaaacggaggggaactcctctgctgtgaaaagtgccccaaagtattccatctttcttgtcatgtgcccacattgacaaattttccaagtggagagtggatttgcactttctgccgagacttatctaaaccagaagttgaatatgattgtgatgctcccagtcacaactcagaaaaaaagaaaactgaaggccttgttaagttaacacctatagataaaaggaagtgtgagcgcctacttttatttctttactgccatgaaatgagcctggcttttcaagaccctgttcctctaactgtgcctgattattacaaaataattaaaaatccaatggatttgtcaaccatcaagaaaagactacaagaagattattccatgtactcaaaacctgaagattttgtagctgattttagattgatctttcaaaactgtgctgaattcaatgagcctgattcagaagtagccaatgctggtataaaacttgaaaattattttgaagaacttctaaagaacctctatccagaaaaaaggtttcccaaaccagaattcaggaatgaatcagaagataataaatttagtgatgattcagatgatgactttgtacagccccggaagaaacgcctcaaaagcattgaagaacgccagttgcttaaataatatgcagcaccactagcttgtgctgnnnnnnnnnnnnnnnnnnnnncaaaaaaacatttgtcagtaatttaacatcactacaaaaagaagagtttgtgactattctcatctctgttttggacgtttactagactttgatttccttaatagcccatttctgttaacctcttatcact

SEQ ID NO: 185641 - DNA, 1432 bp, Homo Sapiens
agcatctcgggcagcagtgagcagtaagatagcaggctgagaccgaggatgggagctattaagatgtttttccaggaatgtttggctccttttccacagcttctcatcttgaccttggtacttattcttaagttgattcatctggttctggaactcttgaacagcagtggtttctacctcaggagtactaaagaaccaaaaactcccagaggcaagagcagctatcagaggaagtagccaccaccggttcctcttgacaaaagatgcattttggggttgtccagtcacttgtcggctggaggttgatggtgactggtttccaagctctgatttcagaatgctgtcattttgcatcctggtccttattcttgcagtttgtggggcccattcctggggagttttttgatatcctgagcttagcactgaacgttgcttatcatgagctgtgaagttttgactttgtgatgactgccaaaatgattctatatattgactagatgatctggtggttttatctccagattcatcagaatccctggatctggccttaacagtagtgacactgctgtgagagctgtcttgatcatcttcttcagtttctccttcttcagagaaattgaccttctgttggacactggtggcttcatatcttgggtatcttagagggggtcgacgtaacctgattacaagatcttcactcactgctggagcctcttgtatgctcctgacagttttctttgagatcgtttggcttaaatcagtttgggaagatgcttcatcctcttcagaggaatgagagtcccgcagccctctcctggtcgtaacaggagacggctgtagcggaggctgctctgagtgctgctgctgaaggcgggtagtccttcgcgtcttcatttcctcggtttcctggggtcgcggctgcctccgctgcctagaccgaaggtagtacgcgctttctctcacttcctctttcgcagaatcggaccggaactcttctagccgggttcgttttcccaccggggacctttctttggccaccaggggctcgaagtcgccgtacacttctggcggctcgtccgagaacctcacttcccgccggccctggcgcgacggaggagttctgtacgcaggcgcatcgctgctgccgccattttgaggggcgagccggccccttccctctcggatgggggccctgggggtgacgtacacaccccatccttcccgcaccgcctctgcccgccgcccgtcgcccgccatagttgttgacgtagctttagtcgatcgcgaagatggctttatggaccctaggttctcctgccggtggtggcgatggcttctcgggggtgttgggcggtggccgctgtggtcagggaggcagttgcgagtcgctggggccgccgcctgcgtcgtcgctgctgtgtagcaaacccaa

SEQ ID NO: 185642 - DNA, 1049 bp, Homo Sapiens
ttgggtgatcactcagctcagcttttgttattggtacctcctaaagggaaaagtgcaatattcttgcatcttcagtagtggggaacaggatgtattgttccggaaacactgaaatacacagcaacatgtgagatgttttaagtagatcacttaggagacagtggttctactacatgttgcattattacaaaatacatttgctacaggagatataaatcttatggttgtaattcagagtttaaaaatgttataaattaggttcttgggtcgtgatatgaattgttactaatctttgtgactatttaatcttcaaatattgtgcttaaccccagcaatccgcacgtatcctgcaccccaccccaaaagagtcatctgtattttaatgccactggtcttatcggtccttttgtctgttgagaccagtcatgacagcattcaagattatgaaagtgttacaatgccgcttcaagtctgcaaaacctcaaacgtagccaacttgacaaatatttagtgttacggcagatttaaaatccatctggcacaccgtggtaggtatttgtacagttcttttaattacacatagctttaaaccatcaacctgatgagtttaaagcttttgcacccatgccttcacttcagaatgaacaccttcattgtgatcttatgttaacctgagaattgatttaaaggaagattgataatcctatactttataacgtaaaaatacaggggctacaggagggtacctaattagacagttctccaaacacagaacacacactggaaaattttccggccaattttgctacctcccaacttgatggattagaggtagcgcaaatgctggtgctcccatctaccttgtagacacttagccatcaagaatcaaggcacaagaagtgcactctctcattaacagtaaatgtttgcaagatattcagtttaactttcagcatcatgaatgttcttatccagattttgaattccgaaaaactataatccttttatgttatacaaattactatgattttttacagttctgagcatat

SEQ ID NO: 185643 - DNA, 1023 bp, Homo Sapiens
  misc_feature (631)..(642): n is a, c, g, or t
  misc_feature (687)..(705): n is a, c, g, or t
aaatagtgtttctaaactttttgctttttcttctcccttggggaccgccattctaaatatcatgtaggaatttaaaaagccaaaatactaattatttctttgtagtgtgtaaaggaatgtttttaaaagacaaaaacccaactctttgtggatttttatcaactctttactcagagccactctccaatgcaggtcacactccaattatgatggaagatattttttatacttaattgcagtagggactcattcccagacaaagcaatagtcacgacttcatggaaccaatcaatggattgttttttgaagactggcaataaagctgtccattcaattccaaatactggttttaaggtatagccactgatattctttcatgtttagaaattctttctgttattattcaagaaaatgtttttaatcatgctaataaacttttttggagatgactttggcatcatgtttgaattcatataaagctcccctagcattttttattggtttggcttcaggagtacccaaatagtagcattatgagaatgacgcagacaatttgaataggggggaaggaaggcttcagacttgggggaaggggagattattgcaaattgcagtgaacactgagtcagtnnnnnnnnnnnncagaaacaaaaacccagcctcattcagatacagaacttcagggannnnnnnnnnnnnnnnnnnagttaatgctgctgtgaaaaatgcaaaataacctggttctgactttgtgatcactcatgtcccatacactgaactttgtttttttctggacaatctcaggttctcagaattgaaacattcagttttgtctactgacaaaatgcaactaaaaatgttttaattcaacttcttactctacacttatatacctctctcccagagcttggctcttccctgaaatccttaaaggagtttattatttgccaagaatatggtttgatgaagaccgtgtcagactcatgcattctggaatccgtgagtgcctccaaccataaaccc

SEQ ID NO: 185644 - DNA, 948 bp, Homo Sapiens
acaaaaaagttggggcgggccgaggaaggacctggtgttttgatgaccgctgtcctgtctagcagatacttgcacggtttacagaaattcggtccctgggtcgtgtcaggaaactggaaaaaaggtcataagcatgaagcgcagttcagtttccagcggtggtgctggccgcctctccatgcaggagttaagatcccaggatgtaaataaacaaggcctctatacccctcaaaccaaagagaaaccaacctttggaaagttgagtataaacaaaccgacatctgaaagaaaagtctcgctatttggcaaaagaactagtggacatggatcccggaatagtcaacttggtatattttccagttctgagaaaatcaaggacccgagaccacttaatgacaaagcattcattcagcagtgtattcgacaactctgtgagtttcttacagaaaatggttatgcacataatgtgtccatgaaatctctacaagctccctctgttaaagacttcctgaagatcttcacatttctttatggcttcctgtgcccctcatacgaacttcctgacacaaagtttgaagaagaggttccaagaatctttaaagaccttgggtatccttttgcactatccaaaagctccatgtacacagtgggggctcctcatacatggcctcacattgtggcagccttagtttggctaatagactgcatcaagatacatactgccatgaaagaaagctcacctttatttgatgatgggcagccttggggagaagaaactgaagatggaattatgcataataagttgtttttggactacaccataaaatgctatgagagttttatgagtggtgccgacagctttgatgagatgaatgcagagctgcagtcaaaactgaaggatttatttaatgtggatgcttttaagctggaatcattagaagcaaaaaa

SEQ ID NO: 185645 - DNA, 1415 bp, Homo Sapiens
ttggctgcaaattgttttattcgaaagaaagtcaaaagtgttaatgttcaatataataacctatcaaaagagacttttagttacacaataatgtaaatgcttctaaaattgacactgaaaacagaatttgccaaaaaatgaaagttgtgtttttcagatcaacttgcttttcttgcttgtgtactaattagatacatactgccatgaaagaaagctcacctttatttgatgatgggcagccttggggagaagaaactgaagatggaattatgcataataagttgtttttggactacaccataaaatgctatgagagttttatgagtggtgccgacagctttgatgagatgaatgcagagctgcagtcaaaactgaaggatttatttaatgtggatgcttttaagctggaatcattagaagcaaaaaacagagcattgaatgaacagattgcaagattggaacaagaaagagaaaaagaaccgaatcgtctagagtcgttgagaaaactgaaggcttccttacaaggagatgttcaaaagtatcaggcatacatgagcaatttggagtctcattcagccattcttgaccagaaattaaatggtctcaatgaggaaattgctagagtagaactagaatgtgaaacaataaaacaggagaacactcgactacagaatatcattgacaaccagaagtactcagttgcagacattgagcgaataaatcatgaaagaaatgaattgcagcagactattaataaattaaccaaggacctggaagctgaacaacagaagttgtggaatgaggagttaaaatatgccagaggcaaagaagcgattgaaacacaattagcagagtatcacaaattggctagaaaattaaaacttattcctaaaggtgctgagaattccaaaggttatgactttgaaattaagtttaatcccgaggctggtgccaactgccttgtcaaatacagggctcaagtttatgtacctcttaaggaactcctgaatgaaactgaagaagaaattaataaagccctaaataaaaaaatgggtttggaggatactttagaacaattgaatgcaatgataacagaaagcaagagaagtgtgagaactctgaaagaagaagttcaaaagctggatgatctttaccaacaaaaaattaaggaagcagaggaagaggatgaaaaatgtgccagtgagcttgagtccttggagaaacacaagcacctgctagaaagtactgttaaccaggggctcagtgaagctatgaatgaattagatgctgttcagcgggaataccaactagttgtgcaaaccacgactgaagaaagacgaaaagtgggaaataacttgcaacgtctgttagagatggttgctacacatgttggggtctgtagagaaacatcttga

SEQ ID NO: 185646 - DNA, 1036 bp, Homo Sapiens
ttggcagtcaccctcccgccgttacccgcggcgcgccagagggagtctcctccagaccctccctcccgttgctccaaactaatacggactgaacggatcgctgcgaggattatcttacactgaactgatcaagtactttgaaaatgacttcgaaatttatcttggtgtccttcatacttgctgcactgagtctttcaaccaccttttctctccaaccagaccagcaaaaggttctactagtttcttttgatggattccgttgggattacttatataaagttccaacgccccattttcattatattatgaaatatggtgttcacgtgaagcaagttactaatgtttttattacaaaaacctaccctaaccattatactttggtaactggcctctttgcagagaatcatgggattgttgcaaatgatatgtttgatcctattcggaacaaatctttctccttggatcacatgaatatttatgattccaagttttgggaagaagcgacaccaatatggatcacaaaccagagggcaggacatactagtggtgcagccatgtggcccggaacagatgtaaaaatacataagcgctttcctactcattacatgccttacaatgagtcagtttcatttgaagatagagttgccaaaattgttgaatggtttacgtcaaaagagcccataaatcttggtcttctctattgggaagaccctgatgacatgggccaccatttgggacctgacagtccgctcatggggcctgtcatttcagatattgacaagaagttaggatatctcatacaaatgctgaaaaaggcaaagttgtggaacactctgaacctaatcatcacaagtgatcatggaatgacgcagtgctctgaggaaaggttaatagaacttgaccagtacctggataaagaccactataccctgattgatcaatctccagtagcagccatcttgccaaaagaaggtaaatttgatgaagtctatgaagcactaactcacgctcatcctaatcttactgtttacaaaaa

SEQ ID NO: 185647 - DNA, 2111 bp, Homo Sapiens
  misc_feature (57)..(69): n is a, c, g, or t
  misc_feature (241)..(249): n is a, c, g, or t
ttggcaaaaacatcttccagaggaagtatgtatcctccctgagaatgtcagaagccnnnnnnnnnnnnnggtatatggtaaagcattaatttctggcttccactgccatgatttcataaaatttagaggaaacaagaatgtggtgagtcctatgttgaaaaagacatgttttgtgaaaagcttgtaatttctttaggttatataccttttgcaaaagtagtatatggaccttatgttaaannnnnnnnnccagaaaattatgacttacctgtttgacttcccacatggccccaagcctgggagctcccatcgaccatggcagtcctactttgacttgatcttggtggatgcacggaaaccactcttttttggagaaggcacagtactgcgtcaggtggatactaaaactggcaagctgaaaattggtacctacacagggcccctacagcatggtatcgtctactcaggaggttcttctgatacgatctgtgacctgttgggagccaagggaaaagacattttgtatattggagatcacatttttggggacattttaaaatcaaagaaacggcaagggtggcgaacttttttggtgattcctgaactcgcacaggagctacatgtctggactgacaagagttcacttttcgaagaacttcagagcttggatattttcttggctgaactctacaagcatcttgacagcagtagcaatgagcgtccagacatcagttccatccagagacgtattaagaaagtaactcatgacatggacatgtgctatgggatgatgggaagcctgtttcgcagtggctcccggcagaccctttttgccagtcaagtgatgcgttatgctgacctctatgcagcatctttcatcaacctgctgtattaccctttcagctacctcttcagggctgcccatgtcttgatgcctcatgaatcaacggtggagcacacacacgtagatatcaatgagatggagtctcctcttgccacccggaaccgcacatcagtggatttcaaagacactgactacaagcggcaccagctgacacggtcaattagtgagattaaacctcccaacctcttcccactggccccccaggaaattacacactgccatgacgaagatgatgatgaagaggaggaggaggaggaagaataaggaggaaaaccaaaaccccaagcacccattaaacaagtcctggcaggactcacaggaacaaacgaggtccctgttagggttctactcgggggagggagggggctccatgaaaggtacgtctgaaaagtttctgaagattttattatcatagatacttgttttggttttgtgtatctgtactctctgcagatggtccaaaattgtaatggagtctgtattagaagaaaataagggtaaaatcaggctgaactgcatgtatatggctccactgtggcttgtgacacttttaaaatcatccgtatgtcagtgtatctggatacacgaggaaaaggaaagagtctcagagtggaacaaagagtgggaagaggtgatctgtaatgttacaaattgtgctattactccaaggtccaacttttccagtgcattacatggtattgtatatcagtggagaaatgtattatttccatgatcaaatgtagtctctgttaaggtcaagttttcttttataagcctttaattcatcctcagtgactctggcaaggctgcttctctatcactggctttgcacagaagtatgctctacttgcgttgctttagggcaggattctattttgagggaaaagacagtatccttattaccttttgtttgtttaatagcacaaatgcttatttgttatccaaaaacaacctccttcttatctgtgataaatctatagaaagaatttagctgcaagtggacaaaggaacaagcccccagaaaagaaagggaagaactgccttcttatactacagaacatgcattagtgtgggctatatagctgtggctcatgctacccaattccagatttctttgtcctctaagagttgattgctgtatattaaaattgaacatcagaggatgggaagagggctctgtaagccagaaccttactaaagtagaggg

SEQ ID NO: 185648 - DNA, 1356 bp, Homo Sapiens
  misc_feature (1178)..(1218): n is a, c, g, or t
ttggaaaagatagaagatacttttaagacaacttggccattattttacaatgatgtatccttcctttgacaattagacacacaggtaccaggaagaaggaatgacctctgggctgaaaacagcagcattttcagtaattcctacaaacaaaaatctttgtgtctggacacctggtgctgctaattgtgttcatggtttcctttgattggctattgaacccttctgggaaatgtatttttgtagactttaatagagaagttgattgtcccttaaatgtagtgtgtgtttgaaacttcttagctgtcactttggaatcaccccaagccaattctcttaactctgtaatgcagccaataatttcaaacccgttttgcttttgagtcatgaggcaatttccaatattagtgaaaattgcccaatataataagtgtaaacagtggcagaaggacagtctggttaaaattatattgactggtggccttagggatctagaaacttctactaaacagagaaatttccttgttccctaggctgactggtatctatttatttctcatttgtaccaaggcatctcctactctccatttatattctatggacccaagtctatgctcagttccacagaatgtcaggaccaaataacttcacagctactctgcaaagggcaaattataatgtcattgatataatttccctagtagcatttaccctgttgcatgtcatgtagattcaagcttctgtaacataggcagctgcactgcgcgttcctattattgaagcaaaaagggtgactgatacctaaaagccctttcttcctctagtcgccagctcatcagaaaaacatactttgaaaagatgcttgagattttcctgctgcatcgcactctagttttgaaggatttacatcttaggaaataacatgtatactctagtaaataagcgatttaggtgttccattgaacagctttgattaacttaatgccaccattgatttcaaagtgaagaaaatgtaacagaagccagtgaagcaatggaagctggagtgtgactggaaaaatactcagcaaacaaagttaccaattccatacagagatgatctggtatcttcttttggaaaatggtattcaaattctggaatggaaatctagccaccaaaacgggttaatcaaaagacgtcnnnnnnnnnnnnnnnnnnnnnnnnnnnnnnnnnnnnnnnnnaaaggaatgaaacacgaatgtcatcagagattttttagtacaggctcaagagcctgttctctaagaaagaaattgttgccatgttttgattttcgaataagtgactttgcagctttatgctagccccttgctggtggg

SEQ ID NO: 185649 - DNA, 1768 bp, Homo Sapiens
ttgggttcctgttcccagactgaggcccagcccccttcgcccgtttccatcacgagtgccgccagcatgtctgacaaactgccctacaaagtcgccgacatcggcctggctgcctggggacgcaaggccctggacattgctgagaacgagatgccgggcctgatgcgtatgcgggagcggtactcggcctccaagccactgaagggcgcccgcatcgctggctgcctgcacatgaccgtggagacggccgtcctcattgagaccctcgtcaccctgggtgctgaggtgcagtggtccagctgcaacatcttctccacccaggaccatgcggcggctgccattgccaaggctggcattccggtgtatgcctggaagggcgaaacggacgaggagtacctgtggtgcattgagcagaccctgtacttcaaggacgggcccctcaacatgattctggacgacgggggcgacctcaccaacctcatccacaccaagtacccgcagcttctgccaggcatccgaggcatctctgaggagaccacgactggggtccacaacctctacaagatgatggccaatgggatcctcaaggtgcctgccatcaatgtcaatgactccgtcaccaagagcaagtttgacaacctctatggctgccgggagtccctcatagatggcatcaagcgggccacagatgtgatgattgccggcaaggtagcggtggtagcaggctatggtgatgtgggcaagggctgtgcccaggccctgcggggtttcggagcccgcgtcatcatcaccgagattgaccccatcaacgcactgcaggctgccatggagggctatgaggtgaccaccatggatgaggcctgtcaggagggcaacatctttgtcaccaccacaggctgtattgacatcatccttggccggcactttgagcagatgaaggatgatgccattgtgtgtaacattggacactttgacgtggagatcgatgtcaagtggctcaacgagaacgccgtggagaaggtgaacatcaagccgcaggtggaccggtatcggttgaagaatgggcgccgcatcatcctgctggccgagggtcggctggtcaacctgggttgtgccatgggccaccccagcttcgtgatgagtaactccttcaccaaccaggtgatggcgcagatcgagctgtggacccatccagacaagtaccccgttggggttcatttcctgcccaagaagctggatgaggcagtggctgaagcccacctgggcaagctgaatgtgaagttgaccaagctaactgagaagcaagcccagtacctgggcatgtcctgtgatggccccttcaagccggatcactaccgctactgagagccaggtctgcgtttcaccctccagctgctgtccttgcccaggccccacctctcctccctaagagctaatggcaccaactttgtgattggtttgtcagtgtcccccatcgactctctggggctgatcacttagtttttggcctctgctgcagccgtcatactgttccaaatgtggcagcgggaacagagtaccctcttcaagccccggtcatgatggaggtcccagccacagggaaccatgagctcagtggtcttggaacagctcactaagtcagtccttccttagcctggaagtcagtagtggagtcacaaagcccatgtgttttgccatctaggccttcacctggtctgtggacttatacctgtgtgcttggtttacaggtccagtggttcttcagccc

SEQ ID NO: 185650 - DNA, 1526 bp, Homo Sapiens
  misc_feature (185)..(270): n is a, c, g, or t
ttggaccatttctgggtaaacgtaagcatccggttgctaatgcccataatccaaacgtgtcactgcagagtacacagaactgttagagaaataaaatacagaactttccagaagcagcaggagctggacatggtgctcatgtctatcacctcagcaactctggaggagtcacctgagcccaggtnnnnnnnnnnnnnnnnnnnnnnnnnnnnnnnnnnnnnnnnnnnnnnnnnnnnnnnnnnnnnnnnnnnnnnnnnnnnnnnnnnnnnnccaaaaacaccacacacaactaaaggttataacagatgtgaaattggcgtaggtcattctggaagctgcacacattagcaggatgttttgtagagccatcttcacacaaaataaggtttgcttttttctgcatagagtaccttatttgcttttaggacattacaagagagcacaaagcagtgatctgcatgctaaggaggacatggagagcctggagccacagaactgagtggctggaggccagggtccagcacagagcaaagttgggcaccccctgcccagttcaaatgaggaaaccctccgggggaacgcgtctcgggctaggggcgttgcacagagtggggactgagtgtcactgggcatgaggttgtcagaggaaagaacggggacccctgtggctcacggagagcctcccgttcagcgctagggagcccacgaggggcatcgagatgatgtcatcaccaatgtgtttccattccagatcgggcccgggacacccagacagatgagattgtcgcactgaagaaggtgcggatggacaaggagaaggatggcatccccatcagcagcttgcgggagatcacgctgctgctccgcctgcgtcatccgaacatcgtggagctgaaggaggtggttgtggggaaccacctggagagcatcttcctggtgatgggttactgtgagcaggacctggccagcctcctggagaatatgccaacacccttctcggaggctcaggtcaagtgcatcgtgctgcaggtgctccggggcctccagtatctgcacaggaacttcattatccacagggacctgaaggtttccaacttgctcatgaccgacaagggttgtgtgaagacagcggatttcggcctggcccgggcctatggtgtcccagtaaagccaatgacccccaaggtggtcactctctggtaccgagcccctgaactgctgttgggaaccaccacgcagaccaccagcatcgacatgtgggctgtgggctgcatactggccgagctgctggcgcacaggcctcttctccccggcacttccgagatccaccagatcgacttgatcgtgcagctgctgggcacgcccagtgagaacatctggccgggcttttccaagctgccactggtcggccagtacagcctccggaagcagccctacaacaacctgaagcacaagttcccatggctgtcggaggccgggctgcgcctgctgcacttcctggttcatgtacgaccctaagaaaaagg

SEQ ID NO: 185651 - DNA, 1822 bp, Homo Sapiens
ctttgtacaaaaaagttggatatccagtccccctaattagaagagcctgggaacttggtttaatgaacacacacattccagagaactgtggaggtcttggacttggaacttttgatgcttgtttaattagtgaagaattggcttatggatgtacaggggttcagactgctattgaaggaaattctttggggcaaatgcctattattattgctggaaatgatcaacaaaagaagaagtatttggggagaatgactgaggagccattgatgtgtgcttattgtgtaacagaacctggagcaggctctgatgtagctggtataaagaccaaagcagaaaagaaaggagatgagtatattattaatggtcagaagatgtggataaccaacggaggaaaagctaattggtattttttattggcacgttctgatccagatcctaaagctcctgctaataaagcctttactggattcattgtggaagcagataccccaggaattcagattgggagaaaggaattaaacatgggccagcgatgttcagatactagaggaattgtcttcgaagatgtgaaagtgcctaaagaaaatgttttaattgttggcggagctggtttcaaagttgcaatgggagcttttgataaaaccagacctgtagtagctgctggtgctgttggattagcacaaagagctttggatgaagctaccaagtatgccctggaaaggaaaactttcggaaagctacttgtagagcaccaagcaatatcatttatgctggctgaaatggcaatgaaagttgaactagctagaatgagttaccagagagcagcttgggaggttgattctggtcgtcgaaatacctattatgcttctattgcaaaggcatttgctggagatattgcaaatcagttagctactgatgctgtgcagatacttggaggcaatggatttaatacagaatatcctgtagaaaaactaatgagggatgccaaaatctatcagatttatgaaggtacttcacaaattcaaagacttattgtagcccgtgaacacattgacaagtacaaaaattaaaaaaattactgtagaaatattgaataactagaacacaagccactgtttcagctccagaaaaaagaaagggctttaacgttttttccagtgaaaacaaatcctcttatattaaatctaagcaactgcttattatagtagtttatacttttgcttaactctgttatgtctcttaagcaggtttggtttttattaaaatgatgtgttttctttagtaccactttacttgaattacattaacctagaaaactacataggttattttgatctcttaagattaatgtagcagaaatttcttggaattttatttttgtaatgacagaaaagtgggcttagaaagtattcaagatgttacaaatttacatttagaaaatattgtagtatttgaatactgtcacttgacagtaactttgtagacttaatggtattattaaagttctttttattgcagtttggaaagcatttgtgaaactttctgtttggcacagaaacagtcaaaattttgacattcatattctcctattttacagctacaagaactttcttgaaaatcttatttaattctgagcccatatttcacttaccttatttaaaataaatcaataaagcttgccttaaattatttttatatgactgttggtctctaggtagcctttggtctattgtacacgatcgcatttcatatgtttgcatgttggcaaagaacttaataaaattgttcagtgcttattatcatatctatgtgtattatttcc

SEQ ID NO: 185652 - DNA, 2077 bp, Homo Sapiens
ttggcgctgatgggaggatggacgtactggtgtctgagtgctccgcgcggctgctgcagcaggaagaagagattaaatctctgactgctgaaattgaccggttgaaaaactgtggctgtttaggagcttctccaaatttggagcagttacaagaagaaaatttaaaattaaagtatcgactgaatattcttcgaaagagtcttcaggcagaaaggaacaaaccaactaaaaatatgattaacattattagccgcctacaagaggtctttggtcatgcaattaaggctgcatatccagatttggaaaatcctcctctgctagtgacaccaagtcagcaggccaagtttggggactatcagtgtaatagtgctatgggtatttctcagatgctcaaaaccaaggaacagaaagttaatccaagagaaattgctgaaaacattaccaaacacctcccagacaatgaatgtattgaaaaagttgaaattgctggtcctggttttattaatgtccacttaagaaaggattttgtatcagaacaattgaccagtcttctagtgaatggagttcaactacctgctctgggagagaataaaaaggttatagttgacttttcctcccctaatatagctaaagagatgcatgtaggccacctgaggtcaactatcataggagagagtataagccgcctctttgaatttgcagggtatgacgtgctcaggttaaatcatgtaggagactgggggacccagtttggcatgctcatcgctcacctgcaagacaaatttccagattatctaacagtttcacctcctattggggatcttcaggtcttttataaggaatctaagaagaggtttgatactgaggaggaatttaagaagcgagcatatcagtgtgtagttctgctccagggtaaaaacccagatattacaaaagcttggaagcttatctgtgatgtctcccgccaagagttaaataaaatctatgatgcattggacgtctctttaatagagagaggggaatccttctatcaagataggatgaatgatattgtaaaggaatttgaagatagaggatttgtgcaggtggatgatggcagaaagattgtatttgtcccagggtgttccataccattaaccatagtaaaatcagatggaggttatacctatgatacatctgacctggctgctattaaacaaagactatttgaggaaaaagcagatatgattatctatgttgtggacaatggacaatctgtgcacttccagacaatatttgctgctgctcaaatgattggttggtatgaccctaaagtaactcgagtcttccatgctggatttggtgtggtgctaggggaagacaagaaaaagtttaaaacacgttcgggtgaaacagtgcgcctcatggatcttctgggagaaggactaaaacgatccatggacaagttgaaggaaaaagaaagagacaaggtcttaactgcagaggaattgaatgctgctcagacatccgttgcatatggctgcatcaaatatgctgacctttcccataaccggttgaatgactacatcttctcctttgacaaaatgctagatgacagaggaaatacagctgcttacttgttgtatgccttcactagaatcaggtctattgcacgtctggccaatattgatgaagaaatgctccaaaaagctgctcgagaaaccaagattcttttggatcatgagaaggaatggaaactaggccggtgcattttacggttccctgagattctgcaaaagattttagatgacttatttctccacactctctgtgattatatatatgagctggcaactgctttcacagagttctatgatagctgctactgtgtggagaaagatagacagactggaaaaatattgaaggtgaacatgtggcgtatgctgctatgtgaagcagtagctgctgtcatggccaaggggtttgatatcctgggaataaaacctgtccaaaggatgtaatccttcataggtttgaacactgtgtgttttaccaaagtgggccattgggcactgtttgcttttttacaatcatgtgg

SEQ ID NO: 185653 - DNA, 1443 bp, Homo Sapiens
  misc_feature (475)..(538): n is a, c, g, or t
  misc_feature (893)..(911): n is a, c, g, or t
  misc_feature (1041)..(1051): n is a, c, g, or t
ttggaacataaattcaacctgtatgaataactagaaaaggtaatatacaaaggtcataaacatgtcactataacaatctctagtaatgttataggtgcaatgtgatggtttccatttttgtgattcaagtttatgttttatgtacggtggaaatgcagactcaggtgtacctgtgtaacttaatgaaactttaaatgagatggtctacaaattttggttacatccaaaagttagggcttttataaatgaatgtgttaaatacctttaaattgccctttgattcatgatatggtagggccacagtaacctttataactttacatcatatgagtaatgaaatttttatccaaaagtttaggtttctgttgtaaaaagaggaggcagggggttgtggtcagattgtaaaaatcagtttctataatatttagaacttctatgctaatagatgacatttttaacattgtggcttgattannnnnnnnnnnnnnnnnnnnnnnnnnnnnnnnnnnnnnnnnnnnnnnnnnnnnnnnnnnnnnnntaggttgcatttacaacaagaatttatcatccaaatattaacagtaatggcagcatttgtctcgatattctaagatcacagtggtcgcctgctttaacaatttctaaagttcttttatccatttgttcactgctatgtgatccaaacccagatgaccccctagtgccagagattgcacggatctataaaacagacagagataagtacaacagaatatctcgggaatggactcagaagtatgccatgtgatgctaccttaaagtcagaataacctgcattatagctggaataaactttaaattactgttccttttttgattttcttatccggctgctcccctatcagacctcatcnnnnnnnnnnnnnnnnnnngtttacctccctccattcattcacatgctcatctgagaagacttaagttcttccagctttggacaataactgcttttagaaactgtaaagtagttacaagagaacagttgcccaagactcagaatttttnnnnnnnnnnntggagcatgtgtattatgtggccaatgtcttcactctaacttggttatgagactaaaaccattcctcactgctctaacatgctgaagaaatcatctgagggggagggagatggatgctcagttgtcacatcaaaggatacagcattattctagcagcatccattcttgtttaagccttccactgttagagatttgaggttacatgatatgctttatgctcataactgatgtggctggagaattggtattgaatttatagcatcagcagaacagaaaatgtgatgtattttatgcatgtcaataaaggaatgacctgttcttgttctacagagaatgggaaattggaagtcaaacacccttttgtattccaaaatagggtctcaaacattttg

SEQ ID NO: 185654 - DNA, 1292 bp, Homo Sapiens
actttgtacaaaaaagttggatggctctgaagagaatccacaaggaattgaatgatctggcacgggaccctccagcacagtgttcagcaggtcctgttggagatgatatgttccattggcaagctacaataatggggccaaatgacagtccctatcagggtggagtatttttcttgacaattcatttcccaacagattaccccttcaaaccacctaaggttgcatttacaacaagaatttatcatccaaatattaacagtaatggcagcatttgtcttgatattctacgatcacagtggtctccagcactaactatttcaaaagtactcttgtccatctgttctctgttgtgtgatcccaatccagatgatcctttagtgcctgagattgctcggatctacaaaacagatagagaaaagtacaacagaatagctcgggaatggactcagaagtatgcgatgtaattaaagaaattattggataacctctacaaataaagataggggaactctgaaagagaaagtccttttgatttccatttgactgctttctatgagcccacgcctcatcttcccctgtgcacatgtttacctgatacagcagtgctgcgtgttgtacatacttggaacaacaaactagaaatactgtacttctgtaccaacattgcctcctagcagagaagtgtgtgtgtgacaagccagttctacaggcattacctaggtgtgagactaaaagcttttcttattgacttaaatttggataacagcaaggtgtgaggggggtggtgggtatggtgtgtgcttggatgggaaagaaaaggctccactcacctataggagattatttttaagtggaatccatttaaactcaaaacagttatgaaaagcaaggtgaagaacatgaagctgtgtctgtattcattttattccgaaggagctacgtcttaggtgaaagttatgaccaaccagattaaactctacccacatcctgcattttaaggtctaagtttaactggtcaacatttaaatggattggagctattagtacatcaagtgtgatgggctttgttcccaactcttttacatctccctaccccttcaacctttggcctttcagcccttctttctctcttccatattctttggtttgtatgtggtttctcagttaatacatagctaatagctcttatttttcttatgtttttaaccgcttaagtctatttggatgtaagggtgaaaattcatttgatggaaatacttgtgtatacttaaagacccaattgctcctctgga

SEQ ID NO: 185655 - DNA, 1662 bp, Homo Sapiens
  misc_feature (1013)..(1021): n is a, c, g, or t
  misc_feature (1529)..(1563): n is a, c, g, or t
ttggatcagtttgacagttctcattataacggataaatgagcatacttatgtataaatcagttccttgtcattttgattagtgtgaatcagttcacctaatgcttttgaaaatctatcaaaatctgtgtaacccacttttctgctggcattgggaagaaaaaaaatctgtgtaacagctttggtaattacagaaattacattttctttaaccaccttatggtttctgattaaagttgaaatggagtttaagattattgcctagtacctaaaagtaaactttgaaagccaaagtagtgtgtagggcatataatctcagaggccaattctggactgtggaactaatcttattctatatcatcgtaatctaaacctgttataaactcatctttgtacactagcatttatttaagcaagaatcgtacaagtatgttcatcctggagctttctctcagcaatcaaagttgtcctagtgtattatagacctaaggaaggatttactttgattctttactttctaaatattaggtcattataatctttgtggctccccttcagtaatatcagttactgtaattatttccatatgtttcatgctagtgcagctgagaacaggctaggtcatccaattggaatgttattttttaaatcactatttccataattcctcagagcgaatgtaggaaatctttccagatatctgtcaccttgacagtttttataaagtataattaatgtacaatattatttctttaaattttctgttttcaatactagaacagtcttactgttttccttctagtacaatcatgtttgaaattaagaagatctgttgcatcggtgcaggctatgttggaggacccacatgtagtgtcattgctcatatgtgtcctgaaatcagggtaacggttgttgatgtcaatgaatcaagaatcaatgcgtggaattctcctacacttcctatttatgagccaggactaaaagaagtggtagaatcctgtcgaggaaaaaatcnnnnnnnnnctaccaatattgatgatgccatcaaagaagctgatcttgtatttatttctgtgaatactccaacaaaaacctatggaatggggaaaggccgggcagcaaatctgaagtatattgaagcttgtgctaaacgcattgtgcaaaactcaaatgggtacaaaattgtgactgagaaaagcacagttccggtgcgggcagcagaaagtatccgtcgcatatttgatgcaaacacaaaacccaacttgaatttacaggtgctgtccaaccctgagtttctggcagagggaacagccatcaaggacctaaagaacccagacagagtactgattggaggggatgaaactccagagggccagagagctgtgcaggccctgtgtgctgtatatgagcactgggttcccagagaaaagatcctcaccactaatacttggtcttcagagctttccaaactggcagcaaatgcttttcttgcccagagaataagcagcattaactccataagtgctctgtnnnnnnnnnnnnnnnnnnnnnnnnnnnnnnnnnnncagcgattggatggaccagagaaatggaaaccagtttctaaaagccagtgttgggtttggtgggagctgttttccaaaaggatgttctgaatttggttt

SEQ ID NO: 185656 - DNA, 1598 bp, Homo Sapiens
actttgtacaaaaaagttgggtgacggcctggcccggagcgggcagagttggaggtggtggcgttcgctctccctaggggctgtcgggagctcagcggggaccgagcctgggaggccggccggtgccagcacctttcggcttctgagacggcggcagcagcggcattcaggttctaaatggttctaagaagttgggtgcagattttcatgggactttcagttaccttgatgatgtcccatttaagacaggagacaaattcaaaacaccagctaaagttggtctacctattggcttctccttgcctgattgtttgcaggttgtcagagaagtacagtatgacttctctttggaaaagaaaaccattgagtgggctgaagagattaagaaaatcgaagaagccgagcgggaagcagagtgcaaaattgcggaagcagaagctaaagtgaattctaagagtggcccagagggcgatagcaaaatgagcttctccaagactcacagtacagccacaatgccacctcctattaaccccatcctcgccagcttgcagcacaacagcatcctcacaccaactcgggtcagcagtagtgccacgaaacagaaagttctcagcccacctcacataaaggcggatttcaatcttgctgactttgagtgtgaagaagacccatttgataatctggagttaaaaactattgatgagaaggaagagctgagaaatattctggtaggaaccactggacccattatggctcagttattggacaataacttgcccaggggaggctctgggtctgtgttacaggatgaggaggtcctggcatccttggaacgggcaaccctagatttcaagcctcttcataaacccaatggctttataaccttaccacagttgggcaactgtgaaaagatgtcactgtcttccaaagtgtccctcccccctatacctgcagtaagcaatatcaaatccctgtctttccccaaacttgactctgatgacagcaatcagaagacagccaagctggcgagcactttccatagcacatcctgcctccgcaatggcacgttccagaattccctaaagccttccacccaaagcagtgccagtgagctcaatgggcatcacactcttgggctttcagctttgaacttggacagtggcacagagatgccagccctgacatcctcccagatgccttccctctctgttttgtctgtgtgcacagaggaatcatcacctccaaatactggtcccacggtcacccctcctaatttctcagtgtcacaagtgcccaacatgcccagctgtccccaggcctattctgaactgcagatgctgtcccccagcgagcggcagtgtgtggagacggtggtcaacatgggctactcgtacgagtgtgtcctcagagccatgaagaagaaaggagagaatattgagcagattctcgactatctctttgcacatggacagctttgtgagaagggcttcgacccctcttttagtggaagaggctctggatatgcaccagtgttctgaagaaaaagatgatgggagtttccttcagttaatgagccaattttaagagatggggctttt

SEQ ID NO: 185657 - DNA, 2083 bp, Homo Sapiens
  misc_feature (309)..(309): n is a, c, g, or t
ggaaaaaccgacccggcggaagggacctattctgggggctagttattcggacacttaacacttagatcattcataatgacaaagtatccctttagcaccaaaaattttccagggaacccatctttttaagtgacaactagtgcaaaataacattttagaaactaactgtacaaccccatatttttcactggccacagctgcctataagctcattgaaatatttggtcttttttcaattaagacaaatttcaaaaaacaccataaatcatggcaaaagactctatgaggaacaattgcttattgagtacncattatgggcaaggcactgtgtacgaagttttgctttcatttttcctctagcaaatatccaggtatttccaaatatcactaaccatcttttcttactcctggctgaaaaggcctttggctaaatgccattttttaattgtcattttatcaacaaacctttagtgctgagcacacagtaggtacttaataaatacctctgactgaaagaacaaagacaaagaatttactatcattttgcttggctattttagaatacaaggacttgataaaattccagaagaaacttcctgatcacctcatacccttacccccaatgaaagaatttcacttcacaggtaaaatctttccaagtaaatgataatcattaactattttacatgaggcaggaccaaaaactatgcgcttaggaaactgtggctccaagcacatagatatttgaagagcaaatgatgcatgggcataccatcatctatgaatctctgctgaagtgccatgttattgactagacgttatcatgatgctttttcttactccctatagctcaacttccttggacatatctgttaaattaaactaatctggtgatccagagggtcaattatcatgaggttccagtgtgtttccacctctaatttccaaaagaattcttatatttattagcttaaaagtgatgttaaaagtatatgatttttcattttaagaggctttatttcaataaaaccttttagtccaaattttaaacttccagatcaagtaactaacatagtccagaaattttatgtactgcaattttttttgtgatgttttacattctatttcctctgaacacatttgaaacagggaaaaaaattatgacatattccaaaaattgtggaagttcaaaaaagctgagattatgaaagctatcaataatttcaatattctaatactattttgacttttgaccaaaaattctagtgctttataaagattaacttagatacaatgtaaagtctatttaaccttaaaggctaatgttctgttttaggaaagcattctatcctttagattttaactatctgcatttacaggaaaacaaattgtagacaaccatacaaagataaaatcaaactaacttcaagaggaataatggtctgttggttttttgacatagactgtatcagtgattgtataaaatggatagcttttctactttaaaagtagttgatgccacaatattttatccatttgccatactgtgtatgtatcttctcccactttagataaaggtgatcacattttcaacaaccatattattaccagtactgtttcaaatcagacaagagaaaacagcatcagtgccaaaatgaaaggaactccagtgactcaacaagtgatcatatcagggcaggcaaagtgagggtggagctcatttggtttcttcaacttcagtataatgaggcttagacaaagtcttcaaaccaaaaatgtatcaagtattacagttcacacatagcaaagttttcaaacagaataatcctgtattcagatttatatcagattgtagaagctcaagtgcagacgtcccaatgcagtggtatagttggttaaataaatgctcggttacctaaagaaggtcggactgaatcaccaacctgctgccatatgactgcatgactaattcaactcttgcagctatagggcactggagagttcaaacatacttcagcagctttggatcacttaatttcatttgttttaccagataattttagaccctcgaaaatgatgcctt

SEQ ID NO: 185658 - DNA, 1403 bp, Homo Sapiens
taatggccaactttgtacaaaaaagttgggattgaactccagttggaagaggcgagtccggtctcaaaatggagggccatgatccaaaggaaccagagcagttgagaaaactgtttattggtggtctgagctttgaaactacagatgatagtttacgagaacattttgagaaatggggcacactcacagattgtgtggtaatgagagacccccaaacaaaacgttccaggggctttggttttgtgacttattcttgtgttgaagaggtggatgcagcaatgtgtgctcgaccacacaaggttgatgggcgtgtagtggaaccaaagagagctgtttctggagaggattctgtaaagcctggtgcccatctaacagtgaagaaaatttttgttggtggtattaaagaagatacagaagaatataatttgagagactactttgaaaagtatggcaagattgaaaccatagaagttatggaagacaggcagagtggaaaaaagagaggatttgcttttgtaacttttgatgatcatgatacagttgataaaattgttgttcagaaataccacactattaatgggcataattgtgaagtgaaaaaggccctttctaaacaagagatgcagtctgctggatcacagagaggtcgtggaggtggatctggcaattttatgggtcgcggagggaactttggaggtggtggaggtaattttggccgtggtggcagcagaggtagttatggaggaggtgatggtggatataatggatttggaggtgatggtggcaactatggcggtggtcctggttatattagtagagggggctatggtggtggtggaccaggatatggaaaccaaggtggtggatatggtggaggtggaggatatgatggttacaatgaaggaggaaattttggcggtggtaactatggtggtggtgggaactataatgattttggaaattatagtggacaacagcaatcaaattatggacccatgaaagggggcagttttggtggaagaagctcgggcagtccctatggtggtggttatggatctggtggtggaagtggtggatatggtagcagaaggttctaaaaacagcagaaaagggctacagttcttaccaggagagagagcgaggagttgtcaggaaagctgcaggttactttgagacagtcgtcccagatgcattagaggaactgtaaaaatctgccacagaaggaacgatgatccatagtcagaaaaagttactgcagcttaaacaggaaactcttcttgttcaggactgtcatagcccacagtttgcaaaaagtgcagctattgatttaatgcattgtagtgtcaatttagatgtacattctgaggtcttttatctgttggaactttgtcattttctttttc

SEQ ID NO: 185659 - DNA, 1279 bp, Homo Sapiens
  misc_feature (856)..(864): n is a, c, g, or t
  misc_feature (970)..(990): n is a, c, g, or t
ttggctagtggctcttgtggaagtgtgtcttagttacatcgagatgttgaaaatctacccaaaatgcagacagatactaaaaacttctgttcagtaagaatcatgtcttactgatctaaccctaaatccaactcatttatacttttatttttagttcagtttaaaatgttgataccttccctcccaggctccttaccttggtcttttccctgttcatctcccaacatgctgtgctccatagctggtaggagagggaaggcaaaatctttcttagttttctttgtcttggccattttgaattcatttagttactgggcataacttactgctttttacaaaagaaacaaacattgtctgtacaggtttcatgctagagctaatgggagatgtggccacactgacttccattttaagctttctaccttcttttcctccgaccgtccccttccctcacatgccatccagtgagaagacctgctcctcagtcttgtaaatgtatcttgagaggtaggagcagagccactatctccattgaagctgaaatggtagacctgtaattgtgggaaaactataaactctcttgttacagccccgccaccccttgctgtgtgtatatatataatactttgtccttcatatgtgaaagatccagtgttggaattctttggtgtaaataaacgtttggttttatttatcaaggttagatttaagttccctgtgtaaaggtcttgctgggtgggtgtctcatgttcacatctgaggggcctgcagccctgtaccgtggaggcttcccaaggcccccattttatacacccctcgttcgacccatggtaccgggcagagcagagaggccttnnnnnnnnngcaccacaagccaaagcgtctctggggattaaggatcctttgccataaaactcattttgtgtctcagcagtgcagggattggggatggaaaaagtcgccagttttnnnnnnnnnnnnnnnnnnnnnaaagtggactttccactgtaatccaaccacctaagtttatcaggtgcttcactgaggaagcctagttttttaagcacaatagcaaaaccatcagctctgtattttctcctgttatttcattacagtagctgcttgtgggaactaggaaaaattcttccaacatattttaaggcctaaaatcttagttccccattctcctaccttatagattcacaggcctttctcgcctagcatcatagataaacgtaattgtttggggagttgaatttaatgaacttatctaactttg

SEQ ID NO: 185660 - DNA, 1677 bp, Homo Sapiens
  misc_feature (1445)..(1457): n is a, c, g, or t
ttgggacacctctttggccaacccaatagtgcctatgatttcaaaactaacaaccctaaagaagctggtcagagacttcagaagttgcaagaaatgaaggagaaactaggaagaaatgtcaatatgagagctatgaatgtattgacagaagctgaagagcgatacaatgacttgatgaagaagaagagaattgtagaaaatgacaaatccaaaattcttacaactatagaagaccttgaccagaagaaaaaccaagccctaaatattgcatggcaaaaggtgaacaaggactttgggtctattttttctactcttttgcctggtgctaatgctatgcttgcaccaccagagggtcaaactgttttggatggtctggagttcaaggttgccttaggaaatacctggaaagaaaacctaactgaacttagtggtggtcagaggtctttagtggccttgtcattaatactgtccatgcttctcttcaaacctgctccaatttatatccttgatgaggtagatgcagccttggatctttctcatacccaaaacattggacagatgctgcgtactcatttcacacattctcagttcattgtggtgtcactaaaagaaggtatgttcaacaatgcaaacgttcttttcaaaaccaagtttgtggatggtgtttctacagtagccagatttactcaatgtcaaaatggaaagatttcaaaggaagcaaaatccaaggcaaaaccacccaaaggagcacatgtggaagtttaaactacaaagttatttcttcatcttgacctgtttttttaaatgtaaacttttaacgacttgagataactaatttgtttatatacaaaaataatgttactgtgttacttaacccatgttttctctttatataatcacttatcgcttacaaatgagcatatattcctcatctcttaactagtctaattatggtccaattattgtggttgtgattttatgcatatcatcaaatgtttttttcttatgcgggtcttttatatattagggatcctgagatacccgattctatatgtaaaagctaatatacaaaaaagcagattaaattacatgataaatgtagctgatcatcagtgtttaattgatttaattcctaaggcaatattaatgtgttttctaaagtcattcaggtaaggaagaattataaatcaggtaactggaccaacaaagggaacacatataaagctattatgcatgcatggagccgtttgaggctagttttttaaggccacaactccagacccctgatttagactgagataggaaacagatcttgaaagaatccttattttaatgatacatgaatatcatgttcctatacgcttaataattggtctctacattttaatgatacatgaatatcatgttcctatacgcttaataattggtctctacgactttaatgnnnnnnnnnnnnnaagctgtgtaagtatttttaaatcaaagcttaggaggtgtgttgcgtggtactatctgctgcaaatttatctgaagtttgttaatattttccaagatttttgtcagccttttcataatccagtcattaacaatctattggtaaacaagaaatgtacgtgccagtacactaaaccaaattttatttttccctgagtctgattatatatgtaataaatataa

SEQ ID NO: 185661 - DNA, 1039 bp, Homo Sapiens
ttggggataagtttataccatggatagcacaaaggagaagtgtgacagttacaaagatgatcttctgcttaggatgggacttaatgataataaagcaggaatggaaggattagataaagagaaaattaacaaaattataatggaagccacgaaggggtccagattttatggaaatgagctcaagaaagaaaagcaagtcaaccaacgaattgaaaatatgatgcaacaaaaagctcaaatcaccagccaacagctaagaaaagcacaattacaggttgacagatttgcaatggaattagaacaaagccgaaatttgagcaataccatagtgcacattgacatggatgctttctatgcagctgtagaaatgagggacaatccagaattgaaggataaacccattgctgtaggatcaatgagtatgctgtctacttcaaattaccatgcaaggagatttggtgttcgtgcagccatgccaggatttattgctaagaggctgtgcccacaacttataatagtgccccccaactttgacaaataccgagctgtgagtaaagaggttaaggaaatacttgctgattatgatcccaattttatggccatgagtcttgatgaagcctacttgaatataacaaagcacttagaagaaagacaaaattggcctgaggataaaagaaggtatttcatcaaaatgggaagctctgtagaaaatgataatccaggaaaggaagttaataaactgagtgagcatgaacgatccatctctccactactttttgaagagagtccttctgatgtgcagcccccaggagatcctttccaagtgaactttgaagaacaaaacaatcctcaaatactccaaaactcagttgtttttggaacatcagcccaggaagtggtaaaggaaattcgtttcagaattgagcagaaaacaacactgacagctagtgcaggcattgcctcaaatacaatgttagcaaaagtatgcagtgataagaataaaccaaatggacaataccaaattcttcccaatagacaa

SEQ ID NO: 185662 - DNA, 1747 bp, Homo Sapiens
ttggcaaagtgcaaaggccttgtacgtcaacacccatgatagacagctttgttcggctaatgaatgagttcactaatatgccagtacctccaaaaccccgacaagctcttggagataaaatcgtgagggatattcgccctggagctgcctttgagcccacatatatttacagactcctgacagttaacaagtcaagcctgtctgaaaagggtcgacaggaagatgctgaggaatacttaggcttcattctaaatggacttcatgaggaaatgttgaacctaaagaagcttctctcaccaagtaatgaaaaacttacgatttccaacggccccaaaaaccactcggtcaatgaagaagagcaggaagaacaaggtgaaggaagcgaggatgaatgggaacaagtgggcccccggaacaagacttccgtcacccgccaggcggattttgttcagactccaatcaccggcatttttggtggacacatcaggtctgtggtttaccagcagagttcaaaagaatctgccactttgcagccatttttcacgttgcagttggatatccagtcagacaagatacgcacagtccaggatgcactggagagcttggtggcaagagaatctgtccaaggttataccacaaaaaccaaacaagaggttgagataagtcgaagagtgactctggaaaaactccctcctgtcctcgtgctgcacctgaaacgattcgtttatgagaagactggtgggtgccagaagcttatcaaaaatattgaatatcctgtggacttggaaattagtaaagaactgctttctccaggggttaaaaataagaattttaaatgccaccgaacctatcggctgtttgcagtggtctaccatcacggcaacagtgcgacgggcggccattacactacagacgtcttccagatcggtctgaatggctggctgcgcatcgatgaccagacagtcaaggtgatcaaccagtaccaggtggtgaaaccaactgctgaacgcacagcctacctcctgtattaccgccgagtggacctgctgtaaaccctgtgtgcgctgtgtgtgcgcccagtgcccgcttcgtaggacaccacctcacactcacttcccgcctctctttagtggctctttagagagaaactctttctccctttgcaaaaatgggctagaatgaaaaggagatgccttggggttcgtgcacaacacagcttctgttgactctaacttccaaatcaaaatcatttggttgaaacagactgttgcttgattttagaaaatacacaaaaacccatatttctgaaataatgctgattcctgagataagaaagtggatttgatccccagtctcattgcttagtagaataaatcctgcaccagcaacaacacttgtaaatttgtgaaaatgaattttatctttccttaaaaaagaaattttttaatccatcacacttttcttccctaccctttagtttttgataaatgataaaaatgagccagttatcaaagaagaactagttcttacttcaaaagaaaaataaacataaaaaataagttgctggttcctaacaggaaaaattttaataattgtactgagagaaactgcttacgtacacattgcagatcaaatatttggagttaaaatgttagtctacatagatgggtgattgtaactttattgccattaaaagatttcaaattgcattcatgcttctgtgtacacataatgaaaaatgggcaaa

SEQ ID NO: 185663 - DNA, 2113 bp, Homo Sapiens
ttgggtatttgtcttatttccacagagcttcatagcaagtgaagtactcaagttgttcagtcttaaaaaggagccaaaccacaaaacagattggcagaaaatgatgaaatttggaagaaagaaaagagaccgagtggatcatatcctggttcaggagctccatgaggaggaggcacagtgggtgaactatgatgaggatgagttgtgtgtgaaaatgcagctagccgacgggatctttgagaccctgatcaaagatactattgatgttctgaatcagatcagtgaaaagcaggggagaatgctactagtgtgacatcttgcaaataaatcgaacgctgagtgctaatgtgagtcctgggcctttctgcctcctgatgtacacccatcgccatcatagcaagagtgcttctggccttgtacttattcttaaagactaccagtatggagttcataggacaatgtggtacacctggtattacagcctttgcctttcgagactatccactggattaatgggttattttcagtgggcagggttgcacagtgtaatcctacaccttttgctaacacccctactaggtcccagagggccagaaacacctgacttacctctgagtttagactagggtatcacttctttgagtttgaagtcaagtgagagaggtatagataaatgcatcacatcacttttgaaatgtaattctggtctataccatggaagtcataaatggacattatagtctctaaacagtattaaacccttaaccacttctaaaataggcaagctcaataatgtctgccaacttcacattctggagtttatttcatttctttttgaagaccattttcttccattattgtagttgagcagcaccaagtggactgtcaggctaacaggaataagtggtagccttgctttctgagcaccatctaaagaattttaaacctctgcattatgtttagtgttctctgtgtgggcatgaaaacaaagaaatgcccctactgaagactgggctcaaaggaccaatgcagggctggttcttttaccccttggtttactcctgcacttgtcttactcattctgaatctctaccagctgctcccagaatcacagatactcaggaccatctcaggcatccaggcatggcaaagtggaaataattcattttggcctgcaaaccttcaactcccatctttccccaagaagtcagagatgctgttacttgaatgatttaggaaatgagtgtgtgcaccaaagacaaaaagatattgtctattgtttgtgtgcttgttttgcgctatggaacattttttaatttattttaagataaattattaagttgaaaatgtgtgtccctattcagaagtgaaagattcatcttgtaatagttaaacctccatcttgaagcttctatggttcatagtctttgcacaggaacctgtggttttaacaaaccaatacacatattgaagaagtcattttaattcagtgaaacgaagatgggcttttccagatcacctgcaatagcagcagtgggataaaatgatttaaaaacactgtacaatttaactctgcctctcttgcagcattgcttctcacaactattacctgcatctgaaaaaaaatctatagactccagctgctacattagagcataagagatgctctcctgggacctcagtaccctgccttcttgactggtttccgttcatcagtcctgtccctcttcaagtaatctagaagaatgtggatactcttaggcgtgaatgtaaatgccttaatattgaaggtcctggttagaagcatgatacaagacatctactggattcatatttacaaatatcctggaatgttatagcttcaaagtatattagaaaaacccccaaagatggtataatcttttaagtgtgcacgttcgtttatttctgcatcttccctccaaactttgccctttgcatcttaaatatttcactatgcacactcccattcctcttgggtttcatcttgtcgttttagaatgtactgaaataatcaatgggaatattttgcattttgcacaatgacgggtatgataactcttgaccaataaggaaagcactgaaatgttgtgat

SEQ ID NO: 185664 - DNA, 1424 bp, Homo Sapiens
tcatttctgccaatctgttttgtggtttggctcctttttaagactgaacaacttgagtacttcacttgctatgaagctcttgatttcatcaaggttatttggatttttcactcgtcggaaataactagagttgattctacatggcttcatccagacaggttgatttaagttgggatcctcagcaaatatttcctcaaaaatctcttttgttaaatcaaaaaccgcctgtttgtagacccttttactagtgctttctatatctagacctttactggcacagccaagcagttttgtaggaatactgatgctatgaagatcgtggcctaattctttccatttccaaagttcttctgctgcattatgtacaagaatctctacttcttctgcagtatgggggactgccaataatgtttcacatggttgttgggttactcttttaggttctgccattagaggtacaatggtttcttctgccttatttttttggatcttgtgagaagagctcaaaccaaagtcttcatcaaaccagtcttgatcatctcctaacgcgctcaggaactcccggctgagttcaagttcagcaagtctcttagcaagttcttcctgcccactggcaccaaatactgggctctccggtctgggacacatatctggagaggaaatctcttctttttcatcttccaattcagaacttaagaagcaacctgaaatacttggcgactgttcctcaacattttgggataggtcttggggtgttactttcttttggtcatcaccaagaagctcctgattgctaagctggattttctcatccctggtttttttgatttgttgtagttgattgactgtgtcctttacaaagacttttagtaaactgtctgtcagtaagctgattttttccagttgttgttttgactttttttcctcatttagtgatgacttcagctgggcttccagttggtttttttctcttgttaaaagatccagaagtggtgtacaaagcttttctgaagcttcagcatataggttgtcttcctcttctgtaaactgctgttgcttctccaattcttcggaaaaggtattgtctaaagtgtcatcttctgcagcgatggaaaccttttctgtggcatcagaaatgaggtctttgttttcctttgaagaaatctgtgaatccactgaagactgctggtgaacatgggcttcaagtaccccagaaatgtcctgtacattgtctgtttctattttaaggcttctacttctattaactgaggcttctatatcattcacactaggtagggatttctcataaaaatattcactgacatccttttctctgtcttttggaccctctgtatcattttgctcttgattatagcactgatatcgttcatctgagtaacagtcttcatcttcattaatgccaa

SEQ ID NO: 185665 - DNA, 1889 bp, Homo Sapiens
gagcaaaaatggtaaagacatagcatgctaaagttgacaggactgcagagaaactgtcagcttactcccacaccaggacaggggagatgcaggttattttaaggatgaccagggcacactgtcactacaggtttcccgttgagtgttggctgaggacccaacacaaaaagtgtcagagagaggggtggtaagaggagtggggaggcacgggacacgtgcttggagctgtgagaagaaaaatcctgaaagaaacccaagaaagttgaggaacacaagtcttgtcatccccactccagctcatggtggtgggcgtggaggttccctgcatcttccaggctaaggagcagctgaggctggcgggccaggagcaggaggcggagggaccccatctgcaggtggtggtggcggtggctgctgctgtggtggagggggatacatgccgttaggtgctgtcaggggtacccggggtcctaagatgtttcctggcattggtggcatgccaggaggggtagggccactcccagaggggtggatgttggctgcaacagtgggaatcatgcggcctggcatgtgctgcccgggcatcatggaacctgggcctggtatctgacctggctggggtggatgaggtggtggcatctggtggtgcatcagagggtagggagggggctgttgatgaggcatcatgccagggtgccctgctgctccaagtggggccaggccaggtcctcctgagtgctggtgtgcctgttgagggttctggccatgctgctgctgttccatttgctgtcgtgctcgtaattcagcatacttcagctgttccatgtggaagttttggcgttcagtaagcaactgctgcctctgttgttctagagcttctttctctctgtccatgatagtttccagctcttcaaaatgtcgaagtttgatctctagtttcttcatttgtgtctcaaccaagagagctaccagggacttgatctttctttcttccactgcagccaggtgcttggctttggtagccgctgaggcaagagcagctgctgcggctgtggcaacatttccttcggaaatttcatgttctactttcttcttcccagtatcactttctctttctttacatgtatcagtgagttctttgttctcttcagtctccttttcttctgatttggtatcctcactcacttcactatcctgttccttttcactatttttttcattttctccatcttgtgctttatcaccttcatccgtttcattttccactttattttctgccttttcaggctgctgaccatcagggtcggcttccattttttcctcttcagctccttcaagcttctctggctcatcgggccctgtgcctgcaatgcagctgctctccagaccgtaggtgggatccactttcccagaggctcgtgctgcttcttgtactttcttgacatgagcttcaaccaattccagtggtacctcctcccggacccgagaaaactcctccaaagccgcttttgctgcagcagatgccacgcgagggtccaccacagatgccaaaaaagcaacagtactcataactggatttcctgactgactgaaggggacaggctggtaggccaaaggcccaagggaagcatctgaattctcaaggtatgggtcctcaatgggaagtctcaaaaagtggaggatgcattcatcctgagtacgacttccaacatgttccgacactttgttccaatcatccttgtacatctccagggcctccaggagtagaagggtctcctgttcagtccattctcttccagcactagcacccttactctttgctaatgttttcttggagtaaatgtcagtacggagaccaaagttctgcaaatcaactggtttttccccaa

SEQ ID NO: 185666 - DNA, 905 bp, Homo Sapiens
cgggaagaaaaacaagacatagaactgtcccaggaaggagcttattttttaactgaagaaataaaattagaacccttgaaatacaatgcaatcaaaattaacttctgaaagggcctggagcgattcttggaaggagttggcctggaaggagggtgggggaaattcagacacctcccactccccagccactagggttaggctaagcaacttgagcagtgccctagaggttcagaaggaattgacttgcatagaccacagtggaatcaatgcctcacagggtgcattggttgcctgccactaaggaaaggacttctgtgtctttttttcactgaataggctctttcctgagtctcttgtatttccagcaataacgagttactcttggatatgtttgcagatccccctccaccacagcagcagccaccgccaccaccacctgcagatggggtccctccgcctcctgctcctggcccgccagcctcagctgctccttagcctggaagatgcagggaacctccacgcccaccaccatgagctggagtggggatgacaagacttgtgttcctcaactttcttgggtttctttcaggatttttcttctcacagctccaagcacgtgtcccgtgcctccccactcctcttaccacccctctctctgacactttttgtgttgggtcctcagccaacactcaaggggaaacctgtagtgacagtgtgccctggtcatccttaaaataacctgcatctcccctgtcctggtgtgggagtaagctgacagtttctctgcaggtcctgtcaactttagcatgctatgtctttaccatttttgctctcttgcagttttttgctttgtcttatgcttctatggataatgctatataatcatttatctttttatctttctg

SEQ ID NO: 185667 - DNA, 2322 bp, Homo Sapiens
ttgggtgagtgagtgagtgggagcggggcggctgcggctcctcctgtccggggcggagccctgcgtcgcgggcctggggaggccccgccagcacccttgacgtctgggtcccgagcagtgcggcagccacacgacactgaggcgagcgagtgggtgtgtgcgtggggggtcagccaaacttcctgtcccgcgctcgagctgcttccggcgggagccggaagacgctgtgtgtggacggaattcgggaccgactgacggccggccggcttcccggaactggaaggttacattgattacccacctagtacaacatcttacgggaagagcatagtatttcctagaggaatatgaacataacaggaaggtatcattggctctgaattaaatttgaacttgtcccctgaatagctacaggttttggaagctgaatcaatgttatcagatgagttagaatccaaaccagagctcctggtacagtttgttcagaatacgtccatcccattgggacaggggcttgtagaatcagaagctaaagatattacttgcttgtccctccttcccgtgactgaagcctcagaatgcagtcggctaatgttaccagatgatactacaaatcattctaactcctccaaggaggtcccttcctcagctgttttgagaagccttcgggtgaatgtgggtccagacggagaggagacgagagctcagactgtacagaaatccccggagtttttgtccacttcagagtcttctagcttgttgcaagatctacagccaagtgatagcacttcttttattcttcttaacctaacaagagcaggtctgggctcttcagctgagcacttagtgtttgtacaggatgaggcagaagattcagggaatgatttcctctccagtgagagcacagacagtagcattccatggttcctccgggttcaggagttggcccatgacagtttgattgctgctactcgtgcacaactggcaaagaatgcaaaaaccagcagcaatggagaaaatgtccaccttggttctggtgatgggcagtcaaaagattctgggccccttcctcaagtggaaaagaagctcaagtgtacagttgaaggttgtgaccggacatttgtatggccagctcactttaaataccacctcaagactcatcgaaatgaccgctccttcatctgtcctgcagaaggttgtgggaaaagcttctatgtgctgcagaggctgaaggtgcacatgaggacccacaatggagagaagccctttatgtgccatgagtctggctgtggtaagcagtttactacagctggaaacctgaagaaccaccggcgcatccacacaggagagaaacctttcctttgtgaagcccaaggatgtggccgttcctttgctgagtattctagcctccgaaaacatctggtggttcactcaggagagaagcctcatcagtgccaagtctgtgggaagaccttctctcagagtggaagcaggaatgtgcatatgagaaagcatcacctgcagctgggagcagctgggagtcaagagcaggagcaaactgcccagccttggtggagagtccttgaacctaccaaataccaattctatcctgggagttgatgatgaggtgcttgctgaaggatccccacgttccctgtcttcagtgcctgatgtgacacatcacctggtgaccatgcagtcagggaggcaatcatatgaagtttctgtcttaactgcagtaaatccacaagagttactaaaccaaggagatttaactgaaagactgacatgagcgtgggtgctgactcctggaagagcaactctatctgatctcaaaatgcgtatactgggaacaggatgccttagcccacaacagaaccagaatgaatctttgaaggcacaagactctgcttttgccactcttcctctttcctggtatagaagatggatgtaggagagcttcttttctaactaccatctgatcagacaaggaatgaagcaatgactgtgggctgggaaactgtacctacctctcttcccactgcaaatttctgggatagaccaaaagtgaatttgattatgtgttggctgaagttcttcattctgactgttgaggggaggttttcctttgaagagttttcatcccagactcagctgtcttttcacatggatgaaataattcctgctaccaacaacagagcttcacccaggaagttgagttttcaagatgccttgttgctttgaagaaaggagtgatgtcaattctcttgttacattctccctttagcaacctgagtaagagactctctgccactgggctgc

SEQ ID NO: 185668 - DNA, 1248 bp, Homo Sapiens
  misc_feature (314)..(356): n is a, c, g, or t
  misc_feature (1157)..(1165): n is a, c, g, or t
ttttgtttatacagttttactccaagtctgaaactacatctgctgctacccgttactgctaaggcctatgcccatctcagctctggaacgaggggctcggggtcgagactggaatgtcggggctcagtcttcttcgctgccacttcctgagcggtcctcctcttgttcctcctcactgtcatcgtcactcacgaccggcttggctcgggaccctcggctcggccgccgccggccgcccttcagccggtcctgtgccttctccttccggccaagcttgatcttcactttgacggaccgagattcggattcggagnnnnnnnnnnnnnnnnnnnnnnnnnnnnnnnnnnnnnnnnnnncactgtcatcctccttctcgattttctgccgcacgctggtgaagaccgactgcaagacgatggagtcttcatagatcagggagccctccaggttgaaggtctgtgcgttctggcacaggagcatgacgtccttctctaggtcgttgaggctgcggtacttgtggttgcgaatgcgctcctttatcttcttgaagtccacgggcttgcggatgagctcgtagtactcgggcagctcctttcgcgagggcagctggatgaagacctcgctgagctgacgtccactgctgctgtccttgtacttgatcacggcatccacaatcttcttcatcttcttggtgaggttgggtgggttaggggagagtttctcggcaggcggccgcccgcgcttcttctgcttcttgctctcgtcgtccttgtcgcggctgcgggtgctggtggtcggggtggaggagccggcgtcgctgtctcgcttgcgcttccgtgatgatttcttctgccggacctcctcttcgatctcctccagcgtgccctcctcgatggccttcagggtcaatagtagtaaaataggacagccagcacccaggtcgacaagcagaggccgcgacgcaatcccaggggccgggctgggacacggaggagggcccccgcacccgctctcccttcagcttgactggctcggggcataacacacactgggactctcaaggggtgcctgggctgcagtgaaagaccagcactgcccccagcaggcaccccacccaagcttgtctttaaaaaactaatggttgaatttcttgaccnnnnnnnnngaactatcttctctgtacagaaaagaacgtgctcctgaaatcccttcacccggaggtgatgttgacacctctgttccacccaa

SEQ ID NO: 185669 - DNA, 2752 bp, Homo Sapiens
  misc_feature (84)..(120): n is a, c, g, or t
ttggctcttgcagcagacagacgagtacgtggctaacctcacggagctggtgcggcagcacaaggctgcccaggtcgccaaggnnnnnnnnnnnnnnnnnnnnnnnnnnnnnnnnnnnnntgcagaaggacagacgcctgccattgggccggatggcgagcctctggacgagaccagccagatgagcgacctcccggtgaaggtgatccacgtggagagtgggaagatcctcacaggcacagatgcccccaaagccgggcagctggaggcctggctcgagatgaacccggggtatgaagtagctccgaggtctgatagtgaagaaagtggctcagaagaagaggaagaggaggaggaggaagagcagccgcaggcagcacagcctcccaccctgcccgtggaggagaagaagaagattccagatccagacagcgatgacgtctctgaggtggacgcgcggcacatcattgagaatgccaagcaagatgtcgatgatgaatatggcgtgtcccaggcccttgcacgtggcctgcagtcctactatgccgtggcccatgctgtcactgagagagtggacaagcagtcagcgcttatggtcaatggtgtcctcaaacagtaccagatcaaaggtttggagtggctggtgtccctgtacaacaacaacctgaacggcatcctggccgacgagatgggcctggggaagaccatccagaccatcgcgctcatcacgtacctcatggagcacaaacgcatcaatgggcccttcctcatcatcgtgcctctctcaacgctgtccaactgggcgtacgagtttgacaagtgggccccctccgtggtgaaggtgtcttacaagggatccccagcagcaagacgggcctttgtcccccagctccggagtgggaagttcaacgtcttgctgacgacgtacgagtacatcatcaaagacaagcacatcctcgccaagatccgttggaagtacatgattgtggacgaaggtcaccgcatgaagaaccaccactgcaagctgacgcaggtgctcaacacgcactatgtggcaccccgccgcctgctgctgacgggcacaccgctgcagaacaagcttcccgagctctgggcgctgctcaacttcctgctgcccaccatcttcaagagctgcagcaccttcgagcagtggtttaacgcaccctttgccatgaccggggaaaaggtggacctgaatgaggaggaaaccattctcatcatccggcgtctccacaaagtgctgcggcccttcttgctccgacgactcaagaaggaagtcgaggcccagttgcccgaaaaggtggagtacgtcatcaagtgcgacatgtctgcgctgcagcgagtgctctaccgccacatgcaggccaagggcgtgctgctgactgatggctccgagaaggacaagaagggcaaaggcggcaccaagaccctgatgaacaccatcatgcagctgcggaagatctgcaaccacccctacatgttccagcacatcgaggagtccttttccgagcacttggggttcactggcggcattgtccaagggctggacctgtaccgagcctcgggtaaatttgagcttcttggtagaattcttcccaaactccgagcaaccaaccacaaagtgctgctgttctgccaaatgacctccctcatgaccatcatggaagattactttgcgtatcgcggctttaaatacctcaggcttgatggaaccacgaaggcggaggaccggggcatgctgctgaaaaccttcaacgagcccggctctgagtacttcatcttcctgctcagcacccgggctggggggctcggcctgaacctccagtcggcagacactgtgatcatttttgacagcgactggaatcctcaccaggacctgcaagcgcaggaccgagcccaccgcatcgggcagcagaacgaggtgcgtgtgctccgcctctgcaccgtcaacagcgtggaggagaagatcctagctgcagccaagtacaagctcaacgtggaccagaaggtgatccaggccggcatgttcgaccagaagtcctccagccatgagcggcgcgccttcctgcaggccatcctggagcacgaggagcaggatgaggaggaagacgaggtgcccgacgacgagaccgtcaaccagatgatcgcccggcacgaggaggagtttgatctgttcatgcgcatggacctggaccgcaggcgcgaggaggcccgcaaccccaagcggaagccgcgcctcatggaggaggacgagctcccctcgtggatcatcaaggacgacgcggaggtggagcggctgacctgtgaggaggaggaggagaagatgttcggccgtggctcccgccaccgcaaggaggtggactacagcgactcactgacggagaagcagtggctcaagaccctgaaggccatcgaggagggcacgctggaggagatcgaagaggaggtccggcagaagaaatcatcacggaagcgcaagcgagacagcgacgccggctcctccaccccgaccaccagcacccgcagccgcgacaaggacgacgagagcaagaagcagaagaagcgcgggcggccgcctgccgagaaactctcccctaacccacccaacctcaccaagaagatgaagaagattgtgggatgccgtgatcaagtacaaggacagcagtggacgtcagctcagcgaggtcttcatccagctgccctcgcgaaaggagctgcccgagtactacga

SEQ ID NO: 185670 - DNA, 2489 bp, Homo Sapiens
tcatgtgcagatggaacagcatcgctcacagctgtgcagacgaacagatgtggtctactgccacgaacaatgcggcataaaactgatcaatattataataaagatttgtcttattcatctccatatctacaaagtgattctacatttcctttggacaacactggagggcccgctcagtcttggcactgacgctggaggccatctccagctccctggcccctgtggcgagctggcggcttcaggtgtcacaggccggctgctccaggccttcgagggggagctggctcctgtggggggagttggggctcggtgggccgctggggttggagctattcgatggagttgagtgtttggtggagtccgaatcaggctctttgtcaaagtcctggtctggatcagacatacttctcagaggcacagtcacgctaggctccgatccacctgatgagggccacgagatgtagggcttgttcctggatggaggctggcgagccaggttggtgggagcggggcccggcctttcctcctgggaggggggcacagcactcagaggcaggtccatgagcacctgcatgccgtcgcctgggcccatgtgggccacgtggttgaagttggttgggttggatatcattttggatctcaattctgggtctctaagcatctctcgcctctgctgcagtctctcttcctctgggaccttgaagacgaaccgccttttgctcctggtgcgcagcatctgcttcttgctgttgtcggaggtgtccggcacgttgagaaccgctcccgagaacttgctcttgaagtagatcaagcgtggaggctcgcagttgaggaggttgagggtgccttcagagttcaggggccttatcctccgcaggccgatggtctgcacccactccatggtgcgcacatcaaagacgtccacgccatactcgctgtacaccgtgacgtgggtggggctgcaactacaggcgacaggagccgcaggccacatgagctcctgcgcgcgtgccctccggccttgcgggtccacgtacagtcccatgtggctgaagcaaagcaggtactcctcgctttcgagctccacagcacaaagggcatcaaaagactgttgtgagaggaacgcaagcgaggggtcattgggatttaccaggtttagaggctgcccgtccccctggatgctcagcaggcagaacccagaagggtagcccacacagagcctgtccctgagcaccgccaggcactgcacgctgccgggagccacaatctcattgaactttctgtggaatggcttcgttctctggatctcatagcaaaggatcagccgtttcacggccacaaacaggcaggtgccagagttcctcttgagtgtggccgtggccatgagctggcagcctttggtttccggaagcttgatgtcaaagctgccttccgctccatcaagggacgaccacggatagaggtgcacatggtggttccggccacagaggaggattacgatcttctccctgggagcaagctcgatctggtgtaccttcttacagtcagcggcacggacgatcacatctcgggtgacctctatgacatagagcccttcttctaggccgactgcaatcctgtctgcatccacgatggcagctgtcaggatggccttgatgagaggcagcgagctgtcgtaggcttccaagggaacatgcacgacctgattcctcagccggtttttatgaaggatggactggagtccttctagaatcccaacccacttcctcttttcattctcattttctgtcagaatgagcagcgagctggtcttagaaggtgcacctaagagagaggccgtcaccctgaatatacatggaatatctcggcgtgtagcatgaatgacatctgaggccaggactgagctcacggaaaactcgtcatctctgagatccaagacttggctcgcaatgacaccaggctgggtggattttccttcaggcagatcatacaggaagagcttgcagtcacagacgactgcatatgcgcgctgccatcccttcttcacccccgtgggctttgggaccttgacatggcctttgtaggctgttccgatccctcgctgcacgtccacgcccagaggcctcttggactgctcgggaggtattgggcacacctggggggcaccgtctttgcaggacacgtggcaagcaaaggaacacacctcgcaggcgtagccctgccggatcagcccaaccatcagggaggtgcagtggctgcactgagtagggctggagaaggacttgatgctgaactggtgagcttttggcttcggtccagccagagccagggcctgcgtggtgggcaacggcacagcggatggcctctgcgggggccgagccatgtcctcctgctgctctgatgcagccacagacatcgacggggacgcttctggcttcggagcttgtgtttcttgctcactagctgagctggttctaaatgtcagccaa

SEQ ID NO: 185671 - DNA, 1645 bp, Homo Sapiens
ttggcaataacctgcagattctcaacatcaataaaagtgatgaaggtatatacagatgtgaaggaagagtggaggccaggggagaaattgacttccgtgatatcattgttattgttaatgtgccgccagcaatctcaatgcctcagaaatcttttaatgccacagcagagagaggagaagaaatgacattttcctgcagggcctcaggctctccagaacccgccatctcctggttcaggaatggcaagctcattgaagaaaatgagaagtacatattgaaagggagcaatacagaactcactgtcaggaacataatcaatagtgatggtggtccttatgtctgcagggccacaaataaggcaggagaagatgaaaagcaagctttcctccaagtctttgtacagcctcacataatacagcttaaaaatgaaactacatatgagaatggtcaagtcacactcgtatgtgatgcggaaggggagcctattccagaaatcacttggaaaagagctgtggatggcttcacgttcactgaaggcgataagagcctggacggccgtatcgaagtcaaagggcagcatggaagctcatcactgcatattaaagatgtgaagttgtcagattcagggagatatgactgtgaagctgcaagcagaattggagggcatcaaaagagcatgtaccttgatattgaatatgcccccaagtttatatcaaaccaaacaatttattactcttgggaaggaaatcctatcaatataagttgtgatgtgaaatcgaatccaccagcatcaattcactggagaagagataaattagtcttacctgctaaaaacacgaccaatttaaagacttatagtacaggaagaaagatgatattagagattgcacctacatctgacaatgactttggacgctataattgcacagccactaatcatataggaacaagatttcaagaatatattcttgctttggctgacgtgccatccagtccctatggagtgaagatcatagagctgtcgcagaccacggccaaggtttccttcaacaaaccggactcccatggaggtgtacctattcatcactatcaggtggatgtcaaagaagtagcgtcagaaatctggaaaattgtacgctcccatggagttcaaacaatggttgttttgaacaacctggaaccaaatacaacttatgaaatcagggttgcagctgtaaatggaaagggacaaggagactacagtaaaatagaaatcttccaaacattaccagttcgtgaaccaagtcctccatccatacatggacagccaagcagtggaaagagctttaaactcagcatcaccaaacaggacgatggaggggcccctattttggaatacattgtgaaatatagaagtaaagataaggaagaccaatggctagagaaaaaagtgcaaggaaataaagaccacatcattttggagcatctccagtggaccatggggtatgaagttcagattacagctgccaatagattgggatattctgaaccgacagtttatgaattcagcatgccaccaaagcccaacattattaaagacacgctgtttaatggtcttgggcttggagcagtaattggcctgcgagttgctgcactgctgctaat

SEQ ID NO: 185672 - DNA, 1907 bp, Homo Sapiens
  misc_feature (1678)..(1713): n is a, c, g, or t
ttggggaacctcctccgctgggggacgggaagcccaccgactttgaggatctggaggacggagaggacctgttcaccagcactgtctccaccctagagtcaagtccatcatctccagaaccagctagtcttcctgcagaagatattagtgcaaactccaatggcccaaaacccacagaagttgtattagatgatgacagagaagatctttttgcagaagccacagaagaagtttctttggacagccctgaaagggaacctatcctatcctcggaaccttctcctgcagtcacacctgtcactcctactacactcattgctcctagaattgaatcaaagagtatgtctgctcccgtgatctttgatagatccagggaagagattgaagaagaagcaaatggagacatttttgacatagaaattggtgtatcagatccagaaaaagttggtgatggcatgaatgcctatatggcatatagagtaacaacaaagacatctctttccatgttcagtaagagtgaattttcagtgaaaagaagattcagcgactttcttggtttgcacagcaaattagcaagcaaatatttacatgttggttatattgtgccaccagctccagaaaagagtatagtagggatgaccaaggtcaaagtgggtaaagaagactcatcatccactgagtttgtagaaaaacggagagcagctcttgaaaggtatcttcaaagaacagtaaaacatccaactttactacaggatcctgatttaaggcagttcttggaaagttcagagctgcctagagcagttaatacacaggctctgagtggagcaggaatattgaggatggtgaacaaggctgccgacgctgtcaacaaaatgacaatcaagatgaatgaatcggatgcatggtttgaagaaaagcagcagcaatttgagaatctggatcagcaacttaggaaacttcatgtcagtgttgaagccttggtctgtcatagaaaagaactttcagccaacacagctgcctttgctaaaagtgctgccatgttaggtaattctgaggatcatactgctttatctagagctttgtctcagcttgcagaggttgaggagaagatagaccagttacatcaagaacaagcttttgctgacttttatatgttttcagaactacttagtgactacattcgtcttattgctgcagtgaaaggtgtgtttgaccatcgaatgaagtgctggcagaaatgggaagatgctcaaattactttgctcaaaaaacgtgaagctgaagcaaaaatgatggttgctaacaaaccagataaaatacagcaagctaaaaatgaaataagagagtgggaggcgaaagtgcaacaaggggaaagagattttgaacagatatctaaaacgattcgaaaagaagtgggaagatttgagaaagaacgagtgaaggattttaaaaccgttatcatcaagtacttagaatcactagttcaaacacaacaacagctgataaaatactgggaagcattcctacctgaagccaaagccattgcctagcaataagattgttgccgttaagaagaccttggatgttgttccagttatgctggattccacagtgaaatcatttaaaaccatctaaataaaccactatatattttatgaattacatgtggttttatatnnnnnnnnnnnnnnnnnnnnnnnnnnnnnnnnnnnntctgacattttattacaagctgcatgtcctgaccctctttgaattaagtggactgtggcatgacattctgcaatactttgctgaattgaacactatttgtgtctttaaatacttgcactaaatagtgcactgcaagaccagaaaattttacaatattttttctttacatatgttctgtagtatgtttaccctcc

SEQ ID NO: 185673 - DNA, 1894 bp, Homo Sapiens
  misc_feature (952)..(960): n is a, c, g, or t
  misc_feature (1630)..(1647): n is a, c, g, or t
ttggcagatgttagcagggatgaaatacaggtgcctgtgctggatactgaggatgcgtggctctccgtggaaggaccaatctccatagtggaactggcccttgaacagaagcacatccactacccactggtggagcaccactccatcctgtgctccatcttgtatgcagtcatgaggttttctctgaagaccgtgaagccactttcactttttgacagtaagggaaaaaatgcatttttcaaagacctaacttcaattcagttattacctagtggggaaatggatccaaattttatttctgtacgacaacagttcttattgaaagttgtcagtgcagctgtccaggcccaacattcagccacaaaggtcaaagatcccacagaagaggccacacccactccttttgggaaagaccaagattggccagctctagctgtggatttagcccatcaccttcaagttagtgaagatgttgttagaaggcattatgtgggggaactatacaactatggagttgaccacttaggagaagaggccattctacaggttcatgacaaagaggtccttgcctctcagctgctggtgctcacggggcaaaggctggctcatgcgcttctccacacccagacaaaagaaggaatggagctgcttgccagacttccacccacactgtgtacttggctgaaagcaatggacccccaggaccttcaaaacactgaagtgccaattgcaacaacagctaaactagtaaataaagtaattgagcttttaccagaaaaacatgggcaatatggtctagccttacacctcattgaagctgtggaagccatatctcttcctctctatgacactcatacctactggaaatagtctaaaattatgattataacatgaagtagtgcatggttattttacatagtaagacctggaattttatgggaaaagtatgtcnnnnnnnnnccttttgtaaaataaataaaagtatatacaacttttaaaaagtgcaaccctggctaaattccactcctttggttaatactgaagataaaatataaacaaatgtcaactctgttataattaatacagatgttttactgtttatttctaattcaaacacttaagtagctttattgttaaactttgctatttaaaattggttataatttagattatgttcttataagattctatatttcctatctaaaatgttgttgtaattcaatttaaatgtgttcatgtacagtccccatcagtagcgtatagaacaccccactctcctttagtaaatgttgagaaaatgcctttgttgtcatgctccaaatcccacactgggctgccacctgggagttctggataccgaaaggttcctttcccagaggttctgctgttgccatcagaggaggatgaccgtgcttgaggaggaagaatgggttcaagatcatcatattcatcagaaggggacactaaatagaacccttaacctgttgtacttgccaaaattgagaatcagagatgtgtaaaatgcagcaaattaattataatgtaagttaagatttgctttttgccaagttgcaaagttgtatccacatcaggtcactgtaaaaatgtattatcttgtaaaacttatgtnnnnnnnnnnnnnnnnnnggcaaagatactaaaaattttaagtccgactttatttttcctacaagtgtttagaaatgcttctgggatttgctaatattatctgtccttgggaacagtattgaaaaaactgcttagtggtattacagctttagcaaacctacctcacagctgggatgagaggataaaatacaactaattttgtaccctatagtgcctagagcagtccaagtgctaaataaatatttactgattaaaaccaaactat

SEQ ID NO: 185674 - DNA, 1606 bp, Homo Sapiens
  misc_feature (199)..(216): n is a, c, g, or t
  misc_feature (264)..(284): n is a, c, g, or t
aaaaagggggaccctaaacttaagccatttccatattgactaaaagactaatttgaaaaaatgttaaaaacatacgaagcatgtttaaaggtcttcatcaaaaatggactttgaaaaaaataccccctcccaagccccagatcgccattggtaaacaacagctctattaataaagcctttaagtgtcacacatgctttnnnnnnnnnnnnnnnnnntccaagtgttgaatttggaggacttctaatacgctattgaatatttcnnnnnnnnnnnnnnnnnnnnnaatctagaaggcatttccattgccttgaggtacagtatgtttcactgtactatgaggaaggtaagtgttcaatttcgacttagacggaaaaactagtttgctttgcttaccatctttgctgtttcacaggcatttgatgctttaaatctgatgtggaatgctgatagattcactttttagaagtcataagcctttaggaagttggagataacttcattgcttatctattttctcctttgcaatcaagctgttcctttaaaagtgagacactacagagttgcaaaaatttgaaacagtaagagcaagcacctttgcagcttcatggttggttttggccaaactttttatttagtattctgtagttgtttaacacacacttaaatggtcttattgggggaagggaaaggggaggttcttgcagattcccaaggaaatgtcagaaaggcaaaatggccagcattatccatttgcttttttgggtttactgggtgaatagcactttccttacataggcatgtgatttcaggtttttcgtactgagaacattgagatttcagttggaagacaccctgaaatcttatgagtagcataccccaaccaccctctaatagctagcttgtttgtataggtagaatgattcatctctccattttagatggctagatgttttgtggaagatcttagaattgcctgcctcatttgctgggaaaaatcagataggaagtggcctttaggggatacttttacttggaaagttacaacactagtacaagtcttaacacatttaacatttgcttgttgaaaagcaatgcgaaagtcaaataaaattaaacatgttttacttttttcctcacaagaacataaaaattatggaggggaacttaacagggaatttaaaaaaagtaacacaatttttccttttagtagtccttgggtagttatgatagaatagcttccactttttgtttctttgaactgggattttggtccaaagttttgtttgtttctagtatctgcttctgcctccccctctatcagatcggcttcctccacggccaccacctcttggtgctccgcggcttgaactgctgtaggaatcacgtggaggagggtaccccctttccatagaagggggaagccctctttcttgtctgccaacccgatcacgaccacttgagtagagatcacttcggctgcttgagtaactgtctcgacttccaccatatccgtcacgtgagctgctgtaatcatcatagcgactgcttccaccataagatggcgggggccctcgtgtaggtggagcactacgtgagttaccccaa

SEQ ID NO: 185675 - DNA, 1577 bp, Homo Sapiens
  misc_feature (1293)..(1337): n is a, c, g, or t
ttgggcagctccagcccctaaaatgattgaagatggcaaaatccacacagtggagcacatgatcagccccattgctgtgcagccagacccagccagtgctgctgccgccgcagccgcggccgcagccgccgcagccgctgtcattcccactgtgtcgacgccaccacctttccagggccgcccaataactccagtatacacggtggctccaaacgttcagagaattcctactgccgggatctacggggccagttacgtgccatttgctgctccagctacagccacgatcgccacactacagaagaacgcggcagccgcggccgccgtgtatggaggatacgcaggctacatacctcaggccttccctgctgctgccattcaggtccccatccccgacgtctaccagacatactgaggctggtgaccagcacgaagacagaccacacaaacaccactgaaggaacgcttgactatttatgaagaaggaacatgttggattcacacatgcaacctgaaagtgaagaatgttagcagatttatttctgaattattttatatacatgaagttttcactagttttttaagactattttcaacttagcatgcctacgttcatacatttccaaaagacttgcaatggttcgtgccttcattccatcttttaaaaatttgtatgctgtactacatttgtatagaggtttttgttgttgtttttttaaggatatattttcagtatgaaggttattttcttaacttctgcactccagagatttctattttgtagtaccttcaataatatatcaactatatattaaaaaagcacacttgaggagctagggaactattttgaaaaatatatacaatatttaaagatacaaacagtagtgcttaaaaatactacataaagcattattttaaaggttatactggaaagtgcaattttaaaatgagtaaaacctctgtatttctgctggcattaagggttgatggtgttaccatgtatcatcatggcggtactattttttaaaagaaattaaacactggatctctccttaagccaacattgaaaagacttgccgcacttctgagtccaaacactggaaagctctcctttgccaccgttagccggggctcattctccatgtgccttagccttaaacatgcccccactcccacatctctcaccctgtcccctcctccccagattcccaatcccaccgcaatgtttggcaagcctaggactgataagtagctctgatagaggagctggtggcttttatacttcttcctggnnnnnnnnnnnnnnnnnnnnnnnnnnnnnnnnnnnnnnnnnnnnngtttggttggggaagtattgtcttctacgtgtgctattttcagtagcagagtaagcacaaggttttaatcgagttgcataagacacctttgcatagctatttaattgcccaatgtaaaactttaatgccatttctaatgcttttattcatttttgaagtatgagtttgtagggacaaagaatgtatgttatcgtagacagacccccagagactcttttcagcagaagttatgcttctagt

SEQ ID NO: 185676 - DNA, 1338 bp, Homo Sapiens
  misc_feature (245)..(296): n is a, c, g, or t
  misc_feature (926)..(934): n is a, c, g, or t
ttggccttaagccaacattgaaaagacttgccgcacttctgagtccaaacactggaaagctctcctttgccaccgttagccggggctcattctccatgtgccttagccttaaacatgcccccactcccacatctctcaccctgtcccctcctccccagattcccaatcccaccgcaatgtttggcaagcctaggactgataagtagctctgatagaggagctggtggcttttatacttcttcctnnnnnnnnnnnnnnnnnnnnnnnnnnnnnnnnnnnnnnnnnnnnnnnnnnnngttggggaagtattgtcttctacgtgtgctattttcagtagcagagtaagcacaaggttttaatcgagttgcataagacacctttgcatagctatttaattgcccaatgtaaaactttaatgccatttctaatgcttttattcatttttgaagtatgagtttgtagggacaaagaatgtatgttatcgtagacaagacccccagagactcttttcagcagaaagttatgcttctagttgccttaccatgtttcttgcaaaactgtccatggtcctcaagggtgttggaaacattatgtttattaaatgggcctcttttcctttgctgtgcacttgatgggtgaactggattggggtgtgcacatccaggaggaggaggagagacctgtagaagtttaaagatagtttgtaaatatcttctaatgcttgtttttagtccttttatgttggagaagttcatggtatgtagtttaatgcaaaatgaaaccattttatttcaatgttattaaaaaggtttgttttattaggaagttaatgtattgttgcagtgttttgtgcctgtttaaaggcttttgtttagcagagtgaatgtaaaatacagtaaaatgttaagattgtcatctactttttnnnnnnnnntatcaacttggaattgttttttaaaggctcaatcaaggaagtgaggtgtgcaataaggtagcaagtaaaacgcagttgcgtttttatgtcatgttagagatccatacaattttccactcacgggatttttgttgatggctgaattcttgtggattcataagaggatcatgcccttagcaagtacttttgttttgttttaaattaagagattcccaaatgcctttttccccctcatcttgaaatgagatgagtttttatgtgtaagcaatatttatttaactattctataaaattattgagtgcctactgagggcctttaaagcaccgctaaacattcctttccatcattcttttaaatgacataaaaataatttgtgcaatgttcctgatgatgtaccccacaa

SEQ ID NO: 185677 - DNA, 1159 bp, Homo Sapiens
  misc_feature (101)..(109): n is a, c, g, or t
  misc_feature (705)..(705): n is a, c, g, or t
  misc_feature (725)..(812): n is a, c, g, or t
  misc_feature (970)..(982): n is a, c, g, or t
  misc_feature (1010)..(1018): n is a, c, g, or t
ttggatgtattgttgcagtgttttgtgcctgtttaaaggcttttgtttagcagagtgaatgtaaaatacagtaaaatgttaagattgtcatctactttttnnnnnnnnntatcaacttggaattgttttttaaaggctcaatcaaggaagtgaggtgtgcaataaggtagcaagtaaaacgcagttgcgtttttatgtcatgttagagatccatacaattttccactcacgggatttttgttgatggctgaattcttgtggattcataagaggatcatgcccttagcaagtacttttgttttgttttaaattaagagattcccaaatgcctttttccccctcatcttgaaatgagatgagtttttatgtgtaagcaatatttatttaactattctataaaattattgagtgcctactgaggcctttaagcaccgctaacattcctttccatcattcttttaaatgacataaaataattgtgcaatgttcctgatgatgtaccccacaagctgcattcaaactcaaatctgtgggaatgagtgactcgacaaaatgtaattcggatcagatcctcatcccctgactgtgtgaaaaaagtactctccttctagtgaaggattgtcacagagtttcactggatgaaactatgacccagtattcttactgtattttacatatgcctgtaaattatttgcaaaaaagaangaacaacaggaacacacacnnnnnnnnnnnnnnnnnnnnnnnnnnnnnnnnnnnnnnnnnnnnnnnnnnnnnnnnnnnnnnnnnnnnnnnnnnnnnnnnnnnnnnnntgataacatggcaaccaccaaactcccttaaaaacaaacattggtgacatggccaattaagtatcagtgagcctcctatctgggacttatctgttcctattgtttcaaaaccatttcatgtacactactgaggtaatttataacttgaaatgtgaacnnnnnnnnnnnnnagtgttaagaacaaactatataaatgtnnnnnnnnngttttagagttctgttttcaaacattgctagtggtttagttaactttagctgctttatatttgaaaagcttttatttagatcttgctccatttacagtacattcttaggatgtatgtagtaaataaagctttctttaaagc

SEQ ID NO: 185678 - DNA, 1560 bp, Homo Sapiens
  misc_feature (279)..(327): n is a, c, g, or t
  misc_feature (958)..(966): n is a, c, g, or t
ttggattttttaaaagaaattaaacactggatctctccttaagccaacattgaaaagacttgccgcacttctgagtccaaacactggaaagctctcctttgccaccgttagccggggctcattctccatgtgccttagccttaaacatgcccccactcccacatctctcaccctgtcccctcctccccagattcccaatcccaccgcaatgtttggcaagcctaggactgataagtagctctgatagaggagctggtggcttttatacttcttcctggnnnnnnnnnnnnnnnnnnnnnnnnnnnnnnnnnnnnnnnnnnnnnnnnnggttggggaagtattgtcttctacgtgtgctattttcagtagcagagtaagcacaaggttttaatcgagttgcataagacacctttgcatagctatttaattgcccaatgtaaaactttaatgccatttctaatgcttttattcatttttgaagtatgagtttgtagggacaaagaatgtatgttatcgtagacaagacccccagagactcttttcagcagaaagttatgcttctagttgccttaccatgtttcttgcaaaactgtccatggtcctcaagggtgttggaaacattatgtttattaaatgggcctcttttcctttgctgtgcacttgatgggtgaactggattggggtgtgcacatccaggaggaggaggagagacctgtagaagtttaaagatagtttgtaaatatcttctaatgcttgtttttagtccttttatgttggagaagttcatggtatgtagtttaatgcaaaatgaaaccattttatttcaatgttattaaaaaggtttgttttattaggaagttaatgtattgttgcagtgttttgtgcctgtttaaaggcttttgtttagcagagtgaatgtaaaatacagtaaaatgttaagattgtcatctactttttnnnnnnnnntatcaacttggaattgttttttaaaggctcaatcaaggaagtgaggtgtgcaataaggtagcaagtaaaacgcagttgcgtttttatgtcatgttagagatccatacaattttccactcacgggatttttgttgatggctgaattcttgtggattcataagaggatcatgcccttagcaagtacttttgttttgttttaaattaagagattcccaaatgcctttttccccctcatcttgaaatgagatgagtttttatgtgtaagcaatatttatttaactattctataaaattattgagtgcctactgaggcctttaagcaccgctaacattcctttccatcattcttttaaatgacataaaataattgtgcaatgttcctgatgatgtaccccacaagctgcattcaaactcaaatctgtgggaatgagtgactcgacaaaatgtaattcggatcagatcctcatcccctgactgtgtgaaaaaagtactctccttctagtgaaggattgtcacagagtttcactggatgaaactatgacccagtattcttactgtattttacatatgcctgtaaattatttgcaaaaagaa

SEQ ID NO: 185679 - DNA, 1161 bp, Homo Sapiens
  misc_feature (101)..(109): n is a, c, g, or t
  misc_feature (696)..(813): n is a, c, g, or t
  misc_feature (972)..(984): n is a, c, g, or t
  misc_feature (1012)..(1020): n is a, c, g, or t
ttggatgtattgttgcagtgttttgtgcctgtttaaaggcttttgtttagcagagtgaatgtaaaatacagtaaaatgttaagattgtcatctactttttnnnnnnnnntatcaacttggaattgttttttaaaggctcaatcaaggaagtgaggtgtgcaataaggtagcaagtaaaacgcagttgcgtttttatgtcatgttagagatccatacaattttccactcacgggatttttgttgatggctgaattcttgtggattcataagaggatcatgcccttagcaagtacttttgttttgttttaaattaagagattcccaaatgcctttttccccctcatcttgaaatgagatgagtttttatgtgtaagcaatatttatttaactattctataaaattattgagtgcctactgaggcctttaagcaccgctaacattcctttccatcattcttttaaatgacataaaataattgtgcaatgttcctgatgatgtaccccacaagctgcattcaaactcaaatctgtgggaatgagtgactcgacaaaatgtaattcggatcagatcctcatcccctgactgtgtgaaaaaagtactctccttctagtgaaggattgtcacagagtttcactggatgaaactatgacccagtattcttactgtattttacatatgcctgtaaattatttgcnnnnnnnnnnnnnnnnnnnnnnnnnnnnnnnnnnnnnnnnnnnnnnnnnnnnnnnnnnnnnnnnnnnnnnnnnnnnnnnnnnnnnnnnnnnnnnnnnnnnnnnnnnnnnnnnnnnnnntgataacatggcaaccaccaaactcccttaaaaacaaacattggtgacatggccaattaagtatcagtgagcctcctatctgggacttatctgttcctattgtttcaaaaccatttcatgtacactactgaggtaagtttataacttgaaatgtgaacnnnnnnnnnnnnnagtgttaagaacaaactatataaatgtnnnnnnnnngttttagagttctgttttcaaacattgctagtggtttagttaactttagctgctttatatttgaaaagcttttatttagatcttgctccatttacagtacattcttaggatgtatgtagtaaataaagctttctttaaagc

SEQ ID NO: 185680 - DNA, 961 bp, Homo Sapiens
  misc_feature (123)..(136): n is a, c, g, or t
cttttttataatgccaactttgtacaaaaaagttggctcactaacgctcttcctagtccccgggccaactcggacagtttgctcatttattgcaacggtcaaggctggcttgtgccagaacgnnnnnnnnnnnnnnacgcacgcacacacacggggggaaacttttttaaaaatgaaaggctagaagagctcagcggcggcgcgggcgctgcgcgagggctccggagctgactcgccgaggcaggaaatccctccggtcgcgacgcccggccccggctcggcgcccgcgtgggatggtgcagcgctcgccgccgggcccgagagctgctgcactgaaggccggcgacgatggcagcgcgcccgctgcccgtgtcccccgcccgcgccctcctgctcgccctggccggtgctctgctcgcgccctgcgaggcccgaggggtgagcttatggaaccaaggaagagctgatgaagttgtcagtgcctctgttcggagtggggacctctggatcccagtgaagagcttcgactccaagaatcatccagaagtgctgaatattcgactacaacgggaaagcaaagaactgatcataaatctggaaagaaatgaaggtctcattgccagcagtttcacggaaacccactatctgcaagacggtactgatgtctccctcgctcgaaattacacgggtcactgttactaccatggacatgtacggggatattctgattcagcagtcagtctcagcacgtgttctggtctcaggggacttattgtgtttgaaaatgaaagctatgtcttacaaccaatgaaaagtgcaaccaacagatacaaactcttcccagcgaaaaagctgaaaagcgtccggggatcatgtggatcacatcacaacacaccaaacctcgctgcaaagaatgtgtttccaccaccctctcagacatgggccagatgggcttaaaaga

SEQ ID NO: 185681 - DNA, 1763 bp, Homo Sapiens
ttggtataagcctctgcaggtgtgcgagcaggattgcttctgcaacaaaagcctccacccagccacttcttgggaaaagaatggccacttcttggggcacagtctttttcatgctggtggtatcctgtgtttgcagcgctgtctcccacaggaaccagcagacttggtttgagggtatcttcctgtcttccatgtgccccatcaatgtcagcgccagcaccttgtatggaattatgtttgatgcagggagcactggaactcgaattcatgtttacacctttgtgcagaaaatgccaggacagcttccaattctagaaggggaagtttttgattctgtgaagccaggactttctgcttttgtagatcaacctaagcagggtgctgagaccgttcaagggctcttagaggtggccaaagactcaatcccccgaagtcactggaaaaagaccccagtggtcctaaaggcaacagcaggactacgcttactgccagaacacaaagccaaggctctgctctttgaggtaaaggagatcttcaggaagtcacctttcctggtaccaaagggcagtgttagcatcatggatggatccgacgaaggcatattagcttgggttactgtgaattttctgacaggtcagctgcatggccacagacaggagactgtggggaccttggacctagggggagcctccacccaaatcacgttcctgccccagtttgagaaaactctggaacaaactcctaggggctacctcacttcctttgagatgtttaacagcacttataagctctatacacatagttacttgggatttggattgaaagctgcaagactagcaaccctgggagccctggagacagaaggactgatgggcacactttccggagtgcctgtttaccgagatggttggaagcagagtggatctttgggggtgtgaaataccagtatggtggcaaccaagaaggggaggtgggctttgagccctgctatgccgaagtgctgagggtggtacgaggaaaacttcaccagccagaggaggtccagagaggttccttctatgctttctcttactattatgaccgagctgttgacacagacatgattgattatgaaaaggggggtattttaaaagttgaagattttgaaagaaaagccagggaagtgtgtgataacttggaaaacttcacctcaggcagtcctttcctgtgcatggatctcagctacatcacagccctgttaaaggatggctttggctttgcagacagcacagtcttacagctcacaaagaaagtgaacaacatagagacgggctgggccttgggggccacctttcacctgttgcagtctctgggcatctcccattgaggccacgtacttccttggagacctgcatttgccaacacctttttaaggggaggagagagcacttagtttctgaactagactggggacatcctggacttgagcctagagatttaggtttaattaattttacacatctaatgtgaactgctgcctaaccactcaagagtacacagctggcaccagagcatcacagagagccctgtgagccaaaaagtatagtttaggaacttaaccttggagtgagagccccagggacaggtccctggaaaaccaagaaaaatcgcatttcaaccctttgagtgcctcattccactgaaatatttaatttccctcttaatggtaaaactgacttatttgcaatcccaagacccatcaatatcagtatttttttcctccc

SEQ ID NO: 185682 - DNA, 1196 bp, Homo Sapiens
actttgtacaaaaaagttggatctacttttcttttcttcccagatcatttcattctaaaattaaattgcttggttttctttagaggaaattgctacatggtatacttgtagtagtgattcatattaaaaaaatagctggtaaatctttctaggtagtaacttatccaaacaatactttgagtatcatattttgtgaatgacttgcttaaactgggaaactgaatattctttttaaatcatataattcctgtattaaatgtgaaacacacagtctccaaagtcacctgattctctgtggaaaatgaaaggcattgaaggaaaccagatacattaatacttagttttggttgaaagtgcaacattactgtacttagaaggggcttggtttatttttagatatttaagctatcattaattttagaccaatggctaataataagagagatttttggttgctcatttatggagagacaaagaacagcatggcataaacaaacatcccagaaataaatgaaaagttttaagtgataaaattgtgttttctatgaaccagtgttgtacatgaaccaacattgtgtttcttagctctgacctgtacagtgaggtacctgtcaggacccctagtcttggcactggaaatgacaaagttctcctattactaaattctcatgccttccttttctgacttagtagattgaaattggtaggtactaatgatttatgtttgataaacttaagttctgctgatatcctgttactggtaattctggtaccaaaatttcaaacggtttgattattagtagcattttgagtacctaggtgcatataatacagttagcagacccttacagagtcaaaagagattttggaatctggtgatactgttgtttattacactagcctattacattttctttctttataataactgtttatgtgagtttcattgaaaatcgtggctctattgctttattcatggtttccacaactctttttgtaacaccttaattttctctcttaggtattttcctgttaaataagatatcaaaagcatcaatcacaagacagagaaaacgtattaggaaaaacttgtattagtatattctaaactgaaatggaaaactcattattcatattttaataaataaaactcccaaatgatctgctaaattatcccactatttagaagtagaaaa

SEQ ID NO: 185683 - DNA, 820 bp, Homo Sapiens
actttgtacaaaaaagttggctcaaagtctgagccccgctccgctgatgcctgtctgcagaatccgcaccaaccagcaccatgcccatgactctggggtactgggacatccgtgggctggcccacgccatccgcttgctcctggaatacacagactcaagctatgtggaaaagaagtacacgctgggggacgctcctgactatgacagaagccagtggctgaatgaaaaattcaagctgggcctggactttcccaatctgccctacttgattgatgggactcacaagatcacccagagcaatgccatcctgcgctacattgcccgcaagcacaacctgtgtggggagacagaagaggagaagattcgtgtggacattttggagaaccaggttatggataaccacatggagctggtcagactgtgctatgacccagattttgagaaactgaagccaaaatacctggaggaactccctgaaaagctaaagctctactcagagtttctggggaagcggccatggtttgcaggagacaagatcacctttgtggatttccttgcctatgatgtccttgacatgaagcgtatatttgagcccaagtgcttggacgccttcctaaacttgaaggacttcatctcccgctttgagggtttgaagaagatctctgcctacatgaagtccagccaattcctccgaggtcttttgtttggaaagtcagctacatggaacagcaaatagggcccagtgatgccagaagagggagggaggagccaaccttgctgcctgcgaccctgggaggacagcctgactccctggacctg

SEQ ID NO: 185684 - DNA, 3305 bp, Homo Sapiens
ttgggtgattattttgcaacagaagagtcagtgggtacccagacttctgtcaggcaactccagttaggccctaaagaagggttcagtgggcaaatccagttcacagctccactttcagacaaggtggagttgggtgtcataggagattctgtacacatggaagggttgccagggagcagcacatccatcaggcacatcagcattgggcctcagaggcatcagaccacccagcagatagtttaccatgggctggttccccaactgggggaatctggtgactcagagagcactgtgcacggagagggctcagcagatgtgcaccaggccactcacagtcatacctcgggtagacaaaccgttatgactgaaaagagcaccttccaaagtgtcgtttctgaatctccccaggaggatagtgcaggggacacatcaggggcagaaatgacatcgggtgttagcagatcctttaggcacattcgactaggtcctacagaaacggaaacctctgaacacattgccatccgtggacccgtgtccagaacatttgtgcttgctggttcagcggactcccctgagctaggcaagttagcagacagcagcagaacgctaaggcacattgcaccagggcccaaagaaacttcgtttacctttcagatggatgtgagtaacgtagaggcgatccgcagccggacacaggaagcgggagctctcggtgtgtctgaccgtggttcctggagagacgcggacagtaggaatgaccaggcagttggtgtgagctttaagcctctgctggggaaggagaccagggctcacagagaacagggcaaggagcaggccatgtttgataagaaggtgcagctccagagaatggtagaccaaaggtcggtgatttcagatgaaaagaaagttgccctcctctatctagacaatgaggaggaggagaatgatgggcattggttttaataagcagaaacattttgttttaatggcagcctgttggcgacgtgccaacatccaaaggccttaacttattttaagaggccgagggagtctatgaaaatctccccttttttacttttttaaagagtactcccggcatggtcaatttcctttatagttaatccgtaaaggtttccagttaattcatgccttaaaaggcactgcaattttatttttgagttgggacttttacaaaacacttttttccctggagtcttctctccacttctggagatgaatttctatgttttgcacctggtcacagacatggcttgcatctgtttgaaactacaattaattatagatgtcaaaacattaaccagattaaagtaatatatttaagagtaaattttgcttgcatgtgctaatatgaaataacagactaacattttaggggaaaaataaatacaatttagactctaaaaagtcttttcaaaaagaaatgggaaataggcagactgtttatgttaaaaaaattcttgctaaatgatttcatctttaggaaaaaattacttgccatatagagctaaattcatcttaagacttgaatgaattgctttctatgtacagaactttaaacaatatagtatttatggcgaggacagctgtagtctgttgtgatatttcacattctatttgcacaggttccctggcactggtagggtagatgattattgggaatcgcttacagtaccatttcattttttggcactaggtcattaagtagcacacagtctgaatgcccttttctggagtggccagttcctatcagactgtgcagacttgcgcttctctgcaccttatcccttagcacccaaacatttaatttcactggtgggaggtagaccttgaagacaatgaagagaatgccgatactcagactgcagctggaccggcaagctggctgtgtacaggaaaattggaagcacacagtggactgtgcctcttaaagatgcctttcccaaccctccattcatgggatgcaggtctttctgagctcaagggtgaaagatgaatacaataacaaccatgaacccacctcacggaagctttttttgcactttgaacagaagtcattgcagttggggtgttttgtccagggaaacagtttattaaatagaaggatgttttggggaaggaactggatatctctcctgcagcccagcaccgagatacccaggacgggcctggggggcgagaaaggcccccatgctcatgggccgcggagtgtggacctgtagataggcaccaccgagtttaagatactgggatgagcatgcttcattggattcattttattttacacgtcagtattgttttaaagtttctgtctgtaaagtgtagcatcatatataaaaagagtttcgctagcagcgcattttttttagttcaggctagcttctttcacataatgctgtctcagctgtatttccagtaacacagcatcatcgcactgactgtggcgcactggggaataacagtctgagctagcaccaccctcagccaggctacaacgacagcactggagggtcttccctctcagattcacctggaggccctcagacccccagggtgcacgtctccccaggtcctgggagtggctaccgcaggtagtttctggagagcacgttttcttcattgataagtggaggagaaatgcagcacagctttcaagatactattttaaaaacaccatgaatcagatagggaaagaaagttgattggaatggcaagtttaaacctttgttgtccatctgccaaatgaactagtgattgtcagactggtatggaggtgactgctttgtaaggttttgtcgtttctaatacagacagagatgtgctgattttgttttagctgtaacaggtaatggtttttggatagatgattgactggtgagaatttggtcaaggtgacagcctcctgtctgatgacaggacagactggtggtgaggagtctaagtgggctcagtttgatgtcagtgtctgggctcatgacttgtaaatggaagctgatgtgaacaggtaattaatattatgacccacttctatttactttgggaaatatcttggatcttaattatcatctgcaagtttcaagaagtattctgccaaaagtatttacaagtatggactcatgagctattgttggttgctaaatgtgaatcacgcgggagtgagtgtgcccttcacactgtgacattgtgacattgtgacaagctccatgtcctttaaaatcagtcactctgcacacaagagaaatcaacttcgtggcttggatggggccgggacaccaccagtctttttg

SEQ ID NO: 185685 - DNA, 926 bp, Homo Sapiens
tcgtgtctattcatgaacgacagggactccttctcagagtaattctgtcttgaatcaaaatatccgtggactgctttgatcaacaggacatgggttgcagcttcctgatggaatgcgcacacagctccctgctgatgaagtcaatgctgttctctgcccaggcgagcctctggtctctgttcagaaccagacctgtggccaccttcgtggttcctctttgcaggagaagctccccgcactcctcactcaagtggctattgctcttcagtaacctctgcagcagctgcttcaggctgaacacgtgcgagggctcctgggaggcctctacctgcagcacgtgctctatggctctccgcttgtaggtcagcaagttctccatttcatctgattccaggagaaagagcggcgtgtccagcaagataagtttatccaccatctcggggaaggtacagaaaaacattccgcccacgacgccaccgaagctgtggcccagaatggagaatcgattccatttcaaggctgccacaactcttcggatctcactcacaaaagtctggaggtaatatgggacacctgggctgtaatgggacgagagcccatgacctccgaaatccatggcaacgtaataaaagtcttgcgggagaagagggatgagtctgtcgaaggagctggcattgtccagccagccgtgcaggcagagaactggagggccctgcagggagccccaggctttggctgcgatgtggccccagggcacagccagcttcagctctgagatcagacctggtgcggcgttctcactcatcgctctcgtcccgcgaatgcgctgctgtcactccctcacgcctggctaggtcgcaggagcagagtgacgcccgcaattccgggccctatctccaagctgtcccaacttttttgtacaaagt

SEQ ID NO: 185686 - DNA, 945 bp, Homo Sapiens
tgagcaatgcttttcctataatagccaactttgtacaaaaaagttggacctagccaggcgtgagggagtgacagcagcgcattcgcgggacgagagcgatgagtgagaacgccgcaccaggtctgatctcagagctgaagctggctgtgccctggggccacatcgcagccaaagcctggggctccctgcagggccctccagttctctgcctgcacggctggctggacaatgccagctccttcgacagactcatccctcttctcccgcaagacttttattacgttgccatggatttcggaggtcatgggctctcgtcccattacagcccaggtgtcccatattacctccagacttttgtgagtgagatccgaagagttgtggcagccttgaaatggaatcgattctccattctgggccacagcttcggtggcgtcgtgggcggaatgtttttctgtaccttccccgagatggtggataaacttatcttgctggacacgccgctctttctcctggaatcagatgaaatggagaacttgctgacctacaagcggagagccatagagcacgtgctgcaggtagaggcctcccaggagccctcgcacgtgttcagcctgaagcagctgctgcagaggttactgaagagcaatagccacttgagtgaggagtgcggggagcttctcctgcaaagaggaaccacgaaggtggccacaggtctggttctgaacagagaccagaggctcgcctgggcagagaacagcattgacttcatcagcagggagctgtgtgcgcattccatcaggaagctgcaggcccatgtcctgttgatcaaagcagtccacggatattttgattcagacagaattactctgagaaggagtccctgtcgttcatgatagacacgatgaaatccaccctcaaagagcagttccagtttgtggaagtccc

SEQ ID NO: 185687 - DNA, 1564 bp, Homo Sapiens
ttggctcgatatcttcatgcacaccttgataccccccttacggaatataacattgatgtggatctgcctggaagctttaaggaccactgggctaaaaatttgcctttcctcatagaagactacgaagagcagccagggttgcaaccccacataaaagatgtgttacatcagaattttgagagttataagcctgaagtacaggagctgatttgtgtggctgatcgtttgggatccctgatgcaatatgaaacacctggtttcctgccaaacaagagaatacacagagctatgggtttggccgcattggaggtcatgcaagccgtgcagcgtacatggaccaactcgaaagttcgaatgaatgggaagacacggttgatgcagtggagagacatgtttgacattgcagttaaatggagaaggattgctgacccagaccagcccgtgctgtggttagatcaaatgccagcacgaagtcttagcagaggttttaacaaccacattaatttaatcaggggtcaggtgatcaacatgagatacctagaatattttgagaaaatacttcattttattaaagacagaattcttgtttatcatggagctaataatcctaaaggattgctggaagttcgggaagccctggaaaaggtacacaaagtagaagaccttcttccgattatgaaggtttaatactaaaacgaaggatgggttcaccgtgaacacaaaagttcccagccttaaagaccaagggaaggaatatgatggattcacaatcacgattacaggagacaaagttggcaatatattattttctgtggaaactcaaaccacggaagaaaggacacaattatatcatgctgaaatagatgcactttataaagatttgacagcaaaaggaaaagtattgattctttcatcagaatttggggaggctgatgctgtctgcaacttaatcttatccttagtttattacttttataatttaatgccactctctcgaggatccagtgtaattgcttactcggtcatcgtgggagcactgatggcaagtggaaaagaagtagcaggaaaaattcccaaagggaagttagtcgactttgaagctatgacagcccctggttcagaggcctttagcaaagtcgccaaaagctggatgaacttgaaaagtatttcaccttcttataagactcttccatcagtatcagaaacgtttccaacgttaagatcgatgattgaggtgctaaacacagactcttctccacgttgtcttaagaaactctagttctgctgctgtatttatacaagtaaagggccggacctcttgcttcttaagttattttttaaaacatggaattataaagaaattaggtcctctattacttttgataccaatttttataggaattgaatacttgaaatcattttctttacttttctgaaccataatgaaaatcatgaaagaggctttcggggggaaaaagctacttgacttggagggaaagcgtatgtattagccggcagcctgttggttcccacttataaagtcatataactccttccttacagt

SEQ ID NO: 185688 - DNA, 2604 bp, Homo Sapiens
  misc_feature (1059)..(1067): n is a, c, g, or t
  misc_feature (1313)..(1329): n is a, c, g, or t
cctactccacaaacgtaacagtaaggaaaaaatcacccacaaacctgctgagtttgaatcactggcaacttgcctagaaaagttcagatgatgggtccttgaactgtgtatctatttcatagggtaagtttgttgtctatgtttgtttttttatgctgaggctttaattcaggtgacttgctatctagacacctggggtggcgtgttttctttgggatgcataatacacaaaggccagggagcctttggcttggacccccagggagctattgaaacttttaaagtttgagtttaggagtaagaacatatctcagaccaccttagtcagctttgctgatgggatttagggccaggtcagagtttcttttcataactgcctgaaaagagagatggtgtgaaacaagattctgataatggtttgtgtgagatttgatcatagtctaaaactatcacgtctgagttgccttaggatgacagtgctgacacccagtaggaagtatcccatttttatcaggaaagtcagtcacgcgtagggatggtgaggagacgcgtagggatggtgaggaggggagaggagggagacctgctggtgcccttgcaccagggtgaggcctgactcacgctgcttccccccacaggccctgctttgcttgcctgctttttccagaatcgattttgcaagcttcaagattctgttcccctcttcgcagaagtgaggaaggcaaatactcagggtttgaagggagacctggccggcctgagggctggcagatgtgagggcaggacacctgggatggactcgtaggctgacccaggcccaaagggggctgcctgttcccaactctttcactctgtaacccattttaaaatgagtttttgaatcttgcctcaaattgacctacttggataaaatcagtgcttttcctaacttgattttgtttgacgtggttccctctaagagaatggtaggaattgaaactatttgtatatgttgaaatttgtaggggttcaggaacccatggcagaaacactaaactatttatttacaagtatgactannnnnnnnncaaagtaggcaattctttgtatattttaaggcaaataatcacttcacctctggtgccttccatgcgtcgcataagcactcttgtcaatcatggaattggaaaaaaagatgtacatttagttaaacaagataacactatttttgtagcatgattttagattgtgtccttttaatattgttttcaacaatggtagttttgaggttttggccattttctctttacacttcgtatgtattttaaagaagnnnnnnnnnnnnnnnnnttccctggctattcctctttcctctctgctgctgcttctcctgcatcttgttcctgcttatttaaatagtctgagagtaagagtatatttctgtgaaataattataagtcagtataattgcatttggcattttttaaccacttgctcagtttggagccactgctcacctcaaacagtacaaagaaagtggttccatattttacaaacagaagagtagcatcagagccctgacctcctgtctttgggtgtaaaatggtgagaggccggtgtccggctccttcccctgtggtttgggctggtgaactgagcccaagtgtattctctggcctgggccccttccagaatcagtgcgagcgtcctgcagaggcatggccttcctgccactgcagagtgggaagcttcctgggggacctcagccagctccggggctctcatcttccactcggatctcagattggttcgttgtggatgctctggctaggctcggcggccttttccaggcttcaggcctgaacaaaacaggctgtttgctgtgaggagctagatgacaccaagacacagacacgtactcttcaccggctccttttgcttctccttcctgcaggacgtgagttatgtctggtcccaaaacccttgagtaaactagctgagccattgcaaatgaaggtacagatggattgaaacataaaattgtagcttttggtgtccttctgaagggtcagaatatgtaattatttgataaccaaggaagtcaagtcagatggctaagtagtaactttccaatatgatttctccgtggtacttcacctggtggcacttttggggggcaatgttaacaactatcacaatttactcatcaagtctctttcatttcggcagtttaaagacacaactgtgggctttctgaggcgatgcccgttgggcaaacttaggtttatgtgtttggtttttcagctgacgtggaagccctgggtgggcgtcccctggctggcctggcttttgggttcaagtctgtatgtatggagtgggttggggccccaaagctttgctgctattgatttgtccccgacagcaggcaaagcctcacattgccctcaattttccccctttcatttgaaggaccagtttttcatggtacttgtcttgatctttttcatagtgttcaaatctgtatttttgtatgtagagggaaataattttctcaacactaatcgttaaataactattgtattaaattgtcatgaaggaacttgtttaataaatggacgtgtaacg

SEQ ID NO: 185689 - DNA, 2534 bp, Homo Sapiens
ttggggcttcagcttccaactacaaagacagacttggtccttttcaacggttttcacagatccagtgacccacgctctgaagacagaattagctaactttcaaaaacatctggaaaaatgaagacttgggtaaaaatcgtatttggagttgccacctctgctgtgcttgccttattggtgatgtgcattgtcttacgcccttcaagagttcataactctgaagaaaatacaatgagagcactcacactgaaggatattttaaatggaacattttcttataaaacattttttccaaactggatttcaggacaagaatatcttcatcaatctgcagataacaatatagtactttataatattgaaacaggacaatcatataccattttgagtaatagaaccatgaaaagtgtgaatgcttcaaattacggcttatcacctgatcggcaatttgtatatctagaaagtgattattcaaagctttggagatactcttacacagcaacatattacatctatgaccttagcaatggagaatttgtaagaggaaatgagcttcctcgtccaattcagtatttatgctggtcgcctgttgggagtaaattagcatatgtctatcaaaacaatatctatttgaaacaaagaccaggagatccaccttttcaaataacatttaatggaagagaaaataaaatatttaatggaatcccagactgggtttatgaagaggaaatgcttgctacaaaatatgctctctggtggtctcctaatggaaaatttttggcatatgcggaatttaatgatacggatataccagttattgcctattcctattatggcgatgaacaatatcctagaacaataaatattccatacccaaaggctggagctaagaatcccgttgttcggatatttattatcgataccacttaccctgcgtatgtaggtccccaggaagtgcctgttccagcaatgatagcctcaagtgattattatttcagttggctcacgtgggttactgatgaacgagtatgtttgcagtggctaaaaagagtccagaatgtttcggtcctgtctatatgtgacttcagggaagactggcagacatgggattgtccaaagacccaggagcatatagaagaaagcagaactggatgggctggtggattctttgtttcaacaccagttttcagctatgatgccatttcgtactacaaaatatttagtgacaaggatggctacaaacatattcactatatcaaagacactgtggaaaatgctattcaaattacaagtggcaagtgggaggccataaatatattcagagtaacacaggattcactgttttattctagcaatgaatttgaagaataccctggaagaagaaacatctacagaattagcattggaagctatcctccaagcaagaagtgtgttacttgccatctaaggaaagaaaggtgccaatattacacagcaagtttcagcgactacgccaagtactatgcacttgtctgctacggcccaggcatccccatttccacccttcatgatggacgcactgatcaagaaattaaaatcctggaagaaaacaaggaattggaaaatgctttgaaaaatatccagctgcctaaagaggaaattaagaaacttgaagtagatgaaattactttatggtacaagatgattcttcctcctcaatttgacagatcaaagaagtatcccttgctaattcaagtgtatggtggtccctgcagtcagagtgtaaggtctgtatttgctgttaattggatatcttatcttgcaagtaaggaagggatggtcattgccttggtggatggtcgaggaacagctttccaaggtgacaaactcctctatgcagtgtatcgaaagctgggtgtttatgaagttgaagaccagattacagctgtcagaaaattcatagaaatgggtttcattgatgaaaaaagaatagccatatggggctggtcctatggaggatacgtttcatcactggcccttgcatctggaactggtcttttcaaatgtggtatagcagtggctccagtctccagctgggaatattacgcgtctgtctacacagagagattcatgggtctcccaacaaaggatgataatcttgagcactataagaattcaactgtgatggcaagagcagaatatttcagaaatgtagactatcttctcatccacggaacagcagatgataatgtgcactttcaaaactcagcacagattgctaaagctctggttaatgcacaagtggatttccaggcaatgtggtactctgaccagaaccacggcttatccggcctgtccacgaaccacttatacacccacatgacccacttcctaaagcagtgtttctctttgtcagactaaaaacgatgcagatgcaagcctgtatcagaatctgaaaaccttatataaacccctcagacagtttgcttattttattttttatgttgtaaaatgctagtataaacaaacaattaatgttgtttctaaaggctgtt

SEQ ID NO: 185690 - DNA, 1008 bp, Homo Sapiens
  misc_feature (858)..(891): n is a, c, g, or t
ttggcccaccactgcccaccaagtccagagtgaggcagcagctccccacacagatgcaggaggtggactctcttctgatgaagaggaggggaccagctctcaagcagaagcggccaggatactggctgcctcctggcctcaaaaccgagaagatgaagaaaagcagaagctgaagggtgggcccaagaagaccaaaagggaaaagaaagcagcagcttcccacctgttcccatttgagaagctgtgagctgagcgcccactagaggggcacccaccagttgctgctgccccactacaggccccacacctgccctgggcatgcccagcccctggtggtggggggttctctgctgagaaggcaaactgaggcagcatgcacggaggcggggtcaggggagacgaggccaagctgaggaggtgctgcaggtcccgtctggctccagcccttgtcagattcacccagggtgaagccttcaaagctttttgctaccaaagcccactcaccctttgagctacagaacactttgctaggagatactcttctgcctcctagacctgttctttccatctttagaaacatcagtttttgtatggaagccaccgggagatttctggatggtggtgcatccgtgaatgcgctgatcgtttcttccagttagagtcttcatctgtccgacaagttcactcgcctcggttgcggacctaggaccatttctctgcaggccacttaccttcccctgagtcaggcttactaatgctgccctcactgcctctttgcagtaggggagagagcagagaagtacaggtcatctgctgggatctagttttccaagtaacattttgtggtgacagaagccnnnnnnnnnnnnnnnnnnnnnnnnnnnnnnnnnntacaaattgaaattaagaaatgttagtaaaatagatcagtgtaaactagattgtattcattactagataaaatgtataagctctctgtactaagaaaatgacttttataacttttga

SEQ ID NO: 185691 - DNA, 1838 bp, Homo Sapiens
  misc_feature (1186)..(1214): n is a, c, g, or t
  misc_feature (1652)..(1661): n is a, c, g, or t
ttgggtcaacaacaactggtatatttttatgcgactgcaccagattctctgcctgaggctgctacggatttgttcccaagccgaacggcaaattgaagaagaaaaccgagagagagaatgggaacgggaagtgctgggcataaagcgagacaagagtgacagccctgccattcagctacgtctcaaagaacctatggatgttgatgtagaagattattacccagctttcctggacatggtgcggagcctgctggatggcaacatagactcatcacagtatgaagattcactgagagagatgttcaccattcatgcctacattgcctttaccatggacaaactgatccagagcattgtcagacagctgcagcatatcgtgagtgatgagatctgtgtgcaggtgactgacctttacctggcagaaaataataatggggccaccggaggccagctgaacacacagaactcaaggagcctcctggagtcaacgtatcagcggaaagctgagcagctaatgtcagatgagaattgctttaagcttatgtttattcagagccaaggccaggtccagctgactattgagcttctggacacagaagaggagaattcggatgaccctgtggaagcagagcgctggtcagactacgtggagcgatacatgaattcagatactacctcgcctgagcttcgtgaacatctagcacagaaaccagtatttctccccaggaatctacggcggatccggaagtgtcaacgtggtcgagagcagcaaaaggaagggaaggaaggaaacagcaagaagaccatggagaatgtggatagtctggataagctggagtgtagattcaagctgaattcctacaagatggtgtatgtgatcaaatcagaggactatatgtatcggaggaccgccctgctccgggctcatcagtcccatgagcgtgtaagcaagcgtctacatcagagattccaggcctgggtagataaatggaccaaggagcatgtgccccgtgaaatggcagcagagaccagcaagtggctcatgggtgaggggctggagggcctggtgccctgtaccaccacctgtgatacagagaccctgcattttgtgagcattaacaagtatcgtgtcaaatacggcacagtattcaaagccccttaactgcaaagccagagcagataactnnnnnnnnnnnnnnnnnnnnnnnnnnnnncctatgcactcacacactgaagaaacaaggaagatgcctttcaagcctcactgggcctctctgggacatggccacctgacctgtgtgtggctggtgcagcctggcaccaagtgggctacctgttaggaacatgaataccttacaaagctgaagctggaacttttcccaaagggttttgggtatagcctgccctggaggggaaggaagtccatgcaagcaaagacatgcagtttgcttgcacacaccagcagagctaagactggagtctcctgtggcctaactttcaatgagggaaccggatgctgttcacactttgactggatggagatgcatttacaaaacagactggagaaggacttaatactcagatggattggaactatcatggtcactgctcctctcccctccccacaaaaggaaaaaaaagctggatttgannnnnnnnnnctggtcactcgagcacatctaagatcacccattagttttatctgggacctgcagtttggctttgggattgatcatcttgtggattttattcctgacgattcccttgctgcctacccttttctctcctctggtctcaacctcaacgagttcaaatcagttgtcctttttaggctcccg

SEQ ID NO: 185692 - DNA, 628 bp, Homo Sapiens
  misc_feature (161)..(189): n is a, c, g, or t
ttggattccaggcctgggtagataaatggaccaaggagcatgtgccctgtaccaccacctgtgatacagagaccctgcattttgtgagcattaacaagtatcgtgtcaaatacggcacagtattcaaagccccttaactgcaaagccagagcagataactnnnnnnnnnnnnnnnnnnnnnnnnnnnnncctatgcactcacacactgaagaaacaaggaagatgcctttcaagcctcactgggcctctctgggacatggccacctgacctgtgtgtggctggtgcagcctggcaccaagtgggctacctgttaggaacatgaataccttacaaagctgaagctggaacttttcccaaagggttttgggtatagcctgccctggaggggaaggaagtccatgcaagcaaagacatgcagtttgcttgcacacaccaacagagctaatactgtagtctcctgtggcctaactttcaatgaaggaaccggatgctgttcacactttgactggatggagatgcatttacaaaacagactgggagaacgacttaatactcagatggattggaactatcatggtcactgctcctctcccctccccacaaaagggaaaaaaagctgggattgga

SEQ ID NO: 185693 - DNA, 1233 bp, Homo Sapiens
  misc_feature (262)..(294): n is a, c, g, or t
  misc_feature (717)..(759): n is a, c, g, or t
ttggtaactttttagaggcatatgccaaatatcatttggtatacttaacaatattagtgttttaaaatgatgagttataattatttgaacatatagatatgtaacatgccacaaatcatttctaccatgcaaggtgtataagttgtttattttttagtgttaaaactataatagcttgaatataggtaccaatgaacaaattcaaattgcacctcttttcttaaaagaatgggatttaaactcttataaacattctttaacnnnnnnnnnnnnnnnnnnnnnnnnnnnnnnnnngcattcttctagccagtgattgatctgctaatgctttctttgccactctaagtaaaatttatttcacctcctcaatgaaaacctcatggttttgctggctgtttataactgcatcgcacttctagttgtggcttgaattttcagttaagctttcatggtatgtaattttccagccttttgagaaaacaagcatactataagtgagagctgttttgttttccttgtttgtttgtttcatgctaggcttttcctggcagcatgtccattgcaggcagtggacaagaaaccaccagcattgagctaacccagtacatgctaggacctgtcctagaggggccacttttcattacctgagttatttgtacagaagggcaatagccattatttttgtggatgaggaaacaagaataaacagaatggtannnnnnnnnnnnnnnnnnnnnnnnnnnnnnnnnnnnnnnnnnngccattcttgaggaaatataaaaatgacatgttttcaccccaactatctggggctattgaatgactaattcagtccctaaagttctgtgaaaacacaaaagtctaatgatttgagtgagtaaaaggtaatggtgcatttgaacaaataaatgctgtcgtggtcagcaagatccgtgattttaacatgtgatgactggaaaaaggtttgggttatttggaactctggctaaaacttctttcgggtgacatgtgatcgtttaaatgggattaaatgaataaagcacacagacagtgctactcttgaccactattttaccatttctttgcaaacaatgttcacattttcatatttttttcccaactaaaccacccaagaaagaaattttgtatgtatatacagtgtgtgtgtatacaaaatcatgatataatagaatgcaactactttctttttctaccaaaccaaaaggtttattt

SEQ ID NO: 185694 - DNA, 864 bp, Homo Sapiens
  misc_feature (190)..(222): n is a, c, g, or t
  misc_feature (668)..(685): n is a, c, g, or t
tgtacaaattatttgaacatatagatatgtaacatgccacaaatcatttctaccatgcaaggtgtataagttgtttattttttagtgttaaaactataatagcttgaatataggtaccaatgaacaaattcaaattgcacctcttttcttaaaagaatgggatttaaactcttataaacattctttaacnnnnnnnnnnnnnnnnnnnnnnnnnnnnnnnnngcattcttctagccagtgattgatctgctaatgctttctttgccactctaagtaaaatttatttcacctcctcaatgaaaacctcatggttttgctggctgtttataactgcatcgcacttctagttgtggcttgaattttcagttaagctttcatggtatgtaattttccagccttttgagaaaacaagcatactataagtgagagctgttttgttttccttgtttgtttgtttcatgctaggcttttcctggcagcatgtccattgcaggcagtggacaagaaaccaccagcattgagctaacccagtacatgctaggacctgtcctagaggggccacttttcattacctgagttatttgtacagaagggcaatagccattatttttgtggatgaggaaacaagaataaacagaatggtatttttaggtttgtattttatgtcnnnnnnnnnnnnnnnnnngccattcttgaggaaatatagagatgacatgttttcaccccaactatctggtgctattgaatgactaattcagtccctaaagttctgtgaaaacacaaaagtctaatgatttgagtgagtaaacgtaatggtgcatttgaacaagtaaatgctgtcgtggtcagcaagatccgtgattt

SEQ ID NO: 185695 - DNA, 1344 bp, Homo Sapiens
  misc_feature (972)..(1004): n is a, c, g, or t
agcaatgctttttctattaagccaactttgtacaaaaaagttggcttagagcaatcaaaatacaaagttattaataaagaccagtggtgcaatgtcctagagtttagcagaacaattaatcttgacctcagcaactatgatgaagatggagcatggccagttttgttggacgagtttgtggagtggtataaagacaaacagatgtcctaggactttatgcatagcagcgagagagtcactgttaccacagttttgtcacccattagccataaattgctgtttgtatcaaagcgcatgctgcttctcttgcactgtttccctttcgcagggacatgttggtgtttgctattgaattggccagctctgcttgctgtgtggcattgttctcttggaaggctgctttgcagtttgtatttacactacagattgttggatttgccaacgtcctcactgtgattatgtgtatattgctgtttaaattttgtatatgtgtataaaaggaaaaagcttcacctagagattatttctgaaaaatgtattgtaaaaataattttgtggcatttctagtccctttttttgaatgaaccaattatactttatttggtctcctatgtagcatttcagaaaacaagagaaaactgttaccatgaacaaacattgccagaattaaccttactgtttaagaggccaacttctggaaggaggtaggagtcataactttttagaggcatatgccaaatatcatttggtatacttaacaatattagtgttttaaaatgatgagttataattatttgaacatatagatatgtaacatgccacaaatcatttctaccatgcaaggtgtataagttgtttattttttagtgttaaaactataatagcttgaatataggtaccaatgaacaaattcaaattgcacctcttttcttaaaagaatgggatttaaactcttataaacattctttaacnnnnnnnnnnnnnnnnnnnnnnnnnnnnnnnnngcattcttctagccagtgattgatctgctaatgctttctttgccactctaagtaaaatttatttcacctcctcaatgaaaacctcatggttttgctggctgtttataactgcatcgcacttctagttgtggcttgaattttcagttaagctttcatggtatgtaattttccagccttttgagaaaacaagcatactataagtgagagctgttttgttttccttgtttgtttgtttcatgctagcttttcctggcagcatgtccattgcagcagtggacaagaaaccaccagcattgagctaacccagtacatgctagacctgtcctagagggccactttt

SEQ ID NO: 185696 - DNA, 1319 bp, Homo Sapiens
  misc_feature (1157)..(1166): n is a, c, g, or t
ttggctcctttatgttaatgtgattggtctggctgatgattcagttcggtctctaaagctccctccttgggcctgtggattcataatggatacaaattctgacccaaagaactgcccctttcaactttgctctccaatacgtcccccaaaatattacacatacaagtttgcagaaggcaaactgtttgaggaaactgggcatgaagacccaatcacaaagactagtcgcgttttacgtctagaagccaaaagcaaggatggaaaattagtgccaatgactgttttccacaaaactgactctgaggacttgcagaagaaacctctcttggtacatgtatatggagcttatggaatggatttgaaaatgaatttcaggcctgagaggcgggtcctggtggatgatggatggatattagcatactgccatgttcgaggtggtggtgagttaggcctccagtggcacgctgatggccgcctaactaaaaaactcaatggccttgctgatttagaggcttgcattaagacgcttcatggccaaggcttttctcagccaagtctaacaaccctgactgctttcagtgctggaggggtgcttgcaggagcattgtgtaattctaatccagagctggtgagagcggtgactttggaggcacctttcttggatgttctcaacaccatgatggacactacacttcctctgacattagaagaattagaagaatgggggaatccttcatctgatgaaaaacacaagaactacataaaacgttactgtccctatcaaaatattaaacctcagcattatccttcaattcacataacggcatatgaaaacgatgaacgggtacctctgaaaggaattgtaagttatactgagaaactcaaggaagccatcgcggagcatgctaaggacacaggtgaaggctatcagacccctaatattattctagatattcagcctggaggcaatcatgtaattgaggattctcacaaaagattacagcccaaattaaattcctgtacgaggaacttggacttgacagcaccagtgttttcgaggatcttaagaaatacctgaaattctgaaacactgcattcaactgggaattggaaacacactgaaatatttcatagtcttacttccaattgagttagcnnnnnnnnnnttaataacttgagacttttaagttattaattttttaaaatgtgcttctccatctaaattttgcttagtctacatctcacttgcttatactattctctccattgatgcacatgcccattaacctaggaaagtagttttcaaatcatgctcctta

SEQ ID NO: 185697 - DNA, 1929 bp, Homo Sapiens
  misc_feature (317)..(333): n is a, c, g, or t
  misc_feature (650)..(659): n is a, c, g, or t
aattgcacaaaatcatgtttgttttgccatttaaacatatcacacaatcctattctgaaagacaaatgttcataaaacaaagcaaaaataaaaattcacaacttaattacctagatttgtcatttaaaggtttaaagaaaaaagagaggggctctcttacaagctttttcacaagtgtcacattttctccttaaaagggaaggatttcaaaagaaaggtgaaatagcttaaacagaaatattcataaaaaggaactttacagaattgtcaacaatattaagacaaaattgactaaccggtttcattaccgcatcttnnnnnnnnnnnnnnnnnagtgtgttccgccaggactagaacaggctttgtgttcagacagaaatgcttcaaaatcccagtgaaatgaactgtgctaaaaacccgacaggcatcttccctgccctccccccactcgtcttctgcaatcctctaacccagtttctaatctctgaaaggggccaaagctgtgaggggggaaggaccccgccctagtgtggccaccctatatataattacatattgcatcgtaaatgctggccttccttctgcaaattatgattttggaaaatccaacccatgcagagggataaaaaactgacatcccttgggtaacnnnnnnnnnngcaacattccaagccccccccggtcccctatccaaggacaaatgtagggcctctaggatgtcccagacccacctcggagggccagtcagttcaggtaggtcaggcccagttctcttccctcccgacagaccccgggcccgggaagcaccgaagaccatgatgctggctggagtgaagacactcgtttccgtatcaagagctgagcctaagaaatgctcatcgttggtcaggctgggtctgggccaaagggacagacagaaagaaatactgtctccacgggaggaagagggagaggagggaggatggagagcggtgggcatgcaggggacttggcagggcagggtggagaaggtgggaccactgggaggggaccgaggtaaaagtggctcttcagagccaggtgaagagtctgtggcctaacggaaacagaaaggagcgcccccaacccccactcctcttggctcatcactagtggccctgaggactccctcccaagggatggaatgcaaatccaaatactaaaacagcctagggaggagcgagcgcccgctgtggcagtggcatctggggcatggcttcgaggcggtgagggccgggcctccatgctcacctgcaggccggctgcttgctgcactccctggaaagccagggccccatcttctcgggactctgccagtctcttttcagttcacaaaggcgtctatggagcgctgggtgcacactggacgcttagacgtgaacatctttctcagctcatcacctgaggttggagggccccaagggcccctctgtctggagtctgtactggctcatctgggcccaaggcctctccttgtagggaatccagtgggggatggggacatgactacagcctcttcgctctgggggaagctgtgggaaggcttccaactctcgttgctgattctagttccttgactggaaggggtttgagataagacaagctcggaagaaaaaaagccaggcagcagtttctgggcagcttctatcctgggcagtaccaataacacactggttcacctgggggcagggggttagacaggataaaagtttgcagcgtaaccaatacaacatttttcccaagatctcccatcctccaatgctagggctgccctcagaaataccgaaataaggcctccaaaggctggttcaggctggtgccagttatggtttgttctcctctgcacactaggtttggaggaggtgaaaaggcttgagaagagatggaagccccagaagaaaatacagccaa

SEQ ID NO: 185698 - DNA, 2353 bp, Homo Sapiens
  misc_feature (372)..(411): n is a, c, g, or t
ccccatcttctcggaactctgccagtctcttttcagttcacaaagggcgtctatagagcgctggtgcacactggacgcttagacgtgaacatctttctcagctcatcacctgaggttggagggccccaagggcccctctgtctggagtctgtactggctcatctgggcccaaggcctctccttgtagggaatccagtgggggatggggacatgactacagcctcttcgctctgggggaagctgtgggaaggcttccaactctcgttgctgattctagttccttgactggaaggggtttgagataagacaagctcggaagaaaaaaagccaggcagcagtttctgggcagcttctatcctggggcgagagccnnnnnnnnnnnnnnnnnnnnnnnnnnnnnnnnnnnnnnnnaacacacagccacctcgtccggggggccagtgcccagctcaagagctttcccacacgccaatcctgctgacacttgtcccctccccaccggcctcaggggaagggtgctgctgtgtgctgtgctgatggcaagtctcaaagtctgtataaaaggaaatggagataggtgggctggtccagaatgaactcccaggcccccgaccccatgtgaggaagagggggtcagaggggggattggaggggtgagggcggggtgtcgacagcttagtgtatgtaggctcggtacacggcggacatatcgttgtcagactggtccagcgccttggctcttttgtacacctcatttgctgcagctgccatgggagtcggatggttgaccgcatcacccagcgcaatggctaagcggagatccttctgaatgtatttcaggtagaaatcaggcttaaagtttccttgcaggatattttggcacttctggtccaggaagatgctggccaactgtccctgattgaggatgtccaagagtgtctgctgggactggcctgtcacctgggccagggtcagcccctcggcaatagtggccatgaagctcccttggaccatgttcacgatcagcatcatcttggctgcattgcccacttcacctaggaagaaggaggtcttccccatcgcctggaagcagctgctgcagtcctcatataagcccctgtctccagccgctaagatcaccaacatcccgtcattagacagctgctgattccctgagacgggggcttccagaaagcgcccccccctggacacaatcacctgggccagctcagtgacggtgtcagcgtccactgttgacatgtccacgtagcacttcccagggcggatcccttgcagcacaccactggggcccagcaccaggtccttggccgccttgggatccgacacgcaggcgaaagtgatgtcgcaggttgagacgacttcagcgggggttcttcccagacgggccccctcctggatgaacaaatcacatttctctgcagtgcggttccagacagtcactgtgtgacccatttttagcaagttggagacgattccacttcccatgagaccaaggcccaaaaatcctatctttttgtctgtgggtgtgatgctgccattcacggctgtgctgtcagctgcctggatggaggtggagccagtttcctcttcacatattttcaacttcttcgtgattgcctggtaacagacagctggcttctctgtttggcttagcaggaaatgatggaaatgaggatctgcatctttaacaggctcgcttgcggttggctgccatttaaacgcggccatcggtccggccatcatccccttcacggtactagactccgggatggtgagatccttctcatcctttgggggccgaccccgcttccggggactttgctcttgggctcttttcagaggggatttggagcctctctctgaagagcctgaagacaccctcttctttccttctcccatgttcttcttcaccttcccttcagacaggctaagtttgcgcttctcatcacctgagtttggcctacttctctcctcactggaattacgtcgattcttgtcatcagaagaattgtgggatgacgtctggtctttccctttggctctcctgaggaactcttcgacagcatctaccgcttgctggaatcgtttacccttgttaatttttatcatttcctctttatgagcatgatatggcttcagctgttccactttgatccaggcatgatcttctgttccaaaaaatttcacaaagaagcatttctttccgcgaggtttcttcaagtcctttggtggattaacaatctttcctggccaaggaggatatcggccgagtttcccccacaccaagtcgccgagccgcagactcacagccgccatcttaccccaaccccaa

SEQ ID NO: 185699 - DNA, 1394 bp, Homo Sapiens
  misc_feature (1238)..(1284): n is a, c, g, or t
aggaagttatagaactaaccaaagaccttctgtcaactcaaccttctgagacgcttgcaagttcagacagttttgcttctactcaacctactcattcatggaaagtaggagacaagtgtatggcagtctggagtgaagatggacagtgttatgaagcggagattgaggagatagatgaagaaaatggcaccgctgcaatcacctttgctggttatggcaatgctgaagtgactccactgttgaacctcaagcctgtagaagaaggaaggaaggcaatggaggacagtggcaacaaacccatgtcaaaaaaagaaatgattgcccagcagcgtgaatataaaaagaagaaagctttgaaaaaagctcagagaataaaagaacttgagcaggaaagagaggaccagaaagtgaaatggcaacaattcaacaacagagcctattctaaaaacaaaaaaggccaggtaaagaggagtatttttgcttcacctgagagtgtgactggtaaagttggagtaggaacctgtggaattgctgataaacctatgacacaatatcaagatacctctaaatacaatgtcaggcatttgatgcctcaataatcagaaaaactgttggatttcatctctgcagggctttacatttacctttttatccttatatttttctaaaggtaaattatttgttagatgagtaagcaagataccattgtcgtcattggttggcttcagtagaatgaaacgtgaagaaattgcatttgataactgctattcatttaacttttctcattatcagtaccacggttccctcaaagtttgttgaataaagcaacttttgtagatgctgtttcatacagcacttagatgaattattgatcttcctaatatcaggcgcctacttaacctatggtatgtactttttgtaagttgtaacttgaaattttcagatgctttgaacttgacacatactctagcaattcattggaacaccaaggcaaaaacaccaacctgctaaaagagatcttttcatttttcttattttcagctttaaaacttagctgtcgttcagttaagcttaaagataggttaatttgtaaatggcaaagtttgttttgaggtttttcctcaataacttgtttcccaggcctattaggccatctctaaaattgatctagctgttttatttttatgtactcttagttttatgtaagaaaccttaggatgagctcccttttctaaggnnnnnnnnnnnnnnnnnnnnnnnnnnnnnnnnnnnnnnnnnnnnnnnccatttacggcagtgggtaccatgttttggatgtgtgatgtttatatgggagaacaaaaagctgatgtatagcccctgtataccagtgtaaaatactaatttttgtaaaa

SEQ ID NO: 185700 - DNA, 2594 bp, Homo Sapiens
  misc_feature (955)..(986): n is a, c, g, or t
  misc_feature (1350)..(1365): n is a, c, g, or t
ttgggacgtggacacggaagtggtcgtcgtcgcggcaccggtgggagctaggcgcgaggctcggagtgcggccagcgggcggaggcggtctcgcatcggcggcgacggagggctcaggcgtcgtcgtttgggtggggggccgctgaactgacaagcgacatttcagctcctttcacccgccggaaccccggagccggggcccgctcagccggcgttaccatgaccaaggccggtagcaagggcgggaacctccgcgacaagctggacggcaacgaactggacctgagcctcagcgacctgaatgaggtcccggtgaaggagctggctgcccttccaaaggccaccatcctggatctgtcttgtaataaactgactactctaccgtcggatttctgtggcctcacacacctggtgaagctagacctgagtaagaacaagctgcagcagctgccagcagactttggccgtctggtcaacctccagcacctggatctcctcaacaacaagctggtcaccttgcctgtcagctttgctcagctcaagaacctgaagtggttggacctgaaggataaccccctggatcctgtcctggccaaggtggcaggtgactgcttggatgagaagcagtgtaagcagtgtgcaaacaaggtgttacagcacatgaaggccgtgcaggcagatcaggagcgggagaggcagcggcggctggaagtagaacgtgaggcagagaagaagcgtgaggctaagcagcgagctaaggaagctcaggagcgggaactgcggaagcgggagaaggcggaagagaaggagcgccggagaaaggagtatgatgccctcaaagcagccaagcgggagcaggagaagaaacctaagaaggaagcaaatcaggccccgaaatctaagtctggctcccgtccccgcaagccaccaccccggaagcacactcgttcctggnnnnnnnnnnnnnnnnnnnnnnnnnnnnnnnnatttggtgtggcgggagggctggttgcttgtcgggtgacagagctgcagcagcagcccctctgcaccagcgtgaacaccatctatgacaatgcggtccagggtctacgccgccatgagatcctccagtgggtcctccagaccgactctcagcagtgagcttgtccccagcacctgctgcctcccagccttggagtttggattcctatggaattgggttctgctggacacaacctctttttagcatcagacctacctgccatcatcaaatggctgcagattggtacatgagacctcctctttgtaggacttcttcattccttagtcagggttccctgaaggaatgaggagaaatgggaggtggcnnnnnnnnnnnnnnnncagttacctgcatgcctaaaggagtaggcttgggggtggggagagagaaaacatagccttttctagttgttatataaagctgtgtaaaggcaaggctcgtttctactaaatggtcagctgtcactacatttatacttttgtatgccacaaaccctttcattcctccctgggaatcagggtagatcaggaggaactgggggggactagaacaccacgctcagtaaatccagtctaaactgggaggtaggggtattcctgttttctttaggacctcagagatgtaagcattttagcagccacacaaaatctctggctatgaaagggacttcatgaccatccagtccaatataacacttgcagacagagaaactgaggtcttccatgacttgcctagtctcccagctagtttgaggcaaaactggattcccactctggtattctttcttccctttacatcattttccctcctttataatgtcctgagagaccagaactcacaccagaatcgattattcctcaggtgaagcatagactctttcatggtagacagatttcacgactcagagatagaaatctcttgctatcatcaggtcacgggcagctcctgtggagtcctgcccaacttatgtggcttccataaaatggcaacagtccaggctccttgcctaattttagagcattaactccctaattgccagtaagcaaggaggtggatctctgcaaacctacactgtctatgacagctctagttgtacttggtgtgactaaatacctcaaaggcaacctgcttctgcaggttttgaagtgtcagcttcataagacactgaggtttagaattgtttgattctagaccataactgaagggcataaatggaaacaggatatgaagggaaacaagtagcatcatggagctgaaaagtggtgcatcacccaatggctagcacaaacaaggatcacactgtccattctcttgtctgctaaattaagcattttcttgcctcctttgcttcatcttttcacaacagctggatagagggatcagaaatgactgtgtcatggtgctcattcactgcaaactcccagttgcaagctccttggctccccggagggagcaagaatctcatagttcagagacacagagggccttttagccctaatgaccttttggatggggactgcaactcattgactatcctgatattgggaagaaaaggactttgttaatcctt

SEQ ID NO: 185701 - DNA, 1300 bp, Homo Sapiens
  misc_feature (694)..(821): n is a, c, g, or t
acaaattgatgagcaatgcttttcttataaagggccaactttgtacaaaaaagttgggtaggcaccgcgtccgagtgcctgccctctgtccccgcggctgggtctcgtctgctccggttcctgggctcctaattctcggtccagcttcttccagagaaaaacgttgaccgcgaggctggggaggagagttgcctctgaggaagaagggcacagagacccaaaattagtttggaaagcatcctgatttggtgcccgaggcctggaaagaaatggcggctggggtgcggcggaggtaggggaggaaaacgttggatgagaagggcctggactcaggaaagggaaccgcgtccgtgtgagcccgctgagcgcgcagaccctgcccctgtctcctgtctgtctgcaggtctgcgcgtctgttgttcccagcgctctgcgaagcctgaaaaggaggagcaacctgtccagaatccccgcaggaaaaggaggggaaatctcgacatggaaaaactctacagtgaaaatgaaggaatggcttcaaaccaaggaaagatggaaaatgaagaacagccacaagacgagagaaagccagaagtaacttgtactctggaagacaagaagttagaaaacgagggaaagacagaaaacaagggcaaaacaggagatgaggaaatgttaaaggataaaggaaagccannnnnnnnnnnnnnnnnnnnnnnnnnnnnnnnnnnnnnnnnnnnnnnnnnnnnnnnnnnnnnnnnnnnnnnnnnnnnnnnnnnnnnnnnnnnnnnnnnnnnnnnnnnnnnnnnnnnnnnnnnnnnnnntgaaacaagggctgcaggaaagcgcccagctgaggatgatgtacccaggaaagccaaaagaaaaactaataaggggctggctcattacctcaaggagtataaagaggccatacacgatatgaatttcagcaatgaggacatgataagagaatttgacaatatggctaaggtgcaggatgagaagagaaaaagcaaacagaaattgggggcgtttttgtggatgcaaagaaatttacaggaccccttctacccctagaggtccaagggaattcaaggtggctgcagggccccacgaaggacattgaagacattccttatgtgtagtgtccctggcaggcatttaccagcccatgtgctttaaccgttacgggtaatactttacttaaggcatccctcctgttgctagcagccttttgacctatctggcaatggcagtgttctcagttaggaaatggttcatctggttacatggaaacaaa

SEQ ID NO: 185702 - DNA, 1489 bp, Homo Sapiens
  misc_feature (1146)..(1207): n is a, c, g, or t
ttgggtttggtgtccctgtcttgcgtgatattgacaaactgaagctttcctgcaccactggacttaaggaagagtgtactcgtaggcggacagctttagtggccggccggccgctctcatcccccataaggagcagagtcctttgtactgaccaagatgagcaacatctacatccaggagcctcccacgaatgggaaggttttattgaaaactacagctggagatattgacatagagttgtggtccaaagaagctcctaaagcttgcagaaattttatccaactttgtttggaagcttattatgacaataccatttttcatagagttgtgcctggtttcatagtccaaggcggagatcctactggcacagggagtggtggagagtctatctatggagcgccattcaaagatgaatttcattcacggttgcgttttaatcggagaggactggttgccatggcaaatgctggttctcatgataatggcagccagtttttcttcacactgggtcgagcagatgaacttaacaataagcataccatctttggaaaggttacaggggatacagtatataacatgttgcgactgtcagaagtagacattgatgatgacgaaagaccacataatccacacaaaataaaaagctgtgaggttttgtttaatccttttgatgacatcattccaagggaaattaaaaggctgaaaaaagagaaaccagaggaggaagtaaagaaattgaaacccaaaggcacaaaaaattttagtttactttcatttggagaggaagctgaggaagaagaggaggaagtaaatcgagttagtcagagcatgaagggcaaaagcaaaagtagtcatgacttgcttaaggatgatccacatctcagttctgttccagttgtagaaagtgaaaaaggtgatgcagcagatttagttgatgatggagaagatgaaagtgcagagcatgatgaatatattgatggtgatgaaaagaacctgatgagagaaagaattgccaaaaaattaaaaaaggacacaagtgcgaatgttaaatcagctggagaaggagaagtggagaagaaatcagtcagccgcagtgaagagctcagaaaagaagcaagacaattaaaacgggaactcttagcagcnnnnnnnnnnnnnnnnnnnnnnnnnnnnnnnnnnnnnnnnnnnnnnnnnnnnnnnnnnnnnncctctccagatggtgctgttgccgaatacagaagagaaaagcaaaagtatgaagctctgaggaagcaacagtcaaagaagggaacttcccgggaagatcagacccttgcactgctgaaccagtttaaatctaaactcactcaagcaattgctgaaacgcctgaaaatgacattcctgaaacagaagtagaagatgatgaagatggatgtcacatgtacttcagtttgaggataaagcagaaaagtgaaagatgcaagcatgcagactcagatacatttgaaa

SEQ ID NO: 185703 - DNA, 2664 bp, Homo Sapiens
ttggaacatggtgtgggaagtgaagacaaatcagatgcctaatgcagtacagaaactcctgttggtgatggacaagagagcctcaggaatgaatgactcattggagttgctgcagtgtaatgagaatttgccatcttcacctggatataactcctgtgatgaacacatggagcttgatgaccttcctgaacttcaggcagttcaaagtgatcctacccaatctggcatgtaccagctgagttcagatgtttcacatcaagaatacccaagatcatcttggaaccaaaatacctcagacataccagaaactacttaccgtgaaaatgaggtggactggctaacagaattggcaaatatcgcgaccagtccacaaagtccactgatgcagtgctcattttacaatagatcatctcctgtacacatcatagccactagcaaaagtttacattcctatgcacgccctccaccagtgtcctcttcttcgaagagtgaaccagccttccctcatcaccattggaaggaggaaacaccagtaagacacgaaagggcaaatagtgagtcagaatctggcattttctgcatgtcctccctgtcagatgatgatgatttgggatggtgcaattcctggccttcaactgtctggcactgttttttgaaaggcacacgactgtgctttcataagggaagcaataaggaatggcaagatgttgaagattttgctagagctgaaggctgtgataatgaggaagatcttcaaatgggcattcacaagggctatggttctgatggtctaaagttgttatcacatgaagaaagtgtatcatttggcgagtctgtactgaagttgacttttgatcctggtacagtagaagatggtttacttaccgtagagtgtaagctggaccaccctttctatgttaaaaataaaggttggtcgtcattttatccaagcttgactgtggtacagcatggcattccatgttgtgaagttcatattggcgatgtatgtctacctcctggacaccccgatgccattaattttgatgattcaggtgtttttgatacatttaaaagctatgacttcacacctatggattcttctgcagtttatgtgttaagtagtatggctcgccagcgtcgtgcatctttgtcttgtggaggacctggtggtcaagactttgcaagatctggattcagtaaaaactgtggctcacctggatcatcacagctctcttccaattctttgtatgctaaagctgtcaaaaaccacagctcagggactgtgagtgccacttctcctaataagtgcaaaagaccaatgaatgccttcatgctttttgccaaaaaatacagagttgaatatactcagatgtatccagggaaagataacagagccataagtgtgatccttggtgacaggtggaagaaaatgaagaatgaagagagaagaatgtacacattagaagcaaaggctttggctgaagaacagaaacgtttaaatcctgactgttggaagaggaaaagaaccaattcaggctcacaacaacattaaaccaggatgcttatgttcttaagtctatatttgcatatacattgactcttgatggaaagacttaagaagatcaaggtctcaccatttgtcctcaattcgtgtgaccataagatactgatagcattgagtcttgaaatgatttaataatatgagtgaggatttgctttctccattagagcattaagctaaaactatcaacattttaaaccaaattgccttatttttcttccaaacttcatatatgtctatcaggtaataataggcttgaaaattgatatcctgtggtgctaaagtacagtagaaagagaggagaagtgtatacatgttttattttaaattgtacgaaaggggaatttaaaaaatatgtaactgctgtttatacattggctccttactgcttattaatctgtattgtacacatgatgaaatgaagcagaagctgggagtcggcctttcctctagtaaccaccacatggctcagcatctgtgccaaacataggcgctcctagtctggtcagtgccaagaggctaccagaacatggggcaggtggctggtgttggtgtcccagcctaagagccacctgctgcagttaccatggcatgctgagttgatgcaccaggtggcagcagccatccgttattatttccaatggagacctagcccaggccaaggtaaagttagttaatagcattgggatatagtcactgtaatggtgctattaacaaacagtcaacaccattgtattttttaagttcgtgttctgtatctcctcagccatgtatcttaaatatattttgtcatcataatctttatggtgggggcagactttgcacttactgcagtgcaacacttgcactttaatttcctccaactgtttaaaattagagcaaatacattggcaatacagctgcttttgctctgagctacaatcatggcttttcatgttacttaccaagtggtgtttctggttaggaatcacagctgtaaaattgatttcagttcatcacacttcttcatgatgttgcccctaaattttgcacactatattcttgtatattatttcaaataaatggaaaaaaaagtgggttatctctgccaactttttttgtac

SEQ ID NO: 185704 - DNA, 2112 bp, Homo Sapiens
ttggcttcggggtgtccgcgtgagaattggctatatcctggagcgagtgctgggaggtgctagtccgccgcgccttattcgagaggtgtcagggctgggagactaggatgtcggacacgtggagctctatccaggcccacaagaagcagctggactctctgcgggagaggctgcagcggaggcggaagcaggactcggggcacttggatctacggaatccagaggcagcattgtctccaaccttccgtagtgacagcccagtgcctactgcacccacctctggtggccctaagcccagcacagcttcagcagttcctgaattagctacagatcctgagttagagaagaagttgctacaccacctctctgatctggccttaacattgcccactgatgctgtgtccatctgtcttgccatctccacgccagatgctcctgccactcaagatggggtagaaagcctcctgcagaagtttgcagctcaggagttgattgaggtaaagcgaggtctcctacaagatgatgcacatcctactcttgtaacctatgctgaccattccaagctctctgccatgatgggtgctgtggcagaaaagaagggccctggggaggtagcagggactgtcacagggcagaagcggcgtgcagaacaggactcgactacagtagctgcctttgccagttcgttagtctctggtctgaactcttcagcatcggaaccagcaaaggagccagccaagaaatcaaggaaacatgctgcctcagatgttgatctggagatagagagccttctgaaccaacagtccactaaggaacaacagagcaagaaggtcagtcaggagatcctagagctattaaatactacaacagccaaggaacaatccattgttgaaaaatttcgctctcgaggtcgggcccaagtgcaagaattctgtgactatggaaccaaggaggagtgcatgaaagccagtgatgctgatcgaccctgtcgcaagctgcacttcagacgaattatcaataaacacactgatgagtctttaggtgactgctctttccttaatacatgtttccacatggatacctgcaagtatgttcactatgaaattgatgcttgcatggattctgaggcccctggcagcaaagaccacacgccaagccaggagcttgctcttacacagagtgtcggaggtgattccagtgcagaccgactcttcccacctcagtggatctgttgtgatatccgctacctggacgtcagtatcttgggcaagtttgcagttgtgatggctgacccaccctgggatattcacatggaactgccctatgggaccctgacagatgatgagatgcgcaggctcaacatacccgtactacaggatgatggctttctcttcctctgggtcacaggcagggccatggagttggggagagaatgtctaaatctctgggggtatgaacgggtagatgaaattatttgggtgaagacaaatcaactgcaacgcatcattcggacaggccgtacaggtcactggttgaaccatgggaaggaacactgcttggtgagcagcagtggggcccaattcaataggtggagcacaaagaagaatcatttgatttcttactgagaaaaagttcaaaggtgtggtttcataaggtaatctgttatctgtggtgagcaggttggtgtcaaaggaaatccccaaggcttcaaccagggtctggattgtgatgtgatcgtagctgaggtatgtgcttcccaggcctccaaagcttccacatttttgttggtatcagttattcatgttgggtgtattctcatcccagatttttctcatttagatcataaacataatagaaagggctagaattgcaatcttgtgtaacttaaaaagcagctagtttttatttcctaggttcgttccaccagtcataaaccagatgaaatctatggcatgattgaaagactatctcctggcactcgcaagattgagttatttggacgaccacacaatgtgcaaccccaactggatcacccttggaaaccaactggatgggatccacctactagacccagatgtggttggcacggttcaagcaagggtacccagatgg

SEQ ID NO: 185705 - DNA, 1703 bp, Homo Sapiens
ttgggggacggtgcaccggacggcgggatcgagcaaatgggtctggccatggagcacggagggtcctacgctcgggcggggggcagctctcggggctgctggtattacctgcgctacttcttcctcttcgtctccctcatccaattcctcatcatcctggggctcgtgctcttcatggtctatggcaacgtgcacgtgagcacagagtccaacctgcaggccaccgagcgccgagccgagggcctatacagtcagctcctagggctcacggcctcccagtccaacttgaccaaggagctcaacttcaccacccgcgccaaggatgccatcatgcagatgtggctgaatgctcgccgcgacctggaccgcatcaatgccagcttccgccagtgccagggtgaccgggtcatctacacgaacaatcagaggtacatggctgccatcatcttgagtgagaagcaatgcagagatcaattcaaggacatgaacaagagctgcgatgccttgctcttcatgctgaatcagaaggtgaagacgctggaggtggagatagccaaggagaagaccatttgcactaaggataaggaaagcgtgctgctgaacaaacgcgtggcggaggaacagctggttgaatgcgtgaaaacccgggagctgcagcaccaagagcgccagctggccaaggagcaactgcaaaaggtgcaagccctctgcctgcccctggacaaggacaagtttgagatggaccttcgtaacctgtggagggactccattatcccacgcagcctggacaacctgggttacaacctctaccatcccctgggctcggaattggcctccatccgcagagcctgcgaccacatgcccagcctcatgagctccaggtggaggagctggcccggagcctccgggcggatatcgaacgcgtggctcgcgagaactcagacctccaacgccagaagctggaagcccagcagggcctgcgggccagtcaggaggcgaaacagaaggtggagaaggaggctcaggcccgggaggccaagctccaagctgaatgctcccggcagacccagctagcgctggaggagaaggcggtgctgcggaaggaacgagacaacctggccaaggagctggaagagaagaagagggaggcggagcagctcaggatggagctggccatcagaaactcagccctggacacctgcatcaagaccaagtcgcagccgatgatgccagtgtcaaggcccatgggccctgtccccaacccccagcccatcgacccagctagcctggaggagttcaagaggaagatcctggagtcccagaggccccctgcaggcatccctgtagccccatccagtggctgaggaggctccaggcctgaggaccaagggatggcccgactcggcggtttgcggaggatgcagggatatgctcacagcgcccgacacaaccccctcccgccgcccccaaccacccagggccaccatcagacaactccctgcatgcaaacccctagtaccctctcacacccgcacccgcgcctcacgatccctcacccagagcacacggccgcggagatgacgtcacgcaagcaacggcgctgacgtcacatatcaccgtggtgatggcgtcacgtggccatgtagacgtctcgaagagataatagcgatggcgtcgtgcaaatgcagcacgtcgcacacaga

SEQ ID NO: 185706 - DNA, 1242 bp, Homo Sapiens
  misc_feature (172)..(181): n is a, c, g, or t
agcaatgcttctcttataatagccaactttgtacaaaaaagttggcagtgagtctgcacacaggatgtgcaaattcggagcagagatcaactctggactcggctctggatttgcatatcctgtgtgtagattcattcttcataacctctgcccagcctagcttgtgtatcannnnnnnnnnctctattaggggaggagcccgtcctggcactcccattggcctgtagattcacctcccctgggcagggccccaggacccaggataatatctgtgcctcctgcccagaaccctccaagcagacacaatggtaagaatggtgcctgtcctgctgtctctgctgctgcttctgggtcctgctgtcccccaggagaaccaagatggtcgttactctctgacctatatctacactgggctgtccaagcatgttgaagacgtccccgcgtttcaggcccttggctcactcaatgacctccagttctttagatacaacagtaaagacaggaagtctcagcccatgggactctggagacaggtggaaggaatggaggattggaagcaggacagccaacttcagaaggccagggaggacatctttatggagaccctgaaagacattgtggagtattacaacgacagtaacgggtctcacgtattgcagggaaggtttggttgtgagatcgagaataacagaagcagcggagcattctggaaatattactatgatggaaaggactacattgaattcaacaaagaaatcccagcctgggtccccttcgacccagcagcccagataaccaagcagaagtgggaggcagaaccagtctacgtgcagcgggccaaggcttacctggaggaggagtgccctgcgactctgcggaaatacctgaaatacagcaaaaatatcctggaccggcaagatcctccctctgtggtggtcaccagccaccaggccccaggagaaaagaagaaactgaagtgcctggcctacgacttctacccagggaaaattgatgtgcactggactcgggccggcgaggtgcaggagcctgagttacggggagatgttcttcacaatggaaatggcacttaccagtcctgggtggtggtggcagtgcccccgcaggacacagccccctactcctgccacgtgcagcacagcagcctggcccagcccctcgtggtgccctgggaggccagctaggaagcaaggggttggaggcaatgtgggaatctcagaaccc

SEQ ID NO: 185707 - DNA, 1226 bp, Homo Sapiens
tgagcaatgcttttttataatgccaactttgtacaaaaaagttggcaatggtaagaatggtgcctgtcctgctgtctctgctgctgcttctgggtcctgctgtcccccaggagaaccaagatggtcgttactctctgacctatatctacactgggctgtccaagcatgttgaagacgtccccgcgtttcaggcccttggctcactcaatgacctccagttctttagatacaacagtaaagacaggaagtctcagcccatgggactctggagacaggtggaaggaatggaggattggaagcaggacagccaacttcagaaggccagggaggacatctttatggagaccctgaaagacatcgtggagtattacaacgacagtaacgggtctcacgtattgcagggaaggtttggttgtgagatcgagaataacagaagcagcggagcattctggaaatattactatgatggaaaggactacattgaattcaacaaagaaatcccagcctgggtccccttcgacccagcagcccagataaccaagcagaagtgggaggcagaaccagtctacgtgcagcgggccaaggcttacctggaggaggagtgccctgcgactctgcggaaatacctgaaatacagcaaaaatatcctggaccggcaagatcctccctctgtggtggtcaccagccaccaggccccaggagaaaagaagaaactgaagtgcctggcctacgacttctacccagggaaaattgatgtgcactggactcgggccggcgaggtgcaggagcctgagttacggggagatgttcttcacaatggaaatggcacttaccagtcctgggtggtggtggcagtgcccccgcaggacacagccccctactcctgccacgtgcagcacagcagcctggcccagcccctcgtggtgccctgggaggccagctaggaagcaagggttggaggcaatgtgggatctcagacccagtagctgcccttcctgcctgatgtgggagctgaaccacagaaatcacagtcaatggatccacaaggcctgaggagcagtgtggggggacagacaggaggtggatttggagaccgaagactgggatgcctgtcttgagtagacttggacccaaaaaatcatctcaccttgagcccacccccaccccattgtctaatctgtagaagctaataaataatcatccctccttgcctagcataaaaaaat

SEQ ID NO: 185708 - DNA, 885 bp, Homo Sapiens
ttggagaatggtgcctgtcctgctgtctctgctgctgcttctgggtcctgctgtcccccaggagaaccaagatggtcgttactctctgacctatatctacactgggctgtccaagcatgttgaagacgtccccgcgtttcaggcccttggctcactcaatgacctccagttctttagatacaacagtaaagacaggaagtctcagcccatgggactctggagacaggtggaaggaatggaggattggaagcaggacagccaacttcagaaggccagggaggacatctttatggagaccctgaaagacatcgtggagtattacaacgacagtaacggatgtgtggcaggttcctgcggcggctgctggcggaggagagccggcgctccacccccgtggggcgcctcttgcttcccgtgctcctgggattccgccttgtgctgctggctgccagtgggcctggagtctatggtgatgagcagagtgaattcgtgtgtcacacccagcagccgggctgcaaggctgcctgcttcgatgccttccaccccctctccccgctgcgtttctgggtcttccaggtcatcttggtggctgtacccagcgccctctatatgggtttcactctgtatcacgtgatctggcactgggaattatcaggaaaggggaaggaggaggagaccctgatccagggacgggagggcaacacagatgtcccaggggctggaagcctcatgctgctctgggcttatgtggctcagctgggggctcggcttgtcctgtagggggcagccctggggttgcagtaccacctgtatgggttccagatgcccagctcctttgcatgtcgccgagaaccttgccttggtagtataacctgcaatctgtcc

SEQ ID NO: 185709 - DNA, 1048 bp, Homo Sapiens
gggggtggcctcaaaggtgagatgatttttgagtcccagtttactcaagacaggcatccagtctccggtctccaaatccacctcctgtctgtccccccacactgctcctcagggcttggtggatccattgactgtgatttctgtggttcagctcccacatcaggcaggaagggcagctactgagtctgagatcccacattgcctccaacccttgcttcctagctggcctcccagggcaccacgagaggctgggccaggctgctgtgctgcacgtggcaggagtagggggctgtgtcctgcgggggcactgccaccaccacccaggactggtaagtgccatttccattgtgaagaacatctccccgtaactcaggctcctgcacctcgccggcccgagtccagtgcacatcaattttccctgggtagaagtcgtaggccaggcacttcagtttcttcttttctcctggggcctggtggctggtgaccaccacagagggaggatcttgccggtccaggatatttttgctgtatttcaggtatttccgcagagtcgcagggcactcctcctccaggtaagccttggcccgctgcacgtagactggttctgcctcccacttctgcttggttatctgggctgctgggtcgaaggggacccaggctgggatttctttgttgaattcaatgtagtcctttccatcatagtaatatttccagaatgctccgctgcttctgttattctcgatctcacaaccaaaccttccctgcaatacgtgagaccctgaaaactcccccgaccccacagagagacagtcagcctggtgagaaatttatcaaaataactcttagtcttgcacattgggcaacccaaaagaaataaaggtttttgcaattcaagcatgcaatccctttatcaagacaaataggttattactccaatatatacaacagacagagaggggctaactcagtttggtttggcatttcaggtttgtctcagatgagatatgttcctccttaagagagctacagcctgggcgctgtggctcat

SEQ ID NO: 185710 - DNA, 975 bp, Homo Sapiens
ttggctctccgaggcggcggcagagacagaagagcggggtcggggccggctgaccaggaacctgggcgagcagcggcgggggcccgagggattctgaaggaagatttccattaggtaatttgtttaatcagtgcaagcgaaattaagggaaaatggatgtagaaaatgagcagatactgaatgtaaaccctgcagatcctgataacttaagtgactctctcttttccggtgatgaagaaaatgctgggactgaggaagtaaagaatgaaataaatggaaattggatttcagcatcctccattaacgaagctagaattaatgccaaggcaaaaaggcgactaaggaaaaactcatcccgggactctggcagaggcgattcggtcagcgacagtgggagtgacgcccttagaagtggattaactgtgccaaccagtccaaagggaaggttgctggataggcgatccagatctgggaaaggaaggggactaccaaagaaaggtggtgcaggaggcaaaggtgtctggggtacacctggacaggtgtatgatgtggaggaggtggatgtgaaagatcctaactatgatgatgaccaggagaactgtgtttatgaaactgtagttttgcctttggatgaaagggcatttgagaagactttaacaccaatcatacaggaatattttgagcatggagatactaatgaagttgcggaaatgttaagagatttaaatcttggtgaaatgaaaagtggagtaccagtgttggcagtatccttagcattggaggggaaggctagtcatagagagatgacatctaagcttctttctgacctttgtgggacagtaatgagcacaactgatgtggaaaaatcatttgataaattgttgaaagatctacctgaattagcactggatactcctagagcaccacagttggtgggccagtttattgctagagctgttggagatggaattttat

SEQ ID NO: 185711 - DNA, 1577 bp, Homo Sapiens
  misc_feature (229)..(247): n is a, c, g, or t
  misc_feature (323)..(345): n is a, c, g, or t
ttggcccacattcatactctgtgctggagcggtttgtagaagaatgttttcaggctggaataatttccaaacaactcagagatctttgtccttcaaggggcagaaagcgttttgtaagcgaaggagatggaggtcgtcttaaaccagagagctactgaatataagaactcttgcagtcttagatgttataaaaatatatatctgaattgtaagagttgttagcacaagnnnnnnnnnnnnnnnnnnnaagcacttgttttgggtacaaggcatttctgacattttataaacctacatttaaggggaatttttaaaggaaatgnnnnnnnnnnnnnnnnnnnnnnncgagggggcaaggagggacagaaaagtaacctcttcttaagtggaatattctaataagctaccttttgtaagtgccatgtttattatctaatcattccaagttttgcattgatgtctgactgccactcctttctttcaaggacagtgttttttgtagtaaaatcactggtttatacaaagctttatttagggggtaaagttaagctgctaaaaccccatgttggctgctgctgttgagatactgtgctttgggagtaaaaaaagaaagttatttctttgtcttaaagaatttttaaaaaattagtcatgagacttattcatctttccagggaacatactgattggtcttaaaagactagacagttaagtaaaaggtggctggaacatctatttttctacaaaactggaaaaatgaacctggttctagaagaatgtacaccaaaataaaacatgtgaagcagtattgattctttattgggagtacatttttttaggtctcttaaactttaatttcacacagtaaattttgaatctcataaggaagcatatttgaacctagtcaatttaatcttagtgttcccttgaaaactttttttccctacaaaattttaagtgaaaaatacaatagtaaattaagattacactggggaaaaaaatgcaggtatcactttactccattgttatctgacctagagcttaattaagttttagaaatatgtaataccttccatcattccatcatccttaaattctgttaccaaataatggctaatgttacaaaaagttatactccagagacccaaagcttgacatttacctaatgtatgagaaaatattaccaattaacaataaagaatgatcatatttttaacctcttttacatagcctaataactcagcaaggcctcaacgtctgtgctaatttaaactgccaaatattgactgcagcaaacaagaattatattcagaatttatgagggtactgttaggagtatactgcttacaggtttagatatagtctgttagaattaaaaccaagtttagtgttcatatttacctcatgggctttatcaagcccatattacctcagcttatatatagttaccatttttaggtttttaattgtttgacacttggatgataaatgcagtcattttattctcaagtgcttaaaattaatgtaattaaaagcttagctgactacagaataggtgccaacttttttgtacaaag

SEQ ID NO: 185712 - DNA, 1733 bp, Homo Sapiens
  misc_feature (1505)..(1524): n is a, c, g, or t
  misc_feature (1600)..(1622): n is a, c, g, or t
ttggagaagagcggggtcggggccggctgaccaggaacctgggcgagcagcggcgggggcccgagggatcctgataacttaagtgactctctcttttccggtgatgaagaaaatgctgggactgaggaagtaaagaatgaaataaatggaaattggatttcagcatcctccattaacgaagctagaattaatgccaaggcaaaaaggcgactaaggaaaaactcatcccgggactctggcagaggcgattcggtcagcgacagtgggagtgacgcccttagaagtggattaactgtgccaaccagtccaaagggaaggttgctggataggcgatccagatctgggaaaggaaggggactaccaaagaaaggtggtgcaggaggcaaaggtgtctggggtacacctggacaggtgtatgatgtggaggaggtggatgtgaaagatcctaactatgatgatgaccaggagaactgtgtttatgaaactgtagttttgcctttggatgaaagggcatttgagaagactttaacaccaatcatacaggaatattttgagcatggagatactaatgaagttgcggaaatgttaagagatttaaatcttggtgaaatgaaaagtggagtaccagtgttggcagtatccttagcattggaggggaaggctagtcatagagagatgacatctaagcttctttctgacctttgtgggacagtaatgagcacaactgatgtggaaaaatcatttgataaattgttgaaagatctacctgaattagcactggatactcctagagcaccacagttggtgggccagtttattgctagagctgttggagatggaattttatgtaatacctatattgatagttacaaaggaactgtagattgtgtgcaggctagagctgctctggataaggctaccgtgcttctgagtatgtctaaaggtggaaagcgtaaagatagtgtgtggggctctggaggtgggcagcaatctgtcaatcaccttgttaaagagattgatatgctgctgaaagaatatttactctctggagacatatctgaagctgaacattgccttaaggaactggaagtacctcattttcaccatgagcttgtatatgaagctattataatggttttagagtcaactggagaaagtacatttaagatgattttggatttattaaagtccctttggaagtcttctaccattactgtagaccaaatgaaaagaggttatgagagaatttacaatgaaattccggacattaatctggatgtcccacattcatactctgtgctggagcggtttgtagaagaatgttttcaggctggaataatttccaaacaactcagagatctttgtccttcaaggggcagaaagcgttttgtaagcgaaggagatggaggtcgtcttaaaccagagagctactgaatataagaactcttgcagtcttagatgttataaaaatatatatctgaattgtaagagttgttagcacaagnnnnnnnnnnnnnnnnnnnnaagcacttgttttgggtacaaggcatttctgacattttataaacctacatttaaggggaatttttaaaggaaatgnnnnnnnnnnnnnnnnnnnnnnncgagggggcaaggagggacagaaaagtaacctcttcttaagtggaatattctaataagctaccttttgtaagtgccatgtttattatctaatcattccagttttgcattga

SEQ ID NO: 185713 - DNA, 1368 bp, Homo Sapiens
  misc_feature (214)..(236): n is a, c, g, or t
  misc_feature (312)..(330): n is a, c, g, or t
  misc_feature (1041)..(1096): n is a, c, g, or t
ttttagcagcttaactttaccccgtaaataaagctttgtataaaccagtgattttactacaaaaaacactgtccttgaaagaaaggagtggcagtcagacatcaatgcaaaacttggaatgattagataataaacatggcacttacaaaaggtagcttattagaatattccacttaagaagaggttacttttctgtccctccttgccccctcgnnnnnnnnnnnnnnnnnnnnnnncatttcctttaaaaattccccttaaatgtaggtttataaaatgtcagaaatgccttgtacccaaaacaagtgcttnnnnnnnnnnnnnnnnnnncttgtgctaacaactcttacaattcagatatatatttttataacatctaagactgcaagagttcttatattcagtagctctctggtttaagacgacctccatctccttcgcttacaaaacgctttctgccccttgaaggacaaagatctctgagttgtttggaaattattccagcctgaaaacattcttctacaaaccgctccagcacagagtatgaatgtgggacatccagattaatgtccggaatttcattgtaaattctctcataacctcttttcatttggtctacagtaatggtagaagacttccaaagggactttaataaatccaaaatcatcttaaatgtactttctccagttgactctaaaaccattataatagcttcatatacaagctcatggtgaaaatgaggtacttccagttccttaaggcaatgttcagcttcagatatgtctccagagagtaaatattctttcagcagcatatcaatctctttaacaaggtgattgacagattgctgcccacctccagagccccacacactatctttacgctttccacctttagacatactcagaagcacggtagccttatccagagcagctctacagagaaagaaaaaaatttaagtttgatagctggacatacctaaagtttactaaattagggataaagctgacaaaatcctatatgccctaaatctttcacatnnnnnnnnnnnnnnnnnnnnnnnnnnnnnnnnnnnnnnnnnnnnnnnnnnnnnnnngaagttgatcctcatgttaatattctcatgctctatttcatttctcattcaagaaaaatcaaaacacattacaaaataactgatctacactgagaaggaacacttcacatataattaactttcacctagatccatgccttcctacccagggacaccattccactatgaggggaagtagccctagaaaattaagttaatatatagacctgaggaaaactaagacatggctgagtccaagtttcacagagaagttaagccaacttttttgtaca

SEQ ID NO: 185714 - DNA, 984 bp, Homo Sapiens
  misc_feature (797)..(821): n is a, c, g, or t
ctttgtacaaaaaagttgggtgtgtatatagccacacataaaaagctagtaatagtagggctctcagaaaatactttccagttgtctaaccttgaatgttattaactcttctatattacaggagatacaactcgtcaacgaatcaaattcagtgatgacagagtatgcaagagtcaccttctcaactgttgtcctcatgatgtcctttctggaactagaatggatcttggagaatgtctgaaagtccatgacctggctttaagagcggattatgaaattgcatccaaagaacaagattttttctttgaacttgatgccatggatcatctgcagtcattcattgcagattgtgatcgtagaacagaagtggccaagaaaagattagcagaaactcaagaagagattagtgctgaagtagcagcaaaggcagaacgtgttcatgagttaaatgaagaaattggtaaattgttagccaaggtggaacaactaggagctgaagggaatgtggaggaatcccagaaagtaatggatgaagtagagaaagcacgggcaaagaaaagagaagcagaggaagtttatcggaattctatgccagcttccagttttcagcagcagaaacttcgagtctgtgaagtctgctctgcctatttaggacttcatgataatgacagacgactggctgatcattttgggggtaaactgcacctgggatttattgaaataagagagaagcttgaagaattaaagagagtcgtagctgagaagcaggagaaaagaaaccaggaacggctgaaacnnnnnnnnnnnnnnnnnnnnnnnnnaagggagaagctgaggaggtctcgatcacacagcaagaatccaaaaagatccaggtccagagagcatcgcagacatcgatctcgctccatgtcacgtgaacgcaagaggagaactcgatccaaatctcgggagaaacgccatcgccacaggtcccgctccagc

SEQ ID NO: 185715 - DNA, 1308 bp, Homo Sapiens
  misc_feature (462)..(486): n is a, c, g, or t
tccgtaggaagcttaaggactgaagaaaatgtacacagctagttagatctccccctgcttcgcgctcttcagagctcctcctgtcttctgatctgccattagcactctcataggaccgcttcttatctttccgatctctgtcacgaggtgatctgtctcttgaactcctgtctctgtcacatgatgctaagtcttggtctctgaatctttcttttgaggatctcctcttggatcgttctctgctcctatctctagaactgtgccgacttctctggtggctacggctgcggctacggctgctggagcgggacctgtggcgatggcgtttctcccgagatttggatcgagttctcctcttgcgttcacgtgacatggagcgagatcgatgtctgcgatgctctctggacctggatctttttggattcttgctgtgtgatcgggacctcctcagcttctcccttnnnnnnnnnnnnnnnnnnnnnnnnngtttcagccgttcctggtttcttttctcctgcttctcagctacgactctctttaattcttcaagcttctctcttatttcaataaatcccaggtgcagtttacccccaaaatgatcagccagtcgtctgtcattatcatgaagtcctaaataggcagagcagacttcacagactcgaagtttctgctgctgaaaactggaagctggcatagaattccgataaacttcctctgcttctcttttctttgcccgtgctttctctacttcatccattactttctgggattcctccacattcccttcagctcctagttgttccaccttggctaacaatttaccaatttcttcatttaactcatgaacacgttctgcctttgctgctacttcagcactaatctcttcttgagtttctgctaatcttttcttggccacttctgttctacgatcacaatctgcaatgaatgactgcagatgatccatggcatcaagttcaaagaaaaaatcttgttctttggatgcaatttcataatccgctcttaaagccaggtcatggactttcagacattctccaagatccattctagttccagaaaggacatcatgaggacaacagttgagaaggtgactcttgcatactctgtcatcactgaatttgattcgttgacgagttgtatctccgtcccgggaggtgcccatcaactggtccagcatcgcgcgcatctgggcctgcgccgacatggcggcggcgtagcgggcggacgggcgggggtggggcgcagaccgggcccttttgggctgggggataaggggaagggatgggccaa

SEQ ID NO: 185716 - DNA, 1932 bp, Homo Sapiens
  misc_feature (590)..(614): n is a, c, g, or t
  misc_feature (1601)..(1648): n is a, c, g, or t
ggcatcatcaaggaaaacagggttcagttcagatcaagttagatactgtacatctagcctagctggatctggtgtctgggatctgctcactgtcacttgaacagctgtgaactaaacaatagtacgtaactccgtaggaagcttaaggactgaagaaatgtacacagctagttagatctcccctgcttcgcgctcttcagagctcctcctgtcttctgatctgccattagcactctcataggaccgcttcttatctttccgatctctgtcacgaggtgatctgtctcttgaactcctgtctctgtcacatgatgctaagtcttggtctctgaatctttcttttgaggatctcctcttggatcgttctctgctcctatctctagaactgtgccgacttctctggtggctacggctgcggctacggctgctggagcgggacctgtggcgatggcgtttctcccgagatttggatcgagttctcctcttgcgttcacgtgacatggagcgagatcgatgtctgcgatgctctctggacctggatctttttggattcttgctgtgtgatcgggacctcctcagcttctcccttnnnnnnnnnnnnnnnnnnnnnnnnngtttcagccgttcctggtttcttttctcctgcttctcagctacgactctctttaattcttcaagcttctctcttatttcaataaatcccaggtgcagtttacccccaaaatgatcagccagtcgtctgtcattatcatgaagtcctaaataggcagagcagacttcacagactcgaagtttctgctgctgaaaactggaagctggcatagaattccgataaacttcctctgcttctcttttctttgcccgtgctttctctacttcatccattactttctgggattcctccacattcccttcagctcctagttgttccaccttggctaacaatttaccaatttcttcatttaactcatgaacacgttctgcctttgctgctacttcagcactaatctcttcttgagtttctgctaatcttttcttggccacttctgttctacgatcacaatctgcaatgaatgactgcagatgatccatggcatcaagttcaaagaaaaaatcttgttctttggatgcaatttcataatccgctcttaaagccaggtcatggactttcagacattctccaagatccattctagttccagaaaggacatcatgaggacaacagttgagaaggtgactcttgcatactctgtcatcactgaatttgattcgttgacgagttgtatctcctgtaatatagaagagttaataacattcaaggttagacaactggaaagtattttctgagagccctactattactagctttttatgtgtggctatatacacacattataaatcagctcaagagggattagtttttatatacatcctatagaaaaactattttagacaacatgcagttgcagtaagtgtactgcatacataattcaaatagtcaaagtgagaaagcaatgcattctgttaaatagagtacttcagaaaagcataggattttagagcaggaatggactttaaagattatcgagtccaactccttnnnnnnnnnnnnnnnnnnnnnnnnnnnnnnnnnnnnnnnnnnnnnnnnagacccactaagagagtttatactggtatacaatgttcccttcttgacactaagcattgatatatttttatttacagtaattgaaaaacataaaaaataatcttgcaaacattgcatacacactgcgaatccccactgaaccccagacgccatttcttccactattttgttccagctgaagtgtctcccttttgctgctgggaggagttagagagggtagaataacgcgtttaagagcgtacaaacctggaagaaggacttacacaccagtcaaacaaagccaa

SEQ ID NO: 185717 - DNA, 1382 bp, Homo Sapiens
  misc_feature (1119)..(1150): n is a, c, g, or t
tttgtacaaaaaagttggctgtaatttgtccgaaaactgactcctctgtcatgggtatattcgtctatatatcttcagctatcaagagcttaatatttatcctattctttaatttgggtttttgggtttcccaacatattttgctcctcaaattaatatttttcagatcctcaaaagaaagattcagagaccaagacttagcatcatgtgacagagacaggagttcaagagacagatcacctcgtgacagagatcggaaagataagaagcggtcctatgagagtgctaatggcagatcagaagacaggaggagctctgaagagcgcgaagcaggggagatctaactagctgtgtacatttcttcagtccttaagcttcctacggagttacgtactattgtttagttcacagctgttcagggtgacagtgagcagatccagacaccagatccagctaggctagatgtacagtatctaacttgatctgaactgaacctgttttccttgatgatgcctaaaactacatccatagtttctggtgaacctgtaatacagttctgaaagtacagttttatataataagatgctgatctctttattctttcaagtaagagtgctagtgaacaaattgtgttacttgccttgggattttttgaacgtttgtaaaatgctgtcttcctagtccaaacagctgcagctttgggcatttttctttttaattattcttcctctgactttgtatcccttaatacctacactctccaattgtaagagaaagggggcagggaagcaatatagcttccattctaaggctgtattcccgttatgaattactagctgattacagttcagagcattgatcctggaatgtgtgctggagaaatttaaaatactggggttttttgtttaatggtgcctatttagagttggaagttgaacagctgttgcattacatacttttgcttttttattgaaattttgaaatcaaacgtcttgatttttctgttctgttgaattgctatgttcaggatgttctagggggtgggggcagggactcttttcgtaataagcacttgttttattttgtgtgtgtggagtataaaggctacacccttattgnnnnnnnnnnnnnnnnnnnnnnnnnnnnnnnncaatcaccaccaccattattaaactgtaacttgtctagtaaattgtcactagaactatttgctgtgggcatttcctctattctgttacgtcattaacagtgccttactgtgcaaggcaccaaaaggacataaatacttacttgcaagattccagatgagctgttcatgtgggccccttgctgactataatccagccactcagggttgtttgtaatgaccgttatagaaaagg

SEQ ID NO: 185718 - DNA, 1489 bp, Homo Sapiens
  misc_feature (500)..(524): n is a, c, g, or t
gtcaccctgaacagctgtgaactaaacaatagtacgtaactccgtaggaagcttaaggactgaagaaatgtacacagctagttagatctcccctgcttcgcgctcttcagagctcctcctgtcttctgatctgccattagcactctcataggaccgcttcttatctttccgatctctgtcacgaggtgatctgtctcttgaactcctgtctctgtcacatgatgctaagtcttggtctctgaatctttcttttgaggatctcctcttggatcgttctctgctcctatctctagaactgtgccgacttctctggtggctacggctgcggctacggctgctggagcgggacctgtggcgatggcgtttctcccgagatttggatcgagttctcctcttgcgttcacgtgacatggagcgagatcgatgtctgcgatgctctctggacctggatctttttggattcttgctgtgtgatcgggacctcctcagcttctcccttnnnnnnnnnnnnnnnnnnnnnnnnngtttcagccgttcctggtttcttttctcctgcttctcagctacgactctctttaattcttcaagcttctctcttatttcaataaatcccaggtgcagtttacccccaaaatgatcagccagtcgtctgtcattatcatgaagtcctaaataggcagagcagacttcacagactcgaagtttctgctgctgaaaactggaagctggcatagaattccgataaacttcctctgcttctcttttctttgcccgtgctttctctacttcatccattactttctgggattcctccacattccggtcagctcctagttgttccaccttggctaacaatttaccaatttcttcatttaactcatgaacacgttctgcctttgctgctacttcagcactaatctcttcttgagtttctgctaatcttttcttggccacttctgttctacgatcacaatctgcaatgaatgactgcagatgatccatggcatcaagttcaaagaaaaaatcttgttctttggatgcaatttcataatccgctcttaaagccaggtcatggactttcagacattctccaagatccattctagttccagaaaggacatcatgaggacaacagttgagaaggtgactcttgcatactctgtcatcactgaatttgattcgttgacgagttgtatctccatattcaggagacaagattcagcaagggcagctggttaaattcctttcatgttgagtcaaataagtcaaacatcagttgtacatggttcacaactatactggaacatatgggtcaatactgagtgctttttggaaagaagttttaaagattcttttctatgctaatagcaaaatatgacatttattcagctgaatggacttcatgttactttctgacggctttgacttctcaaagtcctaagttattcagttcaaacaaaaacgtggagctgcagatgatttcagccaa

SEQ ID NO: 185719 - DNA, 1002 bp, Homo Sapiens
ttggatttagagccgggtaggggagcgcagcggccagatacctcagcgctacctggcggaactggatttctctcccgcctgccggcctgcctgccacagccggactccgccactccggtagcctcatggctgcaacctgtgagattagcaacatttttagcaactacttcagtgcgatgtacagctcggaggactccaccctggcctctgttccccctgctgccacctttggggccgatgacttggtactgaccctgagcaacccccagatgtcattggagggtacagagaaggccagctggttgggggaacagccccagttctggtcgaagacgcaggttctggactggatcagctaccaagtggagaagaacaagtacgacgcaagcgccattgacttctcacgatgtgacatggatggcgccaccctctgcaattgtgcccttgaggagctgcgtctggtctttgggcctctgggggaccaactccatgcccagctgcgagacctcacttccagctcttctgatgagctcagttggatcattgagctgctggagaaggatggcatggccttccaggaggccctagacccagggccctttgaccagggcagcccctttgcccaggagctgctggacgacggtcagcaagccagcccctaccaccccggcagctgtggcgcaggagccccctcccctggcagctctgacgtctccaccgcagggactggtgcttctcggagctcccactcctcagactccggtggaagtgacgtggacctggatcccactgatggcaagctcttccccagcgatggttttcgtgactgcaagaaaggggatcccaagcacgggaagcggaaacgaggccggccccgaaagctgagcaaagagtactgggactgtctcgagggcaagaagagcaagcacgcgcccagaggcacccacctgtgggagttcatccggacatcctcatccacccggagctcacgagggcctcatg

SEQ ID NO: 185720 - DNA, 1671 bp, Homo Sapiens
ttggctctgctcactgtctcctcctgacccttaaccccaccacccacaatgcaccaggtctaattggtagctgcaccaattcaagctatgaagatatggggcgctcagcagctgtggccaagcaggcactggcccatggcctcaagtgcaagtcccagttcaccatcactccaggttccgagcagatccgcgccaccattgagcgggacggctatgtgagtgcccatatccccctgcccatctcccccaccccatgctgagtaatgcctccaggcggcacaagcccagaggcctgttgggccggggctggggcaggtcccagtggctgccctggggttccagtacagcacttcgtcctgcagccaccacatcaccccttcccatcagactctcacccacccttgacattctgtcttcctctctccctggcaggcacagatcttgagggatctgggtggcattgtcctggccaatgcttgtggcccctgcattggccagtgggacaggaaggacatcaagaagggggagaagaacacaatcgtcacctcctacaacaggaacttcacgggccgcaacgacgcaaaccccgagacccatgcctttgtcacgtccccagagattgtcacagccctggccattgcgggaaccctcaagttcaacccagagaccgactacctgacgggcacggatggcaagaagttcaggctggaggctccggatgcagatgagcttcccaaaggggagtttgacccagggcaggacacctaccagcacccacccaaggacagcagcgggcagcatgtggacgtgagccccaccagccagcgcctgcagctcctggagccttttgacaagtgggatggcaaggacctggaggacctgcagatcctcatcaaggtcaaagggaagtgtaccactgaccacatctcagctgctggcccctggctcaagttccgtgggcacttggataacatctccaacaacctgctcattggtgccatcaacattgaaaacggcaaggccaactccgtgcgcaatgccgtcactcaggagtttggccccgtccctgacactgcccgctactacaagaaacatggcatcaggtgggtggtgatcggagacgagaactacggcgagggctcgagccgggagcatgcagctctggagcctcgccaccttgggggccgggccatcatcaccaagagctttgccaggatccacgagaccaacctgaagaaacagggcctgctgcctctgaccttcgctgacccggctgactacaacaagattcaccctgtggacaagctgaccattcagggcctgaaggacttcacccctggcaagcccctgaagtgcatcatcaagcaccccaacgggacccaggagaccatcctcctgaaccacaccttcaacgagacgcagattgagtggttccgcgctggcagtgccctcaacagaatgaaggaactgcaacagtgagggcagtgcctccccgccccgccgctggcgtcaagttcagctccacgtgtgccatcagtgggatccgatccgtccagccatggcttctattccaagatgggtgtgaccacgacatgcttcctggctccccgcttacccacggagtggactgtggttgtggtgggggggttcctaaataactttttaagcccc

SEQ ID NO: 185721 - DNA, 2129 bp, Homo Sapiens
  misc_feature (1015)..(1023): n is a, c, g, or t
  misc_feature (1220)..(1371): n is a, c, g, or t
ctttgtacaaaaaagttggggatgctcatactttggtcaataatgcaagaaggagaaaatatgactaaccctgttcctaccttgttaagatagactaatgtttgtaattctgtttcttgatatacagatagagtgtctaaagaagatgaagacatctacaagcttaggcatgatttgaaaaagacttcaataactcagcaacccagcaaacacaggacagatgaggtgtgttgggaaagagtaaagtagatactcacgctttacgttatttccactctttattaattagcacttggactatgattatcatggttcaaatatgtcatatttacttaaagtttttcttcaaaccctttgaaagggaagttaaaactaaaaggaagtcttttagttttacagtgcatgcaagtgagtttactgcgttatcttttatctggcttgtgtccattgctttttgatgagctttcccagcaattgcctcactctcatcttaatctggaattctcacccttaaatgaatttagatgcttgactcattgcataaatcttctctcttctaaggagctccagccacctaccaccacagttgccaggtctggaacacccgcagtagaaaacaagcagcagattggggatgctattcggatgatagtcagagggactcttggcagctgtagcagcagcagtgaatgccttgaagacagtaccatgggaagtgttgcagacacagtggcaagggttcttcggggatgtctggaaaacatgccggaagctgattgcattcccaaagagcagctgagcacatcatttcagtgggtcaccaaatgggttgattactctaacaaatatggctttgggtaccagctctcagaccacaccgtcggtgtccttttcaacaatggtgctcacatgagcctccttccagacaaaaagtaagtgtatcaattaatgaaatcctgtcagttctctagtcttgcactaaagaaatctaaaaacaatgattaactgcttctannnnnnnnncctcttctctccctttcgttcctgtttttatagaacagttcactattacgcagagcttggccaatgctcagttttcccagcaacagatgctcctgagcaatttattagtcaagtgacggtgctgaaatacttttctcattacatggaggagaacctcatggatgtaagtactgtggctttagagtggtgacatttgnnnnnnnnnnnnnnnnnnnnnnnnnnnnnnnnnnnnnnnnnnnnnnnnnnnnnnnnnnnnnnnnnnnnnnnnnnnnnnnnnnnnnnnnnnnnnnnnnnnnnnnnnnnnnnnnnnnnnnnnnnnnnnnnnnnnnnnnnnnnnnnnnnnnnnnnggattttcttagaataataatagagtgcatgctacaaaatctttgtaggcactaactcactctcctaatctcttccagggtggagatctgcctagtgttactgatattcgaagacctcggctctacctccttcagtggctaaaatctgataaggccctaatgatgctctttaatgatggcacctttcaggtaaatgaactcttcaggaaagtgcacgtttaggtcctaaacagaaagatttgtacctagacagtttagtgattgactgaacttttctaattctcgaatattttgagagatctaatgtctatgtttattttttaaggtgaatttctaccatgatcatacaaaaatcatcatctgtagccaaaatgaagaataccttctcacctacatcaatgaggataggatatctacaactttcaggctgacaactctgctgatgtctggctgttcatcagaattaaaaaatcgaatggaatatgccctgaacatgctcttacaaagatgtaactgaaagactttttcgaatggaccctatgggactcctcttttccactgtgagatctacaggggaagccaaaagaatgatctagagtatgttgaaaaaagatggacatgtggtggtacgaaaacaattcccctgtggcctgctggactgggtggacccaaacaggctaaggcatacagttcttgacttggacatccaagagtgaacccgattgcagtttccttgaaatactgttttaaaagttttt

SEQ ID NO: 185722 - DNA, 1970 bp, Homo Sapiens
ttggcgccgggctgccgggcgggcgggaggtctgtccgggcgaccccaagccgggcaagcccgcggggtccctcgcccgccgcttccgggtttttcgggggtccgatcccagcgcgagggtggctttgcaaaatgttacgagatgacagatttgacaaataacaaagtctacgccgcaaaaattattcctcacagcagagtagctaaacctcatcaaagggaaaagattgacaaagaaatagagcttcacagaattcttcatcataagcatgtagtgcagttttaccactacttcgaggacaaagaaaacatttacattctcttggaatactgcagtagaaggtcaatggctcatattttgaaagcaagaaaggtgttgacagagccagaagttcgatactacctcaggcagattgtgtctggactgaaataccttcatgaacaagaaatcttgcacagagatctcaaactagggaacttttttattaatgaagccatggaactaaaagttggggacttcggtctggcagccaggctagaacccttggaacacagaaggagaacgatatgtggtaccccaaattatctctctcctgaagtcctcaacaaacaaggacatggctgtgaatcagacatttgggccctgggctgtgtaatgtatacaatgttactagggaggcccccatttgaaactacaaatctcaaagaaacttataggtgcataagggaagcaaggtatacaatgccgtcctcattgctggctcctgccaagcacttaattgctagtatgttgtccaaaaacccagaggatcgtcccagtttggatgacatcattcgacatgacttttttttgcagggcttcactccggacagactgtcttctagctgttgtcatacagttccagatttccacttatcaagcccagctaagaatttctttaagaaagcagctgctgctctttttggtggcaaaaaagacaaagcaagatatattgacacacataatagagtgtctaaagaagatgaagacatctacaagcttaggcatgatttgaaaaagacttcaataactcagcaacccagcaaacacaggacagatgaggagctccagccacctaccaccacagttgccaggtctggaacacccgcagtagaaaacaagcagcagattggggatgctattcggatgatagtcagagggactcttggcagctgtagcagcagcagtgaatgccttgaagacagtaccatgggaagtgttgcagacacagtggcaagggttcttcggggatgtctggaaaacatgccggaagctgattgcattcccaaagagcagctgagcacatcatttcagtgggtcaccaaatgggttgattactctaacaaatatggctttgggtaccagctctcagaccacaccgtcggtgtccttttcaacaatggtgctcacatgagcctccttccagacaaaaaaacagttcactattacgcagagcttggccaatgctcagttttcccagcaacagatgctcctgagcaatttattagtcaagtgacggtgctgaaatacttttctcattacatggaggagaacctcatggatggtggagatctgcctagtgttactgatattcgaagacctcggctctacctccttcagtggctaaaatctgataaggccctaatgatgctctttaatgatggcacctttcacgtgaatttctaccatgatcatacaaaaatcatcatctgtagccaaaatgaagaataccttctcacctacatcaatgaggataggatatctacaactttcagctgacaactctgctgatgtctggctgttcatcagaattaaaaaatcgaatggaatatgcccctgaaccatgctcttacaaagatgtaactgaaggacttttcgaatggaccctatgggactcctcttttccactggtgagatctacagggaaccc

SEQ ID NO: 185723 - DNA, 944 bp, Homo Sapiens
ttggggtgctagtcggcaccagaggcaagggtgcgaggaccacggccggctcggacgtgtgaccgcgcctagggggtggcagcgggcagtgcggggcggcaaggcgaccatggagcttttgcggactatcacctaccagccagccgccagcaccaaaatgtgcgagcaggcgctgggcaagggttgcggagcggactcgaagaagaagcggccgccgcagccccccgaggaatcgcagccacctcagtcccaggcgcaagtgcccccggcggcccctcaccaccatcaccaccattcgcactcggggccggagatctcgcggattatcgtcgaccccacgactgggaagcgctactgccggggcaaagtgctgggaaagggtggctttgcaaaatgttacgagatgacagatttgacaaataacaaagtctacgccgcaaaaattattcctcacagcagagtagctaaacctcatcaaagggaaaagattgacaaagaaatagagcttcacagaattcttcatcataagcatgtagtgcagttttaccactacttcgaggacaaagaaaacatttacattctcttggaatactgcagtagaaggtcaatggctcatattttgaaagcaagaaaggtgttgacagagccagaagttcgatactacctcaggcagattgtgtctggactgaaataccttcatgaacaagaaatcttgcacagagatctcaaactagggaacttttttattaatgaagccatggaactaaaagttggggacttcggtctggcagccagcctagaacccttggaacacagaaggagaacgatatgtggtaccccaaattatctctctcctgaagtctccacaaacaaagacatggctgtgaatcagacatttgggccctgggctggtgtatgtatacaatgttactagggaggccccc

SEQ ID NO: 185724 - DNA, 922 bp, Homo Sapiens
ttgggcagggtgagcaggctagaaactcacgacaccaggtagctctgcaggtgctgggagggcaactcagcccagaggaagagcaggctggggagccctcaccgcccaatggggactgacccctggcccctgcccctctccaccccactgccctgaagccagatttcctgctcagcatggacaggacagcaagaggctaaccctctgcccaggtggaagctgaccccaagccacccttcacctggacaggatgagagtgtcaggtgtgcttcgcctcctggccctcatctttgccatagtcacgacatggatgtttattcgaagctacatgagcttcagcatgaaaaccatccgtctgccacgctggctggcagcctcgcccaccaaggagatccaggttaaaaagtacaagtgtggcctcatcaagccctgcccagccaactactttgcgtttaaaatctgcagtggggccgccaacgtcgtgggccctactatgtgctttgaagaccgcatgatcatgagtcctgtgaaaaacaatgtgggcagaggcctaaacatcgccctggtgaatggaaccacgggagctgtgctgggacagaagtcatttgacatgtactctggagatgttatgcacctagtgaaattccttaaagaaattccggggggtgcactggtgctggtggcctcctacgacgatccagggaccaaaatgaacgatgaaagcaggaaactcttctctgacttgggagttcctacgcaaaacaactgggcttccgggacagctgggtcttcataggagccaaagacctcagggtaaaagcccctttgagcagttcttaaagaacagcccagacacaaacaaatacaagggatggccagagctgctggagatggagggctgcatgcccccgaagccatttta

SEQ ID NO: 185725 - DNA, 1850 bp, Homo Sapiens
ttggcaaaaacttttaaagaattaaaccaaggcttagccttaagcagctcagtggaaggatgagctgctgcggaccacagccagccactgcatctgctgcacagttgaacgatgggcagtggctcacccccactcctttatttcagcaaaagctaattaaattgtaatgtttctatgtcaactactgggaagtatgttacagtcttagccaggatgcatgagagatgttatttgggagacttgagatgctttggctgatatttacatgttttcgataagaaagggatcgctgattgagttattgagatagtttttccagagctggaggtcacgtttctaaaactcacctacgaaagatagcattaaaggaacaggggctctctgaggatggccactgatgtgtgtttgtggatacctgggcatcgacccagcctgcaggtgagctctgggccatgttgccttgacacagtcacagtgtagaggctgcaggtgcacacgtgggctccagtgggactgcgctctgggagactgctccctggcatcggtcctgcggaggtggaaagttcgagaggaggagctatttgcgaggaagccctgtggcaatagagataggcttaaaagcggagagaacacagagtggaatcagccccctgtaagtaaaagggtagagaaagagatgtgtggctgggccctctcccacctgcctgttcagtggaggccagggcagcagcccagaacagcacatgtgggggaggtggccccttgtgccagcagtggctcctctctgcctttgagccctgcacagctggacccatcctaagtgccagtgagtccctcacacatttgactttagaacgtgtgcttcatgacccgttgtacagacggaggagcgagcaacacacgtctaacagcctagacaatctcgtcagatgctcatactggaccatcagcctccccattttagctgactttcccagggtcgttggcaaattttttgttctgtcttttccttgactaattgtagaactttgtgtgaggactttggttatccaaaatcacagaaatgaaccgttttgcagctgcgcagtctaaagggcaggccagtgtctggaagcagggcccacgtggcggtccgctggcaggctggtcctggggagcattctgcggacccggtcacgggcttggttagtcatgcgtacatgtgtgccttggggtgctctgcactccacggcccttctcagccacacttcccaccccagggggtgcccccaggctgatctcatttctgatgttgagggctgtttggctctgtctgtatagcttgtaacaggagccttgggctaggggctggggaaggaaagccgagctggcattcgttctctggactttttatgcctgccatacctgctaatgctcctcgaggtgcaggagcaggttgctgagccagtggctgccccgtgccctccttcccagcactatcatgtgtcacgtttcccggactctgcccctacatctcagctgaatctccagggaggctgcagagcatcgtggagaccactttctgcctcggcctttaaatgctgactcacctcctctcggaggaggcgtcctgtcttcacgggggggtcccggtggcctccagacgtagccatttcctgacatcaagatgttgaatgtaatctggtctgagctgggcctgtgggaggggccgcctgaggcctgtgcgctgttgtcctcccagatgtacttatttttgttcatgatacgggcgtcccgttcctctaagatgtatatattttccttactgtaataaagatgttcctaaattcgaacagaagggggcgcggcaa

SEQ ID NO: 185726 - DNA, 2538 bp, Homo Sapiens
ttggaaaaaggcctatcatgaccccatgctgaaactctccataatgacagaacaagagttgaatcaaatttttggaacactggactctctaattcctctacatgaagagctccttagtcagcttcgagatgttaggaagcctgatggctcgactgaacatgttggtcccatcctcgtgggctggctcccttgcctcagctcctatgatagctactgcagcaatcaagtagccgccaaagctctgctggaccacaaaaagcaagatcaccgagtccaggatttcctacagcgatgtttagaatccccctttagccgcaaactagatctctggaatttcctcgatattccaagaagccgcctggtaaaataccctctgcttctccgagaaatcttgaggcacacaccaaatgataatccagatcagcagcacttggaagaagctataaatatcattcagggaattgtggcagaaatcaacaccaagactggtgaatctgaatgccgctattataaagagcggcttctttacttggaagaaggccagaaagactccctgatcgacagctctcgagtcgtgtgttgtcatggtgaactgaagaacaatcggggcgtgaaactgcatgttttcctgttccaagaagtgcttgtgatcactcgagccgtcacccacaatgagcagctttgctaccagctgtaccgtcagccaatccccgtgaaagacctcctgctggaagacctccaggatggagaagtgaggctgggtggctccctgcgaggggcattcagcaacaatgagagaattaaaaacttcttcagagtcagtttcaaaaatggatcccaaagtcagacccactcgctacaagccaatgacactttcaacaaacagcagtggcttaactgtattcgtcaagccaaagaaacagttttgtgtgctgccgggcaagctggggtgcttgactccgagggatcgttcctaaatcccaccaccgggagcagagagctacagggagaaacaaaacttgagcagatggaccaatcggacagtgagtcagactgtagtatggacacgagtgaggtcagcctcgactgtgagcgcatggaacagacagactcttcctgtgggaacagcaggcatggtgaaagtaacgtctgacagaagcatgtgcacttcgggaagcaggcctgcatcttacctgtacagtatttgcattccacagatggaacggtttggagaagcactttttcatacttttgtgaaagtatacatgttggcccagtctctcgtatctgtacctttgtccctagtactgtaactgccaatctgtctgtgtaagctggaatctgtggcaactattaccctgtgttgtatttcccaagtgtctggatggatggagaggtactcaaacaagttactttcagttgtcctgctggattttaaaaaaatagaaaaagaatctcaaaactactgttttacatagattgtttgaagagtccttcctcttgtgcttctgtaccactttcccagctcttagatgtggtagctaaaggcacggaatttagacggccttgtaaatagggcatgaggaactcatctgtgtattgggatggtattagagagagaatcaggaaagaccaactcatgaagtgaacttggtttgatcttactcaactagaaagcttgaaaacatccctggggattctgaaggcttaattttgcaaaggaggatgcattgtctgaactttgcaacttcatccagtgcaagtttgatgcaagaatgtattaggacataaaatagaggctgaccttaaaagggccaggacagaagcggctgccagctctgaatctttaactgaaatgcacatggcaccaggaggtgtctctcatagttggttgctagcctaaaacatcagaatagaacccaaagggcttaggaaggcctgccaggataacaagaaggccctgtattcattgtgtttcatctgcctaggcctactcattattttagagaatgaatgaagcaacaaggaagagagaccatgactctatcgatgacactgtttatagaaacacaggagaggaagaatttggaatgaaaagcacttcgtcagaaccttctgtgggagccattgagagaaaagcatggtccagtgccttctgagaaaggccagagctttgggctttcctgctctgcttttgggtcgtcaatttgccatctctggttctgtgctataatcagaattgtaattatgttctccagaggccaatttcattaactctgattaattagaatcagctagccagattagtaacctctttgtccagccttgatttacagtgcagggtaaagtgcagaccttaaaaacagctaagtacctagaagagctccctgcaagtgtaaatattaagatgacctgtgcaaattatacccacaccagcactagtggtaattattctaaattattgccaaaaagttttttttaatctgtctttcagtttacagaaaagaaagcagtaaatgcattgatgtcattttatta

SEQ ID NO: 185727 - DNA, 835 bp, Homo Sapiens
caactttgtacaaaaaagttggcttgtaaatagggcatgaggaactcatctgtgtattgggatggtattagagagagaatcaggaaagaccaactcatgaagtgaacttggtttgatcttactcaactagaaagcttgaaaacatccctggggattctgaaggcttaattttgcaaaggaggatgcattgtctgaactttgcaacttcatccagtgcaagtttgatgcaagaatgtattaggacataaaatagaggctgaccttaaaagggccaggacagaagcggctgccagctctgaatctttaactgaaatgcacatggcaccaggaggtgtctctcatagttggttgctagcctaaaacatcagaatagaacccaaagggcttaggaaggcctgccaggataacaagaaggccctgtattcattgtgtttcatctgcctaggcctactcattattttagagaatgaatgaagcaacaaggaagagagaccatgactctatcgatgacactgtttatagaaacacaggagaggaagaatttggaatgaaaagcacttcgtcagaaccttctgtgggagccattgaagagaaaagcatggtccagtgccttctgaaaaaaggccagagctttgggctttcctgctctgcttttgggtcgtcaatttgccatctctggttctgtgctataatcagaattgtaattatgttctccagaggccaatttcattaactctgattaattagaatcagctagcccagattaataacctctttgtccagccttgatttacagtgcagggtaaagtgcataccttataaacagctaaatacc

SEQ ID NO: 185728 - DNA, 1856 bp, Homo Sapiens
ttggcagcctcagggactgcagcgacccccaaacacccctcccccaggatgtcggaggagatcatcacgccggtgtactgcactggggtgtcagcccaagtgcagaagcagcgggccagggagctgggcctgggccgccatgagaatgccatcaagtacctgggccaggattatgagcagctgcgggtgcgatgcctgcagagtgggaccctcttccgtgatgaggccttccccccggtaccccagagcctgggttacaaggacctgggtcccaattcctccaagacctatggcatcaagtggaagcgtcccacggaactgctgtcaaacccccagttcattgtggatggagctacccgcacagacatctgccagggagcactgggggactgctggctcttggcggccatcgcctccctcactctcaacgacaccctcctgcaccgagtggttccgcacggccagagcttccagaatggctatgccggcatcttccatttccagctgtggcaatttggggagtgggtggacgtggtcgtggatgacctgctgcccatcaaggacgggaagctagtgttcgtgcactctgccgaaggcaacgagttctggagcgccctgcttgagaaggcctatgccaaggtaaatggcagctacgaggccctgtcagggggcagcacctcagagggctttgaggacttcacaggcggggttaccgagtggtacgagttgcgcaaggctcccagtgacctctaccagatcatcctcaaggcgctggagcggggctccctgctgggctgctccatagacatctccagcgttctagacatggaggccatcactttcaagaagttggtgaagggccatgcctactctgtgaccggggccaagcaggtgaactaccgaggccaggtggtgagcctgatccggatgcggaacccctggggcgaggtggagtggacgggagcctggagcgacagctcctcagagtggaacaacgtggacccatatgaacgggaccagctccgggtcaagatggaggacggggagttctggatgtcattccgagacttcatgcgggagttcacccgcctggagatctgcaacctcacacccgacgccctcaagagccggaccatccgcaaatggaacaccacactctacgaaggcacctggcggcgggggagcaccgcggggggctgccgaaactacccagccaccttctgggtgaaccctcagttcaagatccggctggatgagacggatgacccggacgactacggggaccgcgagtcaggctgcagcttcgtgctcgcccttatgcagaagcaccgtcgccgcgagcgccccttcggccgcgacatggagactattggcttcgcggtctacgaggtccctccggagctggtgggccagccggccgtacacttgaagcgtgacttcttcctggccaatgcgtctcgggcgcgctcagagcagttcatcaacctgcgagaggtcagcacccgcttccgcctgccacccggggagtatgtggtggtgccctccaccttcgagcccaacaaggagggcgacttcgtgctgcgcttcttctcagagaagagtgctgggactgtggagctggatgaccagatccaggccaatctccccgatgagcaagtgctctcagaagaggagattgacgagaacttcaaggccctcttcacgcagctggcaggggaggacatggagatcagcgtgaagagttgcggacaatcctcataggatcatcagcaaacacaaagacctgcggaccaagggcttcagcctagagtcgtgccgcagcatggtgaacctcatggatcgtgatggcatgggaa

SEQ ID NO: 185729 - DNA, 1614 bp, Homo Sapiens
ttttctaagtgaactttgaatggggactcagttaggggtttaacagctactggattgggcaggaatccaaactccatggaatcggcaatctgatgattttctagttcatgagagccattcagctgttctccactattagcaagagtccagttggggccccaaccaacacgaaatgagcgtcccatgaatagggccatgtccatcaagagttttcccttgccataggtgacagacttttcacgagggactaggcctagttgcctacgtgtacccactgttttcaacggaacctcaggggctgggctgggcattgtgaacacagaagtcaggggtggagggacagaccaagaggatgtggatgggatattcattaaagatgctgctctgggagtacgacattcttgcacagagacacttggtgaaagaaaagctccacttgtaaattttgattgtagtaacccaccaactagtgaacgagttttcgacgagtgggatgctgaaatggggagtctgggagaacagatttcttgagaagtatctgctttggaaggcaggcgactgaagcgttgatccagtgccatatctacatcttcttcatcagtaagcaatgatgctttcatgatctgtaagacatgtggattaattcccagtgaagatgcaatatgtgttgaggcagacacaggttcctgatcctcaggcatgctctcttctaacatggtatccaaaactggctcctgggtgatatctaccatgtcactgtccagttccacaaccctccctaactgctccacctctgggctctggctctgaggtggaggtgcaggtttgccattaagagccatctgcaagggcgtagtctggcttgcaggaggcaaaggagcagtcttcaacttctttgtactagttttagacggatgctcctcctcctcttcatcagaatcttgaaggccatacttagaaaaatgggagaccttaaacacccaagaaccagtttcaggccggtattctttgaattgagctccctgtttccttgaaactgcttccaatcttccttcatagttgatatcagcaaggcgatctgggctctttattaaacaacgagatgttttatctgttggccaaactccatccaatgtaacttcagccttcctatttagcccttcacccacaggtggtttttggttatcatctaagtagacaactacttctttcctccggatatgcacaatatcatccaaatttagatttgtcaaattcacatctccttcaaaatagattgaaccataacctttccgaccaatagtgaaatcagagacaatgcactctcctttttcattggtaattttagcaaggtcatccatagatggaatagtatagtaaccaaccttagtgagaataatacctgctgggtgcatatggtaagaattattttctatttcttctcggtcatcctgaagtgactcatcatgaaaagacgtttcttcactgcttccttccagcccatttcgcaaagcagcacgcatgtttaatgcaacaatggtatcatccacactgttgctgttgctgtgtttatttccagcactttctggggtttgaggaataggtttggcccaa

SEQ ID NO: 185730 - DNA, 980 bp, Homo Sapiens
  misc_feature (101)..(136): n is a, c, g, or t
actttgtacaaaaaagttggatcaagcagtagtaagatagtgagcattcatacaaaaatccaagaagatacaggaattctgtgtatgacagtgctattgannnnnnnnnnnnnnnnnnnnnnnnnnnnnnnnnnnnaaggttcataggagaaaaattttagctttctactttatatcatatacaaaaataaaatccaactaaagaccagaatataaaaagcaaaattttaaaactatgatgaaagtagaatccgttactttagggtaacaagatttctttaaaaaacatgtaaacatggaatagtctgttgaattttggtgtattggcctcacaggcacccacaaatgtacacaaagagatatatatcactgtgttcctgaatcatggtttgtattgcccaaaattggatataacaaatttttatcaattgtggaatagatgaataagtgtgatcatttctgtgataaaatacagaatttagaaacaaaatctacctatagttatatggatagattacaatatataatattgagagaaaaaattaaaatgcacaaaggaacacagtataacatttgtataatttaataagatcttgcaaagaacagtactgtgtattggtcatggatccatatatgacttggttgccttttgggatgtgggaaaggtttggtgggagttgttatatttatctgtaatatttctttaataaaagagtgaaagcaaatatgacagtggtgacaaatctggttgtccaaattaattatatgggtttttaaaattgttttttcttgcttttattttcctaaattctcaaaaataagaatcaaatgggtgggagaaacctgggcctggagaaataattttaaaatggatttttattcttgatcagatactaacattttatagaagattgtctttacacaaacatacctgacagtattaattttgtttactgtctcttcatgttaattgggaataa

SEQ ID NO: 185731 - DNA, 1517 bp, Homo Sapiens
  misc_feature (447)..(477): n is a, c, g, or t
  misc_feature (597)..(609): n is a, c, g, or t
ttggagaacctgctaagcacaacaaaaccttttcctgtgccgtctgttggtacaaactgtggaattgaaccatgggattcaggagtgacatcaggattggggagtgtccgagtgcccgaggagttgaagcttcctcatgcttgctgtgtcgggatcgcttcccagaccctcctcagtgtgcttaatccaactgaccgctggctgcaagtcagcattggggtcctcagcattagtgttaatggtgaaaaggtagctttctatgtctttctcatttaacctaacagttgcattgtgattaggtgcttgatttcccccatctctagtgctaggttctcccttcacgcctttattaatgcacacagtcattgccatggtatctttctctcagaccccttttgttgtagtgcttgtagagtgtaaagtgaaacagttttgcattttccatcnnnnnnnnnnnnnnnnnnnnnnnnnnnnnnnggtaaattcctataaatttgcttttagtgctattatttaaatcatcaaaagttctgagtttcttgtttctacttgtcagttttgttaaaggtgattgaatataagtaaccatgacttgtnnnnnnnnnnnnngaaagcagttactcttggagcttatgccttcatttggcaagggaagtctttttaactagtttatctgatgattttcttacatgagcttttgaaatacctggaaatgcagttttaatatgaacttttaagacagatgtctcttacatgatcaattacagttgctataattctagactctaaatcttctctcctggttacagtgaccatttgaacattggtgagtggagaggggggatatatggtcagcagctgttttgaaatgtcccagttttacgactgttacttgtgaatcagtattggtggatgcttccctcgtgcctcttagtggccatcgtctgcctggtaaaataagatcgcctccccctacgccgtcttggcttttcccctctacttccagtccttaggttagatgaaaagtaggtgattgaaggagaggattgagggtggaaggtgggctgtgaagactttttgggggcatcctggagtctgtgaatgaagcagtgttgtctatggaagtggggagtagaaaagaagatccccattgacagtgaggagggagggtggctggagttgtcactgcagtcgaggcggagtcagggctgtgggacctcagcggttagcctgactcttcttccccccagcccccacccactgctgtgttgtgtgtgctagagagacttacagggctgtgaaagagtgacctttgtcagtgtcctttttaagacaagtgagtgtaagggtcaatgtgcttgcttggaggtggactggggagacagccttggtgcagcaagaacattcaactcaggaagcatttgactcgttgtacttcagagaccataaatgacaagtgttgacatttttgaagagataataatgttttaatttggcagtttgagtgattgggaaaa

SEQ ID NO: 185732 - DNA, 1197 bp, Homo Sapiens
  misc_feature (421)..(476): n is a, c, g, or t
  misc_feature (844)..(864): n is a, c, g, or t
  misc_feature (1038)..(1057): n is a, c, g, or t
  misc_feature (1126)..(1148): n is a, c, g, or t
ttggattttgaaggtggcgtctcatctgtctacctctgggatctggatcatggctttgctggagtgatcctcataaagaaggctggagatggatcaaagaagatcaaaggctgctgggattccatccacgtggtagaagtgcaggagaaatccagcggtcgcaccgcccattacaagttgacctccacggtgatgctgtggctgcagaccaacaaatctggctctggcaccatgaacctcggaggcagccttaccagacagatggagaaggatgaaactgtgagtgactgctccccacacatagccaacatcgggcgcctggtagaggacatggaaaataaaatcagaagtacgctgaacgagatctactttggaaaaacaaaggatatcgtcaatgggctgagtctgtgcagacttttgnnnnnnnnnnnnnnnnnnnnnnnnnnnnnnnnnnnnnnnnnnnnnnnnnnnnnnnnaagcagcaatgctaaacctctgtttcatgctaaccagacacgccgtgcactcgttagattcctttcttagaaaactcgttttctgctcccttccctcgtcccttccctccccgacaggtcacataacagctgcatcattgaccgcacagcgccatctctccctgagaataaagccgatagccaccctcctctggctccgagcctgcttctgccacacctcgctctcagttctctccacatttccatagagaccgtgtggtttttgttcacccgggccccccgtcttcctccctgtccccccatttataggcataaaatccactgtctgccagcctcccttccctcccacctttttggtacattggtgnnnnnnnnnnnnnnnnnnnnntttttatgaactaactgtggtgtgtgaaagagagaagaaaaactggaaatcttattccgtgtgtgtttgggagttgcttggggttgggggtcgtggggacaggggacagctctgggagcagaggtggccctcggtgccgtcctgcgcagactctcccgtcccacggaggccgcnnnnnnnnnnnnnnnnnnnntgccgccgaccgttccgctcttccggccaggtgcttttctgtcaatttctatggaatgcaaaaggaggnnnnnnnnnnnnnnnnnnnnnnngtaaagcttaagaaaaaattttatttcttatacttgagcctccatactt

SEQ ID NO: 185733 - DNA, 673 bp, Homo Sapiens
  misc_feature (241)..(296): n is a, c, g, or t
ttggcacggtgatgctgtggctgcagaccaacaaatctggctctggcaccatgaacctcggaggcagccttaccagacagatggagaaggatgaaactgtgagtgactgctccccacacatagccaacatcgggcgcctggtagaggacatggaaaataaaatcagaagtacgctgaacgagatctactttggaaaaacaaaggatatcgtcaatgggctgaggtctgtgcagacttttgnnnnnnnnnnnnnnnnnnnnnnnnnnnnnnnnnnnnnnnnnnnnnnnnnnnnnnnnaagcagcaatgctaaacctctgtttcatgctaaccagacacgccgtgcactcgttagattcctttcttagaaaactcgttttctgctcccttccctcgtcccttccctccccgacaggtcacataacagctgcatcattgaccgcacagcgccatctctccctgagaataaagccgatagccaccctcctccggctccgagcctgcttctgccacacctcgctctcagttctctccacatttccatagagaccgtgtggtttttgttcacccgggccccccgtcttcctccctgtccccccatttataggcataaaatccactgtctgccagcctcccttccctcccacctttttggtacattggtgtaaaatatgt

SEQ ID NO: 185734 - DNA, 1386 bp, Homo Sapiens
ttggagcaggtgaatttccccagcctgattttccagatgactacaatttgggagacattttcctaggagtggagtatatcttccatcagtgtaaagaaaatgaagattacaatgacgtcctgactgtaagcggggatgctgaaatcatataacctggctcatggaacatgggccttgcaaaggggtcaagatcacaaccctgcatccatgtgtgtccgtgggtaccgtaagggctactgggggaagaacctgtaagcagggtgtgaggagcacccaggctgggtagggactgcatgccccatgccacagttgaaggagggagagaacacgctgtgaaaacacagaagctcccagagaagccttctcagcttttatctctggagtagagcagactatgttgagctaacacagacctgctgaatcagcttctttctgagctgccagaagtacagaagttggagcctccaccaccttccagatctgtttctcctcagtgtaatccacctatgggttcttcctgcccactgcacagacaaaaccaattcactgcaattgtggtattgcagtagagaaagagtttaacacagagctagccaagcagaaaggctggagttattattcaactcaatctcccagagaactcagaggctacagtttctacaggcaatttggcaggcaggggctagggaatgcctgctgctgatcggctgcagacggaccatggggtgtcaacgatttttgtcccctgagtccgcctctgcgtggagccacgggatcagctgaatcatgagtctcacggccaggtggagtctgtaggttgccagaactcaaaagtctgaaaaacatcccaaaagaccattcttaggttgtactattgacgttatcttattggggagcaattggggcggtcacaaatctcgtgacctctggatgatggagtcctaagaagaactgaattatgctgggctcatgtggttaaccaaggcctgcgacctggttctcctcatgatgctacatatgagcagacaagctgcccccgcactatctaaatcttgtgaaccttcacattcttcacagatgcgccttcggtcttgacgggctctatgaattcctgtaatggatgtatgatcactatcctagatttaaagttacactccccatctctctcctcctccgcttggcctctgctgtactctcatgtgacaaacgtacagctcgtggtgtgagtgccagaatctgtctccgtggtttgatcaccgagtgcatcgcaccatgctgtaaatgtggcagacgcagcctgcgggcaggctttttatttaatgtaaatagtttttgtttcgatgaggcagtttctggtactcctatgcaatattactcatctttttt

SEQ ID NO: 185735 - DNA, 1400 bp, Homo Sapiens
ttggtttcagaatcttgtgaagcaacaagaatgggtgaatcagcaaagggaagatattgaaaggcaaaggaaacttctagccaaacgcaaacctcccacagctaataattctcaggcaccctctaccaattctgaaccaaaacaaaggaaaaacaaagcagtcaatggagcagagaatgatccctttgttagaccaaatttaccacaactgttgactttggcagaatatcatgaacaggaagaaattttcaaacttagactaggacatctcaaaaaggaagaggcagaaatccaggcagaacttgaacgtttggaaagagtcagaaatcttcacatacgtgagctgaaaagaataaacaatgaagataattcacagttcaaagatcacccaacattaaatgaaagatatttattacttcatctgcttggtagaggtggctttagtgaagtgtataaggcttttgacctttatgaacaaagatatgctgctgtgaagatacatcagcttaataaaagctggagagatgagaagaaagaaaactaccacaaacatgcctgcagagagtatagaatacacaaagaactggatcaccccagaatagttaaactctatgattatttctccttggatacagatacgttttgtacagtgttagaatactgtgaaggcaatgacttggatttctatctgaagcaacacaagttaatgtcagagaaagaagctcggtctattgtaatgcagattgtaaatgcactaagatatctcaatgagatcaaaccccctattatacattatgatcttaagccaggaaacatcctactggtagatggaacagcatgtggtgaaatcaaaatcactgattttggtctgtccaagattatggatgatgatagctatggtgtagatggaatggatctaacttcccagggggcaggcacttactggtatttacctcctgagtgttttgtagttggaaaagagccaccaaagatttccaacaaggttgatgtatggtcggttggagtcatcttctttcagtgtctttatggtagaaagccatttggtcacaatcaatctcaacaagacattcttcaagaaaatacaatattaaaagccacagaagtccagttccctgtaaaaccggttgtaagcagtgaagccaaggcatttataagacgctgtttggcatatcgaaaagaagatcgatttgatgtgcaccagctggcaaatgacccataccttctcccacacatgagaagatcaaattcttcagaaacctacacatggctgggctgacagcatcccctacacccccttcttcaagcataattacttactgactttcctccaagattggcatgatatctttgaatttgcttccagatgcacacttaagttt

SEQ ID NO: 185736 - DNA, 1712 bp, Homo Sapiens
  misc_feature (1496)..(1505): n is a, c, g, or t
ttgggctgatgagccccctatgttcttggccccaagttacatccacgaagtccaagaaaatgcagctgctggcaccgtggttgggagagtgcatgccaaagaccctgatgctgccaacagcccgataaggtattccatcgatcgtcacactgacctcgacagatttttcactattaatccagaggatggttttattaaaactacaaaacctctggatagagaggaaacagcctggctcaacatcactgtctttgcagcagaaatccacaatcggcatcaggaagccaaagtcccagtggccattagggtccttgatgtcaacgataatgctcccaagtttgctgccccttatgaaggtttcatctgtgagagtgatcagaccaagccactttccaaccagccaattgttacaattagtgcagatgacaaggatgacacggccaatggaccaagatttatcttcagcctaccccctgaaatcattcacaatccaaatttcacagtcagagacaaccgagataacacagcaggcgtgtacgcccggcgtggagggttcagtcggcagaagcaggacttgtaccttctgcccatagtgatcagcgatggcggcatcccgcccatgagtagcaccaacaccctcaccatcaaagtctgcgggtgcgacgtgaacggggcactgctctcctgcaacgcagaggcctacattctgaacgccggcctgagcacaggcgccctgatcgccatcctcgcctgcatcgtcattctcctggtcattgtagtattgtttgtgaccctgagaagcaaaagaaagaaccactcattgtctttgaggaagaagatgtccgtgagaacatcattacttatgatgatgaagggggtggggaagaagacacagaagcctttgatattgccaccctccagaatcctgatggtatcaatggatttatcccccgcaaagacatcaaacctgagtatcagtacatgcctagacctgggctccggccagcgcccaacagcgtggatgtcgatgacttcatcaacacgagaatacaggaggcagacaatgaccccacggctcctccttatgactccattcaaatctacggttatgaaggcaggggctcagtggccgggtccctgagctccctagagtcggccaccacagattcagacttggactatgattatctacagaactggggacctcgttttaagaaactagcagatttgtatggttccaaagacacttttgatgacgattcttaacaataacgatacaaatttggccttaagaactgtgtctggcgttctcaagaatctagaagatgtgtaaacaggtatttttttaaatcaaggaaaggctcatttaaaacaggcaaagttttacagagaggatacatttaataaaactgcgaggacatcaaagtggtaaatactgtgaaataccttttctcacaaaaaggcaaatattgaagttgtttatcaacttcgctagnnnnnnnnnncacttggcatacaaaatatttaagtgaaggagaagtctaacgctgaactgacaatgaaagggaaattgtttatgtgttatgaacatccaagtctttcttcttttttaagttgtcaaagaagcttccacaaaattagaaaggacaacagttctgagctgtaatttcgccttaaactctggacactctatatgtagtgcatttttaaac

SEQ ID NO: 185737 - DNA, 1678 bp, Homo Sapiens
caactttgtacaaaaaagttggctccatttttctctggaattatttttggtgattaattttctgggggggactgggacgcggggcccggcggcgcggccccgcatcgcagcggccgggcaggcggagagaacattgaaagtattctctaagctatttgaagagagtgactaaatgcacctgggtcaggctgtctgtgggtatgaagtggttgggagaatccaagaacatggtggtgaatggcaggagaaatggaggcaagttgtctaatgaccatcagcagaatcaatcaaaattacagcacacggggaaggacaccctgaaggctggcaaaaatgcagtcgagaggaggtcgaacagatgtaatggtaactcgggatttgaaggacagagtcgctatgtaccatcctctggaatgtccgccaaggaactctgtgaaaatgatgacctagcaaccagtttggttcttgatccctatttaggttttcaaacacacaaaatgaatactagcgcctttccttcgaggagctcaaggcatttttcaaaatctgacagtttttctcacaacaaccctgtgagatttaggcctattaaaggaaggcaggaagaactaaaggaagtaattgaacgttttaagaaagatgaacacttggagaaagccttcaaatgtttgacttcaggcgaatgggcacggcactattttctcaacaagaataaaatgcaggagaaattattcaaagaacatgtatttatttatttgcgaatgtttgcaactgacagtgggatttgaaatattgccatgtaatagatactcatcagaacaaaatggagccaaaatagttgcaacaaaagagtggaaacgaaatgacaaaatagaattactggtgggttgtattgccgaactttcagaaattgaggagaacatgctacttagacatggagaaaacgacttcagtgtcatgtactccacaaggaaaaactgtgctcaactctggctgggtcctgctgcgtttataaaccatgattgcagacctaattgtaagtttgtgtcaactggtcgagatacagcatgtgtgaaggctctaagagacattgaacctggagaagaaatttcttgttattatggagatgggttctttggagaaaataatgagttctgcgagtgttacacttgcgaaagacggggcactggtgcttttaaatccagagtgggactgcctgcgcctgctcctgttatcaatagcaaatatggactcagagaaacagataaacgtttaaataggcttaaaaagttaggtgacagcagcaaaaattcagacagtcaatctgtcagctctaacactgatgcagataccactcaggaaaaaaacaatgcaacttctaaccgaaaatcttcagttggcgtaaaaaagaatagcaagagcagaacgttaacgaggcaatctatgtcaagaattccagcttcttccaactctacctcatctaagctaactcatataaataattccagggtaccaaagaaactgaagaagcctgcaaagcctttactttcaaagataaaattgagaaatcattgcaagcggctggagcaaaagaatgcttcaagaaaactcgaaatgggaaacttagtactgaaagagcctaaagtagttctgtataaaaatttggcccattaaaaaa

SEQ ID NO: 185738 - DNA, 1604 bp, Homo Sapiens
ttggattgtgtttagtaacttgagtgtatgcacaagtttgatcaacagcaaaatagagttctgaatttcttttaaagtgatgatatattattttgtgaaactttgtgtttgaaaatgtttatttctgtttatggtgtaatcattctgaggtgaggcttttcttatttcctttgcattttgctagagctgtgctgagttcagcatttgcttatttaaccactacataatgacagaccagttattaggtattagcatgtgtggtaataataatagtggaacttcacacttacatcaattcagtgcaggggcatagaataaaatattaaatattggcagatgtatgaaaagaagtgtgagttaaaaatattgaatattggcaggtgtgaaaacaagtgtcaaaattcctcatatagagaaaataattttgagtttagagtattatcttttaattaagtgtagtctaaacttaactttctgtaaaggcactttgtggtttttccaaagatgttctagatctatttggttgctctatagtcaaacagctcttttgaagacaactgtcttattttattacaaattggcttgacatatttatactgtaacattgtaatattgctgtgctgtacattttggcccttacgaaatacgtctttttcagaactgttaaagttttgatgtacatcgagctgaattctgtttttaccagtttcaaaaccttcaagtgatatgtggaaaaaagtgaatgagacctctgatagggggttttcagaaccttgttcacaccaaaatgtgacagttctttcatgttttcctaaaccaagttaaaattacatgtatattttggtgttaaggttgatttttaagatacttctgatttgtacaaaaggaatgtttcctttataaatcacagaagaaaatgacaatatctgttggatatttgatataatttaatggtgttataaaacctttaagaggattcatggtgaatatatgtgataacatctttatactttgaaaaatgttccacttacccttcagatatttgttgtaagttaattcaattcttaatactttaattttgctccaacaagggctttatgttgctggtaagagaatttatttactaaatgcactatgtataaagtgaaagatagtttacttatctgactttgatattagatggctgacattagtgcacataatgcagagtttaaccttgattcttcaacagagtccagatttaaatgtctacttagttaattagttagctgatattcttccacaattaatatattcaatttcccatcagtatatcactttaaattttatgtttttctaaggaaactttccacagaattttaaacaactgatgcatccatactcagggtgtagggagaatactttgcatttaaaaaccctgtccacctgtcaccagcacaagagaattagagcttcagtgagaatttagaaaaattatactaaagtgagatgcattttttctcattttcagcaagactcctctaagcatttactcatttactgtattcctgctctgaagatgtggatacagattagtcactcttgtcactttatttatttattgg

SEQ ID NO: 185739 - DNA, 994 bp, Homo Sapiens
  misc_feature (616)..(624): n is a, c, g, or t
ctttgtacaaaaaagttggctttgaaaaacgttccacttacccttcagatatttgttgtaagttaattcaattcttaatactttaattttgctccaacaagggctttatgttgctggtaagagaatttatttactaaatgcactatgtataaagtgaaagatagtttacttatctgactttgatattagatggctgacattagtgcacataatgcagagtttaaccttgattcttcaacagagtccagatttaaatgtctacttagttaattagttagctgatattcttccacaattaatatattcaatttcccatcagtatatcactttaaattttatgtttttctaaggaaactttccacagaattttaaacaactgatgcatccatactcagggtgtagggagaatactttgcatttaaaaaccctgtccacctgtcaccagcacaagagaattagagcttcagtgagaatttagaaaaattatactaaagtgagatgcattttttctcattttcagcaagactcctctaagcatttactcatttactgtattcctgctctgaagatgtggatacagaattagtcactcttgtcactttatttatttattggnnnnnnnnnaaccatctgtgtacattcctttcatagggtagagttctagttctagaagttcttattttgtttttgttgtaatgtttgaatactatttaatatccggttttaatattgctggatttgctacctttggttacttgtgcagtgttaaaagtaatccactttcttgtttaatataccagatacatagcaaaagcagcttggaataattatagctgtttatttggctgtgctcagttactatattaggatcttgtactgtggtaacagtaactcttttttgcttttcagtaaatttaatatgttcacttaaccaaataacgaacctttgaaatgcacctaaaggttttgttttcagccaggtgggctcaaaaaa

SEQ ID NO: 185740 - DNA, 1529 bp, Homo Sapiens
ttggggaaggagctcttctgcgagctctccccactggagttccgcctctacctgagcaacgaggagcacacctgtgtggagaactgctccctgcttcgctgtgagtctgtggggccagcccacagtgacgggcgctttgagctggtcttctctggcaagaagctggccctgcgcgcctcctcccaggacgaagctgaggactggctggaccgggtgcgggaggccctgcagaaggtccggcctcagcaggaggatgagtgggtgaacgtgcagtactcagaccagcctgaggaaccccccgaggcgccccagggctgcctctctccctcagacctgctctcggagcccgcggccctccagggcacacagtctgactggtcgtccgcccaggttccagagctagatgccatcaaggagtccctgctgtacttgtacatggacaggacctggatgccctatatattttctctgcccttggaggctctgaaatgtttccgcatcaggaacaatgagaagatgctgagtgacagccacggcgtggagaccatccgggacatcctgccagacaccagccttgggggcccatccttcttcaaaatcatcacggccaaggctgtcctgaagctgcaggccggaaacgccgaggaagccgccctgtggagggatctggtccgcaaagtcctggcatcctacttggagacagccgaggaggcggtgaccctgggcgggagcctggatgaaaactgtcaggaggtgctgaaatttgccacccgggagaatggcttcctgctgcagtacctggtggctatccccatggagaaaggccttgactcccaaggctgcttctgcgcaggctgctcccggcagatcggcttctcctttgtacgacccaagctctgtgccttctctggcctctattactgtgacatctgccaccaagacgatgcctcagtgattccggccaggatcatccacaactgggacctcaccaagcgcccgatctgcaggcaggccctgaagtttctgacacagatccgggcccagcccctcatcaacctgcagatggtgaacgcgtctctgtacgagcatgtggagcggatgcacctcattgggaggagacgggagcagctgaagctcctgggggattacctgggcctgtgccggagtggcgccctgaaggagctcagcaagaggctcaaccaccggaattatctcttggaatctccgcataggttccgtgttgctgacctccggcagatcgcagatggggtgtatgaaggattcctcaaggccctgattgaatttgcctcccagcatgtctaccactgcgacctgtgcacccagcgcagcttcatctgccagatctgccagcaccacgacatcatctttcccctctgagtttgacaccacagtcaggtgtgccaagtgcaagaccgtcttccaccagagctgccaggctgtggtgaagaagggctgcccccggctgtgctcgctgacgcaagtaccagcaacagaacgttttcgcctga

SEQ ID NO: 185741 - DNA, 1144 bp, Homo Sapiens
aaagccatcagaaagttctaacaaaaatggtatacttttttcctacaatgtttaatctccatgccgacaatgtctcatttgactttttttccctctgccccttaaaattaggtgatgaagtagaaattcagtcatgaaaataaaaagacatatatcaaatatacagcatcctggtgtcacagaacagacagaactgtcctagacactgtggggaaaagatgggcactggagaggtaaaaattctatttagtgatcactcacacttgaacaatgcattcgtcattgaaggagggtgaagtgcagggggtaggggagggtggcagagttgtaattctctgtaataagggttgggaatatatactcatggatgggaaatcttaagtagctatatttattattactttttccagcaattttgcaagaggcagaagtgtgacattgaattgagtgagacgagcgtgtgggtgggttggcgaggagcccttctcctgacgcaggctgctggcttgtcaaggaatggctggttccaccgctgggccgtgtttactcttttgcttcaaggaaaagggtttcttgagggaacaactttacctccaataatgatttatttgggtccagttgagttacgtctctcctaggaaaggtgctcagtaacttgtactcatcccatggaaatcctttggaagctacaaaatcaaagacaatctggagcttgttgctggccaggaaacgccgctccaagaactcgccactgggggtccggatccgcagtttgctcacaggctcagcattttcttcctttggctcaggaggcagggcttgctctaaggacagccggatggcctcacgttcctcttcttgttctttgcgaatctgctccaaacgaaactgttctgccatctctctctcgtgagcttccctctttgctctgtcagcctcaagtgaaaggcgataggcctcatcttgctctctcttcacattttctctggcttcacgttcatcctcgtcctttatatcttcctgttgttgggctgtgaagatctccattgcagccatgagtctcatcattaactcatctactgttgtgttcccttgtatcacattcaacacttcgttagatgatcgccaacttttttgtacaaag

SEQ ID NO: 185742 - DNA, 1641 bp, Homo Sapiens
  misc_feature (1154)..(1175): n is a, c, g, or t
ttgggttaccctgggacacaaggtccttgtgtgtggagctgggccaatcgggatggtcactttgctcgtggccaaagcaatgggagcagctcaagtagtggtgactgatctgtctgctacccgattgtccaaagccaaggagattggggctgatttagtcctccagatctccaaggagagccctcaggaaatcgccaggaaagtagaaggtcagctggggtgcaagccggaagtcaccatcgagtgcacgggggcagaggcctccatccaggcgggcatctacgccactcgctctggtgggaccctcgtgcttgtggggctgggctctgagatgaccaccgtacccctactgcatgcagccatccgggaggtggatatcaagggcgtgtttcgatactgcaacacgtggccagtggcgatttcgatgcttgcgtccaagtctgtgaatgtaaaacccctcgtcacccataggtttcctctggagaaagctctggaggcctttgaaacatttaaaaagggattggggttgaaaatcatgctcaagtgtgaccccagtgaccagaatccctgatgttaatgggctctgccctcatccccacagtcttgggatctcagggcacaatggctggacatgggtgggctctgatgcagaactttctcttttgaatgttaagaataactaatacaattcattgtgaacagaagtccttaagcagaggaattggtgtgccttaaagatacaatctgggatagtttgggggaacttgtagccagaatgccctgttcatgctgagcaaagttcagcaagtagagcagagtttggcaggcaggtgccaggaactccccttcttcctggagtgccttcattgaggaaggaaatctggcccttgggtttcctggttccactgctactgacccagaggggaatgagggctgagttatgaaaagataacttcatgaagacttaactggcccagaagctgattttcatgaaaatctgccactcagggtctgggatgaaggcttgtcagcacttccagtttagaacgcaatgtttctagagacatattggctgtttgttttgatgataaaaggagaataagaaaaggcatcactttcctggatccaggataatttttaaaccaatcaaatgnnnnnnnnnnnnnnnnnnnnnnggaaatgtcatgtgaggttaaaccagtttgcattcccctaatgtggaaaaagtaagaggactactcagcactgtttgaagattgcctcttctacagcttctgagaattgtgttatttcacttgccaagtgaaggaccccctccccaacatgccccagcccacccctaagcatggtcccttgtcaccaggcaaccaggaaactgctacttgtggacctcaccagagaccaggagggtttggttagctcacaggacttcccccaccccagagattagcatcccatactagactcatactcaactcaactaggctcatactcaattgatggttattagacaattccatttctttctggttattataaacagaaaatctttcctcttctcataccagtaaaggctcttggtatctttctgttggaatgatttctatgaacttgtcttattttaatggtgggttttttttc

SEQ ID NO: 185743 - DNA, 1546 bp, Homo Sapiens
ttgggagagtgggcggagggggtggaggtttgtctccgctgtttcatctctatggctgtcagaggtgggcggctttgaccgagaggctgctggagctcgtgtttggacgcgatgtttcgtctgaactcactttctgctttggcagaactggctgtgggttctcgatggtaccatggaggatcacagcccatccagatccggcgaagactaatgatggtggctttcctgggagcatctgcagtaactgcaagtactggtcttttgtggaagagggcccatgcagaatctccaccatgtgtagacaacctaaaaagtgacatcggtgataaagggaagaataaagatgaaggggatgtttgtaaccatgagaaaaagactgcagatcttgcccctcacccagaagagaaaaagaagaaacgttctggattcagagacagaaaagtgatggaatatgagaataggattcgagcctactccacgccagacaaaatcttccgatattttgccaccttgaaagtcatcagtgagcctggtgaagcagaagtgtttatgacaccagaagattttgtgcgatccataacacccaatgaaaaacaaccagaacacttgggtctggatcaatatataataaaacgctttgatggaaagaaaatttcccaggaacgagaaaaatttgctgatgaaggcagtatattttacacccttggagaatgtgggctcatatccttttcagactacattttcctcacaactgttctttccactcctcagagaaattttgaaattgccttcaagatgtttgatttgaatggagatggagaagtagatatggaagaatttgaacaggttcagagcatcattcgctcccaaaccagtatgggtatgcgccacagagatcgtccaactactggcaacaccctcaagtctggcttgtgttcagccctcacaacctacttttttggagctgatctgaagggaaagctgacaatcaaaaacttcctcgaatttcagcgtaaactgcagcatgatgttctgaagcttgagtttgaacgccatgaccctgtggatgggagaattactgagaggcagtttggtggcatgctacttgcctacagtggggtgcagtccaagaagctgaccgccatgcagaggcagctcaagaagcacttcaaagaaggaaagggtctgacatttcaggaggtggagaacttctttactttcctaaagaacattaatgatgtggacactgcattgagtttttaccatatggctggagcatctcttgataaagtgaccatgcagcaggtggccaggacagtggctaaagtggagctctcagaccacgtgtgtgatgtggtgtttgcactctttgactgtgatggcaatggcgaactgagcaataaggaatttgtttccatcatgaagcaacggctgatgagaggcctggaaaagcccaaagacatgggtttcactcgcctcatgcaggccatgtggaaatgtgcacaggaaactgcctgggacttcgctttacccaaacagtaacccc

SEQ ID NO: 185744 - DNA, 803 bp, Homo Sapiens
tgcaacaaattgatgagcaatgcttttttcttatagaaaaactttgtacaaaaaagttggcaccaaggaccagagcccctcacgggcaccagggcttcgccagcgggccagcaacaaagtgcaagattctgcccccgtggagactcccagagggaagcccccactcaacacccgctcccaggctccgcttctccgatgggtccttacactcagctttctggtggcgacagttgctgtagggctttatgccatgtgaatgcaggcatgctggctcccagggccatgaactttgtccggtggaaggccttctttctagagagggaattctcttggctggcttccttaccgtgggcactgaaggctttcagggcctccagccctctcactgtgtccctctctctggaaaggaggaaggagcctatggcatcttccccaacgaaaagcacatccaggcaatggcctaaacttcagagggggcgaagggatcagccctgcccttcagcatcctcagttcctgcagcagagcctggaagacaccctaatgtggcagctgtctcaaacctccaaaagccctgagtttcaagtatccttgttgacacggccatgaccactttccccgtgggccatggcaatttttacacaaacctgaaaagatgttgtgtcttgtgtttttgtcttatttttgttggagccactctgttcctggctcagcctcaatgcagtatttttgttgtgttctgttgtttttatagcaagggttggggtggttttttgagccatgcgtgggtgggggagggaggtgt

SEQ ID NO: 185745 - DNA, 1461 bp, Homo Sapiens
ttggtttatttctctgagtacatggaaaaagaggatgcagtgaatatcttacaattctggttggcagcagataacttccagtctcagcttgctgccaaaaagggccaatatgatggacaggaggcacagaatgatgccatgattttatatgacaagtacttctccctccaagccacacatcctcttggatttgatgatgttgtacgattagaaattgaatccaatatctgcagggaaggtgggccactccccaactgtttcacaactccattacgtcaggcctggacaaccatggagaaggtctttttgcctggctttttgtccagcaatctttattataaatatttgaatgatctcatccattcggttcgaggagatgaatttctgggcgggaacgtgtcgctgactgctcctggctctgttggccctcctgatgagtctcacccagggagttctgacagctctgcgtctcagtccagtgtgaaaaaagccagtattaaaatactgaaaaattttgatgaagcgataattgtggatgcggcaagtctggatccagaatctttatatcaacggacatatgccgggaagatgacatttggaagagtcagtgacttggggcaattcatccgagaatctgagcctgaacctgatgtaaggaaatcaaaaggatccatgttctcacaagctatgaagaaatgggtgcaaggaaatactgatgaggcccaggaagagctagcttggaagattgctaaaatgatagtcagtgacgttatgcagcaggctcagtatgatcaaccgttagagaaatctacaaagttatgactcaaaacttgagataaaggaaatctgcttgtgaaaaataagagaacttttttcccttggttggattcttcaacacagccaatgaaaacagcactatatttctgatctgtcactgttgtttccaggagagaatgggagacaatcctagacttccaccataatgcagttacctgtaggcataattgatgcacatgatgttcacacagtgagagtcttaaagatacaaaatggtattgtttacattactagaaaattattagttttccaatggcaataacccatttatgagagtgttttagcctactggaatagacagggaccacatcctctgggaagcagataagcatagaactgatacttgatgcacactcgtagtggtaactcatccctaatcagcattgtaaagcaggtgccagaggtggtttgctttgtccttccaaagcaggtgagtcagccccaccgagagccaggcagctttgagtggcagcgtggtgctagcagcttcagcggaacagggtgagagttaattatgcagtcttcttgacagcggcattaatttggaaggaaactgacaagtcatgggtcaagtttcagtgacttcctccttcctctgatggcagtatatagttttcacatttt

SEQ ID NO: 185746 - DNA, 1450 bp, Homo Sapiens
ttggggaatacacttctgctcccctgcaaacatttacagatgaggaaatgatgataaagagttcagttaaaaaatttgctcaggaacaaattgcacctttggtttcaaccatggatgaaaattcgaaaatggagaaatcagtaatacaaggattatttcaacaagggttgatgggtattgaagttgacccagaatatggaggcacaggagcttcatttttatccactgtgctcgtgatagaggaattagccaaagttgatgcatctgtggctgtcttttgtgagatccagaacacattaattaacacactgattagaaaacatggaacagaagaacaaaaggccacctatttgcctcagctcactacagaaaaagtaggaagtttctgcctttcagaggctggagcaggtagtgactcatttgctttgaagaccagagctgataaagagggagattattatgtcctcaatggatcaaagatgtggatcagcagtgctgagcatgcagggctctttctggtgatggcaaatgtagaccctaccattggatataagggaattacctccttcttagtagatcgtgatactccgggccttcatatagggaaacctgaaaacaaattggggctcagagcttcttccacctgcccgttaacattcgaaaatgtcaaggttccagaagccaatatcttgggacaaattggacatggctataagtatgccatagggagtctcaatgaaggtagaataggaattgctgcacagatgctgggactggcgcaaggatgttttgactacactattccatatattaaagaaaggatacaatttggcaaaagactatttgattttcagggcctccaacaccaagtggctcacgtggccacccagctggaagctgcaagattactaacatacaatgctgctaggcttttagaagctggaaagccattcataaaagaagcgtcaatggccaaatactatgcatcagagattgcaggacaaacaacgagtaaatgtatcgagtggatggggggagtaggctacaccaaagattaccctgtggagaaatacttccgagatgcaaagattggtacgatatatgaaggagcttccaacatccagttgaacaccattgcaaagcatatcgatgcagaatactgacgtctataggagtgggacccctccctggtgtcactgctgtaaaattttaaacggttgtgtcttgttgggagtaagtgccttgcgtgggaataaacttccacagcattcgaatattttaatgaagcccttagtcagggtcctggtgttggcctttttggttttctcttttcaggctgtttaacttaggcacaggagatccacttttaaacttgacgaataagcacctgtatttttttccaaaactgtttttaaagctgtatacgcatacatatatatatttttactct

SEQ ID NO: 185747 - DNA, 1478 bp, Homo Sapiens
  misc_feature (157)..(216): n is a, c, g, or t
  misc_feature (260)..(292): n is a, c, g, or t
  misc_feature (1095)..(1113): n is a, c, g, or t
ttggaggtgatcctggtgcagacgcgcgaggaggtggtgggcggcgacgactcggacgggctgcgcgccgaggacggcttcgaggatcagattctcatcccggtgcccgcgccggccggcggcgacgacgactacattgaacaaacgctggtcaccnnnnnnnnnnnnnnnnnnnnnnnnnnnnnnnnnnnnnnnnnnnnnnnnnnnnnnnnnnnnaagaagggcggcggcaagaagagcggcaagaagagttacctcannnnnnnnnnnnnnnnnnnnnnnnnnnnnnnnnccgacccgggcaacaagaagtgggagcagaagcaggtgcagatcaagaccctggagggcgagttctcggtcaccatgtggtcctcagatgaaaaaaaagatattgaccatgagacagtggttgaagaacagatcattggagagaactcacctcctgattattcagaatatatgacaggaaagaaacttcctcctggaggaatacctggcattgacctctcagatcccaaacaactggcagaatttgctagaatgaagccaagaaaaattaaagaagatgatgctccaagaacaatagcttgccctcataaaggctgcacaaagatgttcagggataactcggccatgagaaaacatctgcacacccacggtcccagagtccacgtctgtgcagaatgtggcaaagcttttgttgagagttcaaaactaaaacgacaccaactggttcatactggagagaagccctttcagtgcacgttcgaaggctgtgggaaacgcttttcactggacttcaatttgcgcacacatgtgcgaatccataccggagacaggccctatgtgtgccccttcgatggttgtaataagaagtttgctcagtcaactaacctgaaatctcacatcttaacacatgctaaggccaaaaacaaccagtgaaaagaagagagaagacccttctcgaccacgggaagcatcttccagaagtgtgattgggaataaatatgcctctcctttgtatattatttctaggaagaattttaaaaatgaatcctacacacctaagggacatgttttgataaagtagtnnnnnnnnnnnnnnnnnnnctttactaagatgacattgctaagatgctctatcttgctctgtaatctcgtttcaaaaacacagtgtttttgtaaagtgtggtcccaacaggaggacaattcatgaacttcgcatcaaaagacaattctttatacaacagtgctaaaaatgggacttcttttcacattcttataaatatgaagctcacctgttgcttacaatttttttaattttgtattttccaagtgtgcatattgtacacttttttggggatatgcttagtaatgctacgtgtgatttttctggagttgataactttgcttgcagtagatttttcttttaaaagaatgggcagttacatgcatacttcaaagtatttctcctg

SEQ ID NO: 185748 - DNA, 1420 bp, Homo Sapiens
  misc_feature (1173)..(1236): n is a, c, g, or t
  misc_feature (1276)..(1285): n is a, c, g, or t
cagtaaacataccaataatttttattatggaattaatctttacatacaaaatcagctacgtaattttacttacaaaacaataaaaactgttctttactgtggcaacaaaagaagcatttgacaaatgaaaaaaaataatgcaaacaaattaaaacaatgcttttctttttacttgcttcactgtctcttctatttattttctatgatcatttgacacaaacatggattactttgatatctactgaaacataaatgataaggttcttaaaggttgaattaaaagtctgggtgttcaatattttagaagctgaataaacaaaacgaaattggggtttgtgattacagaggatttatcattttttccctttgcccatatgaaaatatataatagaaaattacccacgggaaaacatttttaaatttaatgttgcgttcctatcaagtttaataataatgccaagttggcaatttaattaattactttcactaaggattaatactttgtctagaatggagtagaggtagactgatcttttcgtattcaaatattttaaaatataaagtttaaaatgtcataaggaattatataaaatagtatttttaaatatttgaaatttaatttataattatattcaaaataattaaatccctttttgataaatagtaagtaagttgttgcttgaaattcatttggttgaaatgattactctaaggaactcttttagttatttttaactaataatctttagaaaaaaatgtctattttttaataagggtttctagttttggaaaaaagcttctaatgatttaaatgcacttacagatgctcctaccactggaaaaggcatcctatctgtttttcacactagtatttacaaagtattatgtgacagagcagctgttgaactaaaaaaataaaatgtacaaatgcaaactgggtcaaagaaaaatctttgtataaaatgcttagttattccaatgttaaatatgacttatgcttactggtaataaattgcatgtgttctctctcttgttagtagcttgttttagaagagaacacagcaatgcatgggccactctagcgttcttgtgcacctgtaaaggcatccttgcagccccaaccaaaatcaatgtttattctgccaaaaataagagcaagggcttagtaataannnnnnnnnnnnnnnnnnnnnnnnnnnnnnnnnnnnnnnnnnnnnnnnnnnnnnnnnnnnnnnnatgatttattttcatttctgacacagaagtgtttcttttnnnnnnnnnngaccacattttaaatttctgcttaaatgtatataaagtatacatttaagtatactggcactcgcaacaaatgaatccttccccagggataaatggattggaaaatttgtttttcattcaacatttggaaagccaa

SEQ ID NO: 185749 - DNA, 1835 bp, Homo Sapiens
ttgggtctacatcctgagcctaaagagcgagatcagcttctccacatacttttcaatttgatcaagaggccagatgatgagcaaaggcaaatgatactgacaggttgtgtggcatttgcgcgtcatgttggaccaacacgtgtagaagctgaacttttaccacagtgttgggaacagattaatcacaaatacccagaaagacgactgcttgtggcagaatcctgtggagcactggcaccttaccttcctaaagaaatccgtagctccttggttctttcaatgttgcaacaaatgttaatggaagataaggcagatttggtaagagaagctgttatcaaaagccttggtatcattatgggatacattgatgatccagacaaatatcatcagggttttgaattgttgctgtcagccttgggtgatccctcagaaagagtagttagtgctacacatcaagtatttttaccagcttacgctgcgtggactacagaacttggaaatttacagtctcatcttatacttacactactgaacaagattgaaaaacttctcagggaaggagaacatggactggatgaacacaaactccacatgtatctttctgccttgcagtccttgatcccatctctctttgcattagtgctacagaatgcacctttctccagcaaagccaagcttcatggtgaagtgccacagatagaagtgactaggtttcctcggcctatgtcgcctcttcaagatgtgtccactattatcggaagtcgtgagcaattggcagtgctgctgcaactttatgactaccagctagaacaagagggtacaacaggctgggagagtttactgtgggttgtcaatcaattgttgccacaacttatagaaatagttggcaaaattaatgttacttcaactgcctgtgtccatgaattctccagatttttctggcgcctttgccggacatttggcaaaatttttacaaacactaaggtaaaacctcagttccaggagattttaagactatctgaagaaaacattgattcctcagcaggaaatggggtcctcactaaagctacagtccccatttatgcaacaggagtccttacgtgttatattcaggaagaagaccgaaaactgttagttggattcttagaagatgtaatgacgctgctttcattatctcatgctcctcttgatagcctgaaggcttcttttgtggaattgggtgcaaacccagcctaccatgagttactattaactgttttgtggtatggtgttgtccatacttcagcactcgtgaggtgtactgctgctagaatgtttgagctgactcttcgaggcatgagtgaagcgttagttgacaagcgggttgctccggcccttgttaccttgtccagtgatcctgaattctctgtcaggattgccacaattccagcctttggcactattatggaaacagtaattcaaagagagttgctggaaagagtgaaaatgcagttggcttctttcctggaagatcctcagtatcaagaccaacattctttgcatacagagatcataaaaacatttggtagagttggccctaacgcagaacccaggttccgagatgagtttgttataccacatttgcataagttagccttggtgaacaacttacagattgtggattctaaaagactggacattgctacgcatctttttgaagcctacagtgcactttcctgttgtttcatttcagaggatttaatggttaattactttttacctggtctcagatgtttacggactgacatggaacatctctctccagagcatgaggttattttaagttccatgataaa

SEQ ID NO: 185750 - DNA, 1817 bp, Homo Sapiens
ctttgtacaaaaaagttgggagcagggggcgggcggacatcttgggatccggagagtggccgggccggcagagcagggggccgaggacaccaggtctgttctcagagcgatgggccgcggagactgatctgccgccatgattggaggcttattcatctataatcacaagggggaggtgctcatctcccgagtctaccgagatgacatcgggaggaacgcagtggatgcctttcgggtcaatgttatccatgcccggcagcaggtgcgcagccccgtcaccaacattgctcgcaccagcttcttccacgttaagcggtccaacatttggctggcagcagtcaccaagcagaatgtcaacgctgccatggtcttcgaattcctctataagatgtgtgacgtgatggctgcctactttggcaagatcagcgaggaaaacatcaagaacaattttgtgctcatatatgagctgctggatgagattctagactttggctacccacagaattccgagacaggcgcgctgaaaaccttcatcacgcagcagggcatcaagagtcagacaaaagaagagcagtcacagatcaccagccaggtaactgggcagattggctggcggcgagagggtatcaagtatcgtcggaatgagctcttcctggatgtgctggagagtgtgaacctgctcatgtccccacaagggcaggtgctgagtgcccatgtgtcgggccgggtggtgatgaagagctacctgagtggcatgcctgaatgcaagtttgggatgaatgacaagattgttattgaaaagcagggcaaaggcacagctgatgaaacaagcaagagcgggaagcaatcaattgccattgatgactgcaccttccaccagtgtgtgcgactcagcaagtttgactctgaacgcagcatcagctttatcccgccagatggagagtttgagcttatgaggtatcgcacaaccaaggacatcatccttcccttccgggtgatcccgctagtgcgagaagtgggacgcaccaaactggaggtcaaggtggtcatcaagtccaactttaaaccctcactgctggctcagaagatcgaggtgaggatcccaaccccactgaacacaagcggggtgcaggtgatctgcatgaaggggaaggccaagtacaaggccagcgagaatgccatcgtgtggaagatcaagcgcatggcaggcatgaaggaatcgcagatcagcgcagagattgagcttctgcctaccaacgacaagaagaaatgggctcgaccccccatttccatgaactttgaggtgccattcgcgccctctggcctcaaggtgcgctacttgaaggtgtttgaaccgaagctgaactacagcgaccatgatgtcatcaaatgggtgcgctacattggccgcagtggcatttatgaaactcgctgctagctgccactaggcagctagcccacctccccagccaccctcctccacaggtccaggtgccgctccctcccccaccacacatcagtgtctcctccctcctgctttgctgccttccctttgcaccagcccgagtctaggtctgggccaagcacattacaagtgggaccggtggagcagcccctgggctccctgggcaggggagttctgaggctcctgctctcccatccacctgtctgtcctggcctaatgccaggctctgagttctgtgaccaaagccaggtgggttccctttccttcccacccctgtggccacagctctggagtgggagggttggttgcccctcacctcaaagctcccccaaagcccagtaatggatccccg

SEQ ID NO: 185751 - DNA, 1162 bp, Homo Sapiens
ttggcacagtatggacagctggaaacaaagcacattgcaaatgcaaaatataatcagatccaactatttgcaccggcggaatgggtagccttgaattatgtgccgtttgctgaaaggtctttagaagtagttgtggatttataccaaaaaacagcgtgtcacaaagcagtggtgaatgagaaagtgctccagaatattattaagactcttagggttcctctcagtttgaagtattcctgcccttctgaaagcacatggaaactagcagtatcctctctcctcagagttctttctattgggctacctgttgcccggcagcatgcttcttctggaaaatttgacagtatgtggccagaactagccaatacttttgaagattttctctttactaaaagcatacctccagataatctctctattcaagagtttcaaagaaatgaaaatattgatgtcgaggtagttcaacttatcagcaatgagatactaccttatgccaattttattcctaaggaatttgttggtcaaataatgacaatgcttaacaagggctcaatacattctcagtcatcttcatttacagaagcagagattgatattcgtttgagagaggaattttctaaaatgtgttttgaaacattactccagttttccttcagtaataaagtcacaacacctcaagaaggctacatctcacgaatggcactctcagtgcttttaaagaggtcccaagatgtactacatcgctatatagaggatgaaagattaagtggtaaatgccctcttccaaggcaacaagtaacagaaattatatttgttttaaaagcagtcagtactcttattgattcacttaagaaaactcagcctgagaatgttgatggaaatacctgggcacaagtaattgccttatacccaactttagtagaatgcatcacctgttcttcttcagaagtctgttctgcacttaaagaggcactagttccttttaaggatttcatgcagccaccagcatccagagttcaaaatggagaatcttgaccggctacaatatatttgaaagcaggaagatagtctaaaaaatgtttgctcctaattgagtcttctgtgagaggacatttcttactgcaaataattcttggcagctgttgttgggcctcctttaaat

SEQ ID NO: 185752 - DNA, 955 bp, Homo Sapiens
ttggaaaacgttttaattttaagtagttatgtgaaatatcttacaaataaatttaatttttcaggagtagattgccccacctctttattaattgataagtcatggcaagaataactacaaatttgatttgcacactgaagtacatataaataaaatgatttttacttttatatgaatttaaaactaacattaaccttgcattgtattgtgttcagtatttttcaaaagttcatctatttgtacaaacttagtttaaaaaacaaacatacctggcaactttaaaatcttaatggaaatgatttcctatctctttttcaggcaacaagtaacagaaattatatttgttttaaaagcagtcagtactcttattgattcacttaagaaaactcagcctgagaatgttgatggaaatacctgggcacaagtaattgccttatacccaactttagtagaatgcatcacctgttcttcttcagaagtctgttctgcacttaaagaggcactagttccttttaaggatttcatgcagccaccagcatccagagttcaaaatggagaatcttgaccggctacaatatatttgaaagcaggaagatagtctaaaaaatgtttgctcctaattgagtcttctgtgagaaggacatttcttactgcaaataattcttggcagctgttgttggcctcctttaaattctacttacctgagttcagtaattcatattacaggcttgcacatcaacaaaggctcctgaatgaacagcagtgtaaagctttaataaattaaactgatgggagggataattaacactacagtatacatgctaccatatctccagttggtgatttaaagtgagcttatgtacagtttgtggtgtatgtgttaatgatgtactttttaaaagaaagaagagatatttcaattcagtcagatttattagtctggtgttttgcaccc

SEQ ID NO: 185753 - DNA, 1312 bp, Homo Sapiens
ttgggaaacccagccacatggcttcgctgtgggaatccccccagcagtgtatcatcctgagcccactgagcgggtggtggttttcgatcggaatctcaatactgaccagttcagctctggtgctcaagccccaaatgctcaaaggcgaactccagactcgaccttctcagagaccttcaaggaaggcgttcaggaggttttcttcccctcggatctcagtctgcggatgcctggcatgaattcagaggactatgtttttgacagtgtttctgggaacaactttgaatataccctagaagcttcaaaatcacttcgacagaagccaggagacagtaccatgacgtacctgaacaaaggccagttctatcccatcaccttgaaggaggtgagcagcagtgaaggaatccatcatcccatcagcaaagttcgaagtgtgatcatggtggtttttgctgaagacaaaagcagagaagatcagttaaggcattggaagtactggcactcccggcagcacaccgctaaacaaagatgcattgacatagctgactataaagaaagcttcaacactatcagtaacatcgaggagattgcgtataacgccatttccttcacatgggacatcaacgatgaagcaaaggttttcatctctgtgaactgcttaagcacagatttctcttcccagaagggagtgaaggggttgcctcttaacattcaagttgatacctatagttacaacaaccgcagcaacaagcctgtgcaccgggcctactgccagatcaaggtcttctgtgacaagggagctgagcggaaaatcagggatgaagaacgaaagcaaagcaaaagaaaagtttctgatgttaaagtgccactgcttccctctcacaagcgaatggatatcacagttttcaaacccttcattgatctcgatactcagcctgtcctcttcattcctgacgtgcactttgccaacttgcagcggggcactcatgtccttcccattgcctctgaagaattggagggtgaaggctctgtcttgaaaagggggccgtacggcacagaagatgactttgctgtccctccttctaccaagctggcccggatagaagaaccaaagagagtgctgctctacgttcgaaaggagtcagaagaagtctttgatgccctgatgctcaaaaccccatctttgaagggcttgatggaagctatctcagacaaatacgatgttctccatgacaagattgggaaaatattcaagaagtgtaaaaaggggatcctggtgaacatggacgacaacattgtgaagcattactcc

SEQ ID NO: 185754 - DNA, 2152 bp, Homo Sapiens
  misc_feature (1222)..(1247): n is a, c, g, or t
actttgtacaaaaaagttggcgaatggatatcacagttttcaaacccttcattgatctcgatactcagcctgtcctcttcattcctgacgtgcactttgccaacttgcagcggggcactcatgtccttcccattgcctctgaagaattggagggtgaaggctctgtcttgaaaagggggccgtacggcacagaagatgactttgctgtccctccttctaccaagctggcccggatagaagaaccaaagagagtgctgctctacgttcgaaaggagtcagaagaagtctttgatgccctgatgctcaaaaccccatctttgaagggcttgatggaagctatctcagacaaatacgatgttccccatgacaagattgggaaaatattcaagaagtgtaaaaaggggatcctggtgaacatggacgacaacattgtgaagcattactccaatgaggacaccttccagctgcagattgaagaagccggggggtcttacaagctcaccctgacggagatctaaaggcctgcgggccacagctccccaggagttcagtgcaggtgtttctagatcttacggtttggcaactgcaggtaaccccagtcagccatgtcgccagcacaggtctatgtcgagggaatgggttccttgcaggttggaggcggggttgcatctggcttggtggtagcatttaatctattgcattggtgtttttcagatgaaagagaaatccatataccattatgtttgaatttcctgatatatacaggatttaaagtgaaaactttattccaagagttaacagagtctctgggaagctttaggacatctgctacgttatttatcaaaatattgggatctctgccttgtgcctacagtgtcgtgggcctgctcgctagcagaagtcagaaaaggcgataggcttggctttaaggatttcgtgcccttgcctgaattcagtacaactccactgcctcacgttagcgggagcgcacctgaagagtacggggggagccctctctcccttaccctctcactctccaccagatgtttactaaacagggcatgttactgaaatcttcctttgcgactttctcggacatatcaactgcctttctcatgaagaattttaatgggttacagtatgaaatcagttaagataaagctgcattgtatataagtgcaatatatttttgaaggtctgtaaatgtgtacatacatgtctnnnnnnnnnnnnnnnnnnnnnnnnnnggtgtctgtgtacatatagtgaagatatgcagtaagagctaccttaaagactttccctagacaaaggttaagttattttttgatcgtgtataccaagcagatagaatactgtgcttagtggaacccgctaaaaacctttttctctgtttttccaaacacaggcattctgtagcatagcaaaaccttctcaaatgacagagattctgtttgctgttgagaatgttgttatttggatttctgcactgtttaacaaatgaagtaaaagaaaaacactactgcaatcacgtcttttgttatgctagtatcagtcagatgcacttagagtgaagaaacactgtaattacagcacacagattgcaagtattgcgtaccaagtgatacaactcgaaatgcagttctcatcttcctgttttgagaaatgattattttatcacgcatcagagccttcgtgctttgattatcttgtatgttaacaattctagaaaacattcatgaattcacaaaaatacgttactatggcaggggaacattttgtacacatttaagtatataaaaatactaaaatatgtaattttataacaaagtcacgggtatctttaggttcagggaactagactaggtcattcgtgtaaatggactggtagttacagtcttaggttaaagtattctaatgaagtatgggaactaaattgctggttttctaagataagatatgggatatgggtcatataacttttatattttttatgaagttgattttgtcttgcgtgttatttttaattgtatcattgaagatgtattttaaaccaaaggaattaaattttatatgtctatttcgtaatatgtcatttcctgtttttcaatttgactttgcactgctcagtaaaacgtgagagctgaaaagc

SEQ ID NO: 185755 - DNA, 3066 bp, Homo Sapiens
  misc_feature (475)..(489): n is a, c, g, or t
  misc_feature (1990)..(2009): n is a, c, g, or t
  misc_feature (2636)..(2645): n is a, c, g, or t
tcccctgaacgtatagaaaaaagcgaatacgctgaatccataggtgccatcgtggttgagacaagtgcaaaaaatgctattaatatcccaccagctctttcaaggaatcagccgccagatcccacccttggacccccatgaaaatggaaacaatggaacaatcaaagttgagaagccaaccatgcaagccagccgccggtgctgttgacccaagggccgtggtccacggtacttgaagaagccagagcccacatcctgtgcactgctgaaggaccctacgctcggtggcctggcacctcactttgagaagagtgttttttttctggctttgcatcctggaagacctgcagggggcggggcaggaaatgtacctgaaaaggattttagaaaaccctgggaaaacccaccacaccaccacaaaatggcctttagtgtatgaaatgcacatggaggggatgtagttgcatttttgctnnnnnnnnnnnnnnncctttaaaaattgttggatgtgtacaaaagtcttactgccttattatgtgtatgggattctaaagtggcattccacttggatttcctgtgctacctatccaaattccagtaactacttcagtgtcattgcctttgttacctaaccaaccttcactgaaaggcaaatttagttcaggaggttagtttttagctagctttggaagtaagcctttatttattactttttggaggaaatcagagaagtgtcaatggaccgtcactcagactgagacttgagttattacagaagccaggaaaagtgtattagaaactgttgtctacaccacttttaattggtgaacaatttttctaagttatggtcatatatacccaaacaaaccaaatcaaactaaattactgcatataattttgggattgggtggcctagtttgaaagagtgatttaagtaatcactatgtaagtggtgagagatgcaggacatacacattattcaagagaccacctgacatgcatctcctccgcaggaatacattcgtcctctcttagagaagttttaaggcacatagtattattttactaagagaatatctcttggtgtcatatctaggggaagagaattaactagaattaaatttaatgtttgaatctaaatcattgggcaaacttctaataataacaattaataataggttacaggaaagccagccagaggaagtgtcagcactttaaaattctagaccccaaaaaactacaaaatcagaaaaagtatttttatgtttctagcttgaggagaagggctttagggctaaccagaggtctgaccctagaatgccaaggaactgagaatgggctccgatgaaaaccttccttttcagattccctgtctgctcaattaaagatgtttgaatccaaaggaagtcaaggaagaaaaagcatggaaaggaagagaactgattcctactgaaaattcaaattctattaccattctaactttcataaaaagttgggatcaagaagcagctgatttcctgccagggcttatattagggggtgattcttaaaggacattaggattggtgctcagaaatggttaatcatgctgtgtgctagccagggccagctggtaccttctttgccatgagcattcaagggacggctaacctttattgacaatctatatcgcaaaagtcaggaaagaggttgtgagctgattggattaaagacctggcacttcagtaactcagcacgcttccacttcactcaacttaagagagttcattgacagtgttaggatgtgaaggctgggaaacacttattttgcttcaagagttccacttggctctcccaaataggtacctcaaaaactgttagcaagcggcatttggatgtcttgacaggggctttgcagggatttttagggttttttccacattgtccacattaatggttggcatgattgtgcttgcaggccaagaaatgatcataccccttgccaaaggtnnnnnnnnnnnnnnnnnnnntgagttgaaaattgaagtgacctctttccagctgagttgcaggcttattttgtaacctttcctcatccagttttccctgagaacctgggtttatctctagatagctgttcaggttttttagctgaggggtaagtatcctagctgagagttttgcatctttgggctgggtttgcagtggttgtgttttgcataaaatgtctagtctttgccacagatagtgagctacccactaatgagcccatggttttatttcagaagcacatgagggtgtgaaaccactctgttacctttctgtattgtcttagctattcaagccagtcagaggataatatatatattctcatcagcactcagagtagtcagtgaagagagtagatcacacttgggcacaccaggattcacataaacattgtatcttctctgtggatgctcaggccttgtctacaatgaggctttacaaccttcctttgttttggctcgggattacttcctggctgtctaataattgaaccataaccatgtaatattatgtaaaggcctggaaattactgttgctaaaaaaagtcatgtagtttcatgtagtgtagcatccttggcatcgttttccaaaatttgttccttctcccnnnnnnnnnnctttcgtgtgtggcatgagtgtgtatctgtgtaaatatgattgtatatgtgttactccgatatgtaatccatttcactggctgagtttggcccctagccatgtgttaatataaagtaggcatggcttcccaatggaaatctctgagaatgacagtggagttgtgcaagcattttacattgccacataattgacttgccattttatggttaaaaacggcacattaggcagttgaatatgacgttaccttgcagactaaaaggttgaaggcccgaaactaacttttagctaacaataagggctgtgccccaatggaaactgagttcattttctgagaaaggtttggatgactgaaatatttcctctacagtcaaggactttggcatgtggtggctgaaactgagcttttttgtgtgggctcca

SEQ ID NO: 185756 - DNA, 2139 bp, Homo Sapiens
ttggagaacagagtcccaatacttcagctgataagagagaaatactagctccttttccagtgagagatgaaacttttggaaatacagctctcctcaagaaagctgaaagtggtgagtgccagctaagcacacagaatttgattcaggtggctgcagaagattctcatccattggatccaacttcccagctttccagaaagggttcttttggggatgtggccagccctccccaagatatgctttttccccagggtgctcatcttgttccccaggctagggtacacccttctcaaatggaaatttcggagactgtagagaaagtcattcttccacccagacctgtattgaatgatgtaagtgctgcattacagaagctgtgtggagaagtatggttaagttatccagctggaagggaagtaggtcctggagaagtgaacccagaatttcctgaagcagtacagccagtatgtagccccctaaatcctccaggagtgatatcaccatgggctacgatggacaccatagttccagacaggaaggatttttattcctccaatgtagttcctgataaaactcatgaagttggatcttatttagctgcccaaatgtctccatcagaccagacgcttagctcatttgcttccattgttgctcaatatggcaaaggcctccctcaggaagtggaagaaattgtgagggaaacaattgttcaacccaaatcagagttcctcgaattcagtgctggcttagaaaaactactgaaggaagaaactgaaaccttcccctcaaaatatgaaagtgatacagggaatctttctccatcaaagttaataggtagtacagaggagcccaggcgagccacttctgaatgccatcctgaggaattaaaagaaacagtagaaaaggccgaggctccattaataactgagagtgcttttgatgctggttttgagaaacttcttaaagaaataactgaagctcctccttatcagccccaggtgtcagtgagagaagaaactcacgagaaggagtcctcacagtcagagcagaccaggttcttggggacagtgccccatttttacagggcagcctcacagacctctgaaatgaaggataaaagtaatggtttggaatctcaagtcaaccaatgtgataaaatgttgggaggagacgcacttgtgactgatttattggtagatttttgtggttccagaagtggagttgagatccctagaaccccacaactttatgtggctcatgaaatagggaccattaaaactgtaacccccccagaggacagggacagtgaaagtggggttgcagggggacaagggactcttcaggaacctggctttggagaggcttctgaagcaattagtgtgtccagaaataggcaacccattcctctcctgatgaacaaagaaaactctacaaaaacaagtaaagttgaattgactctagcatcgccatatatgaaacaagagaaagaggaagaaaaagaaggtttctctgagtctgatttttcagatggaaacaccagttctaatgcagagagctggagaaatccttccagttcagaagaagaacccagtcctgttttgaaaactttggaaaggagtgccgctaggaaaatgccttccaaaagtctagaagacatttcatcagattcatcaatcaagcaaaagtagataatcagccagaagaattagtgcgtagtgctgaagatgatgagaaaccagatcagaagccagttacaaatgaatgcgtaccaagaatttccacagtgcctacacgacctgataatccattttctcaccctgacaaactcaaaaggatgagcaagtctgttccagcatttctccaagatgagagtgatgacagagaaacagatacagcatcagaaagcagttaccagctcagctgagacaagaagagcccgagctctttaaccagtcttaggagctcctctggcatgacgtccttgtcttctgtgagtggcagtgtgatgagtgtttatagtggagactttggcaatctggaagttaaaggaaatattcagtttgcaattgaatatgtggagtcgctgaaggagttgcatgtttttgtggcccagtgtaaggacttagcagcagcggatgt

SEQ ID NO: 185757 - DNA, 1387 bp, Homo Sapiens
  misc_feature (1128)..(1139): n is a, c, g, or t
ttgggaaacctctcccatctccaagaaagccattctggtttcttcaccatctttgagactaaaggccttgaaatattttctgggtatcctgcaagatttttcaagatatacaacctagttttcccagacagcaccagttgcccttgaagcagaaaacagaggtgaaatgaaactagctctccagtatgtcccagagccagtccctggtaaaaagcttcctacaactggagaagtgcacatctgggtgaaggaatgccttgatctaccactgctaaggggaagtcatctaaattcttttgttaaatgtaccatccttccagatacaagtaggaaaagtcgccagaagacaagagctgtagggaaaaccaccaaccctatcttcaaccacactatggtgtatgatgggttcaggcctgaagatctgatggaagcctgtgtagagcttactgtctgggaccattacaaattaaccaaccaatttttgggaggtcttcgtattggctttggaacaggtaaaagttatgggactgaagtggactggatggactctacttcagaggaagttgctctctgggagaagatggtaaactcccccaatacttggattgaagcaacactgcctctcagaatgcttttgattgccaagatttccaaatgagcccaaattccactggctcctccactgaaaactactaaaccggtggaatctgatcttgaaaatctgagtaggtggacaaatatcctcactttctatctattgcacctaaggaatactacacagcatgtaaaagtcaatctgcatgtgcttctttgattacaaggcccaagggatttaaatataacaaaatgtgtaatttgtgactctaatattaaataagatatttgaacaagctaggaaaattgaatttctgctgctgcttcaaagaaaaagctgccccagagcattaaacatggggtattgttaagaagcaaaatgttcttgtttgccatcatgtgtttcacaccacaattctgtgccacagttaagagggtctggtacccttgcaggacctttgtaggttgtgggaaaaagtcgcagaaagatactcaaagtggagcagggaatggagacagacatcagtgatgatnnnnnnnnnnnntggaccttaagaaactatttactctgtaatctctaataaaatatggaattccatattagggcaatgagactgaaactactggtgtttttctgccttgagaaaacaaacagttaaaacaagcctcaaatgtattttagtgccacccactggccataggtacaattcagttgttggcttgttttgacttaattctaaaataggtctcaagcctgtatttttatgagtttatttttttaaaaccctgcata

SEQ ID NO: 185758 - DNA, 2653 bp, Homo Sapiens
  misc_feature (2026)..(2153): n is a, c, g, or t
ttggtgcattctgatgtgcatttacctatgggagcctaaggataggtgaaaattgttatgtgagcaaggatatctttagtacgtgtagctaaatttttagtttttccttcattagatttctttaaagatgaatttaatgtttaagcatgaatttgagtcttttgtgttatgtatataaatataatttgatttttacctattttcttaatatctcttataatgataaagtcaatgtatctgtttcattcacaatataatttaagattctttatcatatgatatttattagattagaaaatacttatatagagcttactctgtgctaggcactaagtgccttggaaaatattaacttattcattataagagctgtgattcaccataagaaaagcttagatgttgtgattcttagaaaaagaagaaaatagttttctaactaggtgtatgcaaattaggattataatttatcctcttcttgtaccttctacacatatactttctatatcagaaagaagacatatgctacattttcttattaaattcttagagtaccctaactttaaccattctaactttgccttgggatattgaaaattctgaatcagtgaggtatctaaataatttatattttcaaaaaataatgtttattttataattctgagtgtaaaacactatcagaaaagtaatcctcatgctcactaaacaaacctactctaagacactcaacaaccagaacagttttattattgagttgtgtacaaaaatcttgactgtccagatgaaatagtttttcagcctgcagtgtgttagtgatatatctcaaggagatgaaccaataaagtacagactttgtggtctgaagctctgttgtgaaaaaataagctaaaccaattcacactgacagtataatttgattcaagtgcagctccagttcaataaaaactaatgtttttaaaattaactttgttttgtatttggttcaactccttgctagttctctctctatataatttataaaaactgcatggtgctaatctcatgatcctgtgcatgtggactactctgcctttaacttttttacaaaaacatgtttgttcatagattaaataaaagtatgttttcaacttaatgtctaatgttttctgacaattgtaagaataattttgaaatggaaatgctgctgtttagtttccacagtgcctacacaacctgataatccattttctcaccctgacaaactcaaaaggatgagcaagtctgttccagcatttctccaagatgagagtgatgacagagaaacagatacagcatcagaaagcagttaccagctcagcagacacaagaagagcccgagctctttaaccaatcttagcagctcctctggcatgacgtccttgtcttctgtgagtggcagtgtgatgagtgtttatagtggagactttggcaatctggaagttaaaggaaatattcagtttgcaattgaatatgtggagtcactgaaggagttgcatgtttttgtggcccagtgtaaggacttagcagcagcggatgtaaaaaaacagcgttcagacccatatgtaaaggcctatttgctaccagacaaaggcaaaatgggcaagaagaaaacactcgtagtgaagaaaaccttgaatcctgtgtataacgaaatactgcggtataaaattgaaaaacaaatcttaaagacacagaaattgaacctgtccatttggcatcgggatacatttaagcgcaatagtttcctaggggaggtggaacttgatttggaaacatgggactgggataacaaacagaataaacaattgagatggtaccctctgaagcggaagacagcaccagttgcccttgaagcagaaaacagaggtgaaatgaaactagctctccagtatgtcccagagccagtccctggtaaaaagcttcctacaactggagaagtgcacatctgggtgaaggaatgccttgatctaccactgctaaggggaagtcatctaaattcttttgttaaatnnnnnnnnnnnnnnnnnnnnnnnnnnnnnnnnnnnnnnnnnnnnnnnnnnnnnnnnnnnnnnnnnnnnnnnnnnnnnnnnnnnnnnnnnnnnnnnnnnnnnnnnnnnnnnnnnnnnnnnnnnnnnnnnatatgtgacatatatctaagtagcatagatgatattatttatgattttccctacacattatctttatagatgtcagctgtaccatccttccagatacaagtaggaaaagtcgccagaagacaagagctgtagggaaaaccaccaaccctatcttcaaccacactatggtgtatgatgggttcaggcctgaagatctgatggaagcctgtgtagagcttactgtctgggaccattacaaattaaccaaccaatttttgggaggtcttcgtattggctttggaacaggtaaaagttatgggactgaagtggactggatggactctacttcagaggaagttgctctctgggagaagatggtaaactcccccaatacttggattgaagcaacactgcctctcagaatgcttttgattgccaagatttccaaatgagcccaaattccactggctcctccactgaaaactactaaaccggtggaatctgatcttgaaaatctgagt

SEQ ID NO: 185759 - DNA, 1422 bp, Homo Sapiens
  misc_feature (1349)..(1360): n is a, c, g, or t
ttggctcgaaacctaacagataagaaaatttgctatatacagatgaatttctcttcatctctgtgttataactttggcatcaagtaatgtttttcatcatttaattttcttctttgaacttcagtataaaattgaaaaacaaatcttaaagacacagaaattgaacctgtccatttggcatcgggatacatttaagcgcaatagtttcctaggggaggtggaacttgatttggaaacatgggactgggataacaaacagaataaacaattgagatggtaccctctgaagcggaagacagcaccagttgcccttgaagcagaaaacagaggtgaaatgaaactagctctccagtatgtcccagagccagtccctggtaaaaagcttcctacaactggagaagtgcacatctgggtgaaggaatgccttgatctaccactgctaaggggaagtcatctaaattcttttgttaaatggtaatagtattgatgactctgtctgcaacagttctgtagcctggtctttgctgtaccatccttccagatacaagtaggaaaagtcgccagaagacaagagctgtagggaaaaccaccaaccctatcttcaaccacactatggtgtatgatgggttcaggcctgaagatctgatggaagcctgtgtagagcttactgtctgggaccattacaaattaaccaaccaatttttgggaggtcttcgtattggctttggaacaggtaaaagttatgggactgaagtggactggatggactctacttcagaggaagttgctctctgggagaagatggtaaactcccccaatacttggattgaagcaacactgcctctcagaatgcttttgattgccaagatttccaaatgagcccaaattccactggctcctccactgaaaactactaaaccggtggaatctgatcttgaaaatctgagtaggtggacaaatatcctcactttctatctattgcacctaaggaatactacacagcatgtaaaagtcaatctgcatgtgcttctttgattacaaggcccaagggatttaaatataacaaaatgtgtaatttgtgactctaatattaaataagatatttgaacaagctaggaaaattgaatttctgctgctgcttcaaagaaaaagctgccccagagcattaaacatggggtattgttaagaagcaaaatgttcttgtttgccatcatgtgtttcacaccacaattctgtgccacagttaagagggtctggtacccttgcaggacctttgtaggttgtgggaaaaagtcgcagaaagatactcaaagtggagcagggaatggagacagacatcagtgatgatnnnnnnnnnnnntggaccttaagaaactatttactctgtaatctctaataaaatatggaattccatattagggc

SEQ ID NO: 185760 - DNA, 1439 bp, Homo Sapiens
actttgtacaaaaaagttgggtcttctggcttttgtgagctgtatttgtgaactttacttttacaaggctgtgtgcaagaagtttgggttgcacgtgagtcgaatgatgctagccttcttggttctcagcactggcatgttttgctcatcatcagcattccttcctagtagcttctgtatgtacactacgttgatagccatgactggatggtatatggacaagacttccattgctgtgctgggagtagcagctggggctatcttaggctggccattcagtgcagctcttggtttacccattgcctttgatttgctggtcatgaaacacaggtggaagagtttctttcattggtcgctgatggccctcatactatttctggtgcctgtggtggtcattgacagctactattatgggaagttggtgattgcaccactcaacattgttttgtataatgtctttactcctcatggacctgatctttatggtacagaaccctggtatttctatttaattaatggatttctgaatttcaatgtagcctttgctttggctctcctagtcctaccactgacttctcttatggaatacctgctgcagagatttcatgttcagaatttaggccacccgtattggcttaccttggctccaatgtatatttggtttataattttcttcatccagcctcacaaagaggagagatttcttttccctgtgtatccacttatatgtctctgtggcgctgtggctctctctgcacttcagaaatgttaccactttgtgtttcaacgatatcgcctggagcactatactgtgacatcgaattggctggcattaggaactgtcttcctgtttgggctcttgtcattttctcgctctgtggcactgttcagaggatatcacgggccccttgatttgtatccagaattttaccgaattgctacagacccaaccatccacactgtcccagaaggcagacctgtgaatgtctgtgtgggaaaagagtggtatcgatttcccagcagcttccttcttcctgacaattggcagcttcagttcattccatcagagttcagaggtcagttaccaaaaccttttgcagaaggacctctggccacccggattgttcctactgacatgaatgaccagaatctagaagagccatccagatatattgatatcagtaaatgccattatttagtggatttggacaccatgagagaaacaccccgggagccaaaatattcatccaataaagaagaatggatcagcttggcctatagaccattccttgatgcttctagcttcctcagcgatgccaagaatactgagaaacaggaagaagagatcagagtttctatactttgcttaccagaatcatttgctgatgtgacccctaatccttctatttgtcacataaaagaagcccgaatgagggtcc

SEQ ID NO: 185761 - DNA, 1062 bp, Homo Sapiens
ttgggctgtctggttttgtacgtaaagttttattggaacacacctgtgtccattctttcatgtattgtctatggctgctgtcatgttacaactacagagttgagtagttgcaacagagactatatggcccttgaccaaaaaaagcctgccaacccctgccatgggacatattcttcagggtccctttcttaaaaatatgtataacaactcttaataatttattggctcagtgattcccaaattatgttttatagaatattaatattctctaagttaataaatgttttgagaaaatgattgatgctaatattggtttttctttatggttgattttaatatgtttatttaaatatgagattaagactgctaaactcatttctatagcttttatttttatgtgataatctacctttaagaaaaggtgtaccatacctgagagcaccaggaagtcgcatgagagatcacctgatacatgaacgtatgatgttccatctgcgcattgatgaataggcagcatttacaaattaactgatgtgttgctgtatatcatctctttgatgattgctcctcttctttgtatcctgtcttataatttcaacacatttgcgatactcaatgtctattctaaattaaccatgttttgtaccacaaactcattgcccatggatctgttgctgaaacaaggaagtcttaaacaagaagtggaatctttctgttatcagattgtgtctgaatcaaatgatcagaaggttggaatattacaaagtgaagataagcagttgcaaccttcagtttctaaaaaatcagaaggtgagctttccagggtcaaatttatatccaattccaacaaaataacatttagtaaaaaaccaaaaagaaaaaatatgatgaaagttatttgtcttttggatttacttacttcggaatagagatgcacctcatgctcagtgtgtattatgtaagaaaattttatcaaatagctctttagcctctagtaagcttcgaagacatttggaaactaaacatgctgcatataaagacaaagacataagctttttcagc

SEQ ID NO: 185762 - DNA, 1876 bp, Homo Sapiens
actttgtacaaaaaagttggccttcagtttccccaaaaatcagaaggtgagctttccagggtcaaatttatatccaattccaacaaaataacatttagtaaaaaaccaaaaagaagaaaatatgatgaaagttatttgtcttttggatttacttacttcggaaatagagatgcacctcatgctcagtgtgtattatgtaagaaaattttatcaaatagctctttagcccctagtaagcttcgaagacatttggaaactaaacatgctgcatatatagacaaagacataagctttttcaagcaacatctcgattcacctgaaaataataaacccccaacacctaaaattgtgaatacagataatgaaagtgctacagaagcatcatacaatgtaagttaccatatagcgctgagtggagaggctcatactattggagaattgcttatcaaaccttgtgcaaaagatgtagtgatgcggatgtttgatgaacaatatagtaaaaaaatagatgcagtacagctatcaaacagtactgttgcacgtcgaattaaggatctagctgctgacattgaagaagagcttgtttgtagactgaaaatttgcgatgggttttcactgcaactagatgaatcagctgatgtttcaggacttgctgtgctgcttgtgtttgttcgttataggtttaataagtctattgaggaagacctactcctgtgtgaatctttgcaaagtaatgctaccggtgaagaaatattcaactgtatcaacagttttatgcagaaacatgaaattgaatgggaaaaatgtgttgatgtttgtagtgatgcttctagggcagtggatgggaaaattgccgaagctgtcaccttaataaaatatgtggctcccgaaagcaccagtagtcactgcctattatacagacatgcactggcagttaaaataatgcctacatctctaaaaaatgtgctagaccaggcagtacaaatcatcaattatattaaagctcgaccacatcaatccagactattaaaaattttatgtgaggaaatgggtgctcagcacacagcacttcttctaaatacagaggtgaggtggctttctcgaggtaaagttcttgtaagactttttgaacttcgtcgtgaacttttggttttcatggattctgcttttcgactatctgattgtttaacaaattcatcttggctgctaagacttgcatatcttgcagatatttttactaaattaaatgaagttaatttgtcaatgcaaggaaaaaatgtgaccgtttttacagtatttgataaaatgtcgtcattgttaagaaaattggaattttgggcctcatctgtagaagaagaaaactttgattgttttcctacactcagtgattttttgactgaaattaattctacagttgataaagatatttgcagtgccattgtgcagcacctaaggggtttgcgcgctactctgttaaaatactttcctgtaacaaatgacaataatgcttgggttagaaatccatttacagttactgttaaaccagcttcattagtagcacgggactatgagagcctgattgatttaacatctgattctcaagtgaagcaaaattttagtgaactttcactaaatgatttttggagtagcctaattcaggaatacccaagcattgcaaggcgtgcagtgcgtgtacttcttccttttgctacaatgcacctgtgtgaaacggggttttcatattacgctgcatcaaaaacaaatataggaaaagacttgatgctgcacctcatatgcgaattccacttagcaatattacacctaatattaaccgatatgtgataaaaagacacaaaacactgttctcattaaaatt

SEQ ID NO: 185763 - DNA, 848 bp, Homo Sapiens
  misc_feature (124)..(137): n is a, c, g, or t
  misc_feature (679)..(722): n is a, c, g, or t
ctttgtacaaaaaagttggctgaggttactaaccagctatcagtatattattttgcctttaaatcttttatccccttttggtgaaggtttccctttaggaaaaaaggtgtcaaacaaccctgannnnnnnnnnnnnngcatcatttttattacaccaaattaaagttgggagttccaagatcccattccagttaatatttaaccaaggtctaaaatttgattttttttaaatctttgaatcctcccttctgcccctcatggatccttggttttaatgatatggaaacatctaattcttagaattattccgtagcttttgctgattactctgagatttcagttaagacttgtttcaaaagacagatagctgactggttcataatacattggaatagttggatccaaactaataagaataagctgtacaggaactagtgctcaatatacattgtataaatttgtggaaatctcttggatgtgaattgttacttcaagtggcttttattaagattttctcagacttacttggaggttaaagcaaacccaaatgtgtattattttgttacagagctctgctttataattttgtaataaagtttcaatacagacacctgtcctgtctggtgcgaggatgttagaggttgataggactgacaaaagagcctgacagtggttcatnnnnnnnnnnnnnnnnnnnnnnnnnnnnnnnnnnnnnnnnnnnntgagctcaggagtttgagaccaacctgggcaatgtagtgagaccttgtctctacttaaaaaaacaaacaagggctgaggcgggcagatcacgaggtcattttattaaaaagggaccaccctgccaa

SEQ ID NO: 185764 - DNA, 1226 bp, Homo Sapiens
  misc_feature (877)..(890): n is a, c, g, or t
cagcaggagaaaccattttctaggctctttaggaaggaccatgcaatgagtaggtgatgtatttgagccctcacagtctttacacccctagaggagctggaggacttaagagtttgctgcagaagcgtggccaagcacaaaacacatgatcaggaaagcagagtgttttcccattaccaatggatgaactatgcaaaccctaaacgccttggcagacacctcccaccccttacccctcccatgcagctgaaaaatctgagactagaaccaatcatgactctggatggcagagggaaacctctaaagggacttattacattggtacagacatatttatgctttcttccatcaccaaccactaaacccctttggaggaatgaaataactgcataaactagtcaactgaacactgggccacttacctcaatgttatacaaagtcctggatgatttgattctgaaccacagcctttgcaggagttgggggaatcagatttgctcatgaagacatccctttccacttttgtcatgggcagtaaatactatagtttacaatgcctaccaattagcaaaggatcattcattcagctactcagttcctctgtaaaacaggtctatgtatgtgcaattcagctaagatctagcagtaacttaagggcagaagctggctctctacttacaacctgctttctctgctgaagccttacctcctcttcagtttccctcctagacacaaatcgaaaataatatactgatagctggttagtaacctcagtaagaattaaaactgaggttgtttactcattttgcctttaaatcttttatccccttttggtgaaggtttccctttaggaaaaaaggtgtcaaacaaccctgannnnnnnnnnnnnngcatcatttttattacaccaaattaaagttgggagttccaagatcccattccagttaatatttaaccaaggtctaaaatttgattttttttaaatctttgaatcctcccttctgcccctcatggatccttggttttaatgatatggaaacatctaattcttagaattattccgtagcttttgctgattactctgagatttcagttaagacttgtttcaaagacagatagctgactggttcataatacattggaatagttggatccaaactaataagataagctgtacaggaactagtgctcaatatacattgtataaatttgtggaatctcttgga

SEQ ID NO: 185765 - DNA, 1215 bp, Homo Sapiens
  misc_feature (179)..(189): n is a, c, g, or t
ttggctccttgtggttttgccagtgactcttgttcagcacggggcctgaggtcagagctgtcttgtgccatctgtatgttctgacagacgtcttgtcttctattttggcgttaagcttgatccccttttcttgttaaaagggaatctggtattttgttatgaaggtttcttgaagagannnnnnnnnnngcaattaattacgtttagtgtagagtgcatatacagcaaattaaaggacccagaaagctggatccaatagtgacctgggtacaccaatcggaatattgaatttggggaagtcaagggctgggatcaagaggtggattggaactaatgccatgtaggatggtatgacaaggcaacactgtattgctctctgtttatatagcaggtgtcacaactaacttgtctttagccttggtgctttgatccttctatattttgaccccacaggtgtggtccggtttacttaatcaggacatgggcctaagaacaaaccttttcccttcatgataacatccatagacaacttattagaagggactagagtttttgcaaatttccctgctggatggggcctatagctatacttagtatatgcctaaacatggtaattggatagtaaatggttttctagttccattgctgtatatttgcctaaatggacttgtgttcaaattatttcttcaattgtcatagataatcctgtaccaaatggggaagaattaggaaataatcatgttgtctaatggtactctggattcagggcagcaactgccatttaaatgttgtcttgttcatttctaaatctgttcatgaagtttaggttttccctgaaactaagttgaattatttccaaaatgaaacaggcttctcagggacatatccacttcttcccagtctgcctttggattaaagcaccaagcagagaccacattaattccctttgctatactgtgatccttagtatgttaattcttaagaaaccaacatatcactgaaagaaggctggcagaacgcaagtgcattttttcactgtgggaagaaagatcaagtgacgtattattttttcctggttgtcacttaatgggctgagtaaaaagcttgaaaactcagactttcggtcttggttctgccactcattggttatgaggaggcccagagcaggtaagttcaccttcctggccttactttcctgatgtgtaatacggccaa

SEQ ID NO: 185766 - DNA, 1506 bp, Homo Sapiens
ttggcggcggatctaagctaacttcttggatcttttcttgtttctccttggtttttgactttttctggaccctggtgtctacgatttccgagatgccgtcttctttgttgggcgcggcgatgccggcctctacatctgccgcagccctgcaggaagctctggaaaatgctggacggctcatcgaccgtcagttgcaagaggaccgcatgtacccggacctttccgagctgcttatggtgtctgccccaaataatcccaccgtttctggcatgtcagatatggattatcctttacaaggacctggtttgctgtccgtacccaaccttccagagatcagttccatccgaagagttcctctcccacctgaacttgttgagcagtttggacatatgcagtgtaattgcatgatgggtgtgttccctcctatcagcagagcttggctcacaattgacagtgatatattcatgtggaactatgaggatggaggagaccttgcctattttgatggacttagtgagactattcttgctgtggggcttgtgaagccaaaagcaggcatctttcaacctcatgtgcgacacctcctggttttggcgacccctgtagacatagtaattcttggactcagctatgctaatttgcaaacaggttctggagttcttaatgatagtttgtctggtggaatgcagttgcttccagatcctttatattctcttcctactgataatacttaccttttaacaataacttccactgataatggcagaattttcttggctggaaaggatggctgtttatatgaagtagcctaccaggctgaagcagggtggtttagccaaagatgtaggaaaataaaccactcaaagagctcactttctttccttgttccttccttgctacaattcacgttctcagaagatgatcctattcttcaaattgcaattgataattctagaaatattttatatacacgatctgagaaaggagtaatacaggtgtatgatttgggacaagatggacaaggaatgagcagagttgcctctgtgtcacagaatgccattgtctctgctgctggtaacattgctaggaccatcgatcgttctgtttttaaaccaattgtccaaatagcagtgattgaaaattctgaatcactggactgtcagttattggctgtcacacatgcaggtgttaggttatattttagcacttgtccattcagacagccattagcacggcctaatacactgacgctggttcatgtccgcttacctcctggattctcagcatcttcaaccgtggaaaagccttcaaaagtacatagagctctttatagtaaaggtattctattgatggcagcctcagaaaatgaggataatgatattttatggtgtgtcaaccatgatacttttcctttccaaaagccaatgatggaaacccagatgacagctggtgttgatggtcattcctgggctctttctgcgatagatgaattgaaagtagataaaa

SEQ ID NO: 185767 - DNA, 1562 bp, Homo Sapiens
ttggctcccgtagaggaagacactgtggaggccagttctggagctattgcagcctcggttgcccggccggggacccgagccgaaaagttatcgtcagaatgtcgggcaaagaccgaattgaaatctttccctcgcgaatggcacagaccatcatgaaggctcgtttaaagggagcacagacaggtcgaaacctcctgaagaaaaaatctgatgccttaactcttcgatttcgacagatcctaaagaagataatagagactaaaatgttgatgggcgaagtgatgagagaagctgccttttcactagctgaagccaagttcacagcaggtgacttcagcactacagttatccaaaatgtcaataaagcgcaagtgaagattcgagcgaagaaagataatgtagcaggtgttactttgccagtatttgaacattaccatgaaggaactgacagttatgaactgactggtttagccagaggtggggaacagttggctaaattaaagaggaattatgccaaagcagtggaactactggtggaactagcttctctgcagacttcttttgttactttggatgaagctattaagataaccaacaggcgtgtaaatgccattgaacatgtcatcattccccggattgaacgtactcttgcttatatcatcacagagctggatgagagagagcgagaagagttctataggttaaagaaaatacaagagaagaaaaagattctaaaggaaaaatctgagaaggacttggagcaaaggagagcagctggagaggtgttggagcctgctaatcttctggctgaagagaaggacgaggatcttctatttgaataatctttcctgttctggttctttgagaaaccctaacactggcttcattttaattcacagtgtgtaggtttgatttgtgtggctatttattttttggcctaagaatttcactggttgtaaaatttacctagatgtctatttatgggattacttttgcagaatcataatttagcaaccatttatcatggatgaaagagatctgtaaaacctgcccaggaacttacagaatttactttgcagaagcgttatcatactccatttacatctgtgttacacgtgatctgcttaccaagcatattaggaaatacctcttaggaagcattagcggtctcaggccaattactgtggagcagctttcattcctacccacttgcaaaccttggcgctgttgtctgagattgctgcagccattcttgttaccatggtacttctcaaactttgtgaaaacctgcacttttccttgcatgacaggttcctgtcttgtctgtcatgggagccattctgccatttaaatgcgactgtggtataaacagtaaaatgatttaaaagtaagtcattccgtttttattaatttactgttaagtcatgttctcatgctcagatcagtagtgtcagccagagctttctctgcagacatgtaggaagtgggtagctatttttcccactccatgtattagagttttacaaaaggcttacttttgagacaactgttgcattttgggg

SEQ ID NO: 185768 - DNA, 1645 bp, Homo Sapiens
ttggggtgtacgcattgtacaggcagctgctgcagcacgagtgcccgcggtgccccgagctgccacctttcagcctcttcggggacctggagcagcacatgcggaggcagcatgagctcttctgctgccgtctgtgcctccagcacctccagatcttcacatatgagcgcaagtggtactcgcgcaaggacctggcccggcatcgcatgcagggtgaccccgatgacacgtcgcaccgtgggcacccgctctgcaagttctgtgacgagcgctacctggacaatgatgagctgcttaagcacctgcgccgcgaccactacttctgccacttctgcgactcggacggggcccaggactactacagcgactatgcctacctgcgtgagcacttccgggagaagcactttctgtgtgaggaaggccgctgcagcacggagcagttcacccacgccttccgcaccgagatcgacctcaaggcccacaggacggcctgccacagtcgcagccgcgccgaggcacgccagaaccgccacatcgacctgcagttcagctacgcgccacggcactcgcgccggaacgagggggtcgttggtggcgaagactacgaggaggtggacaggtacagccgccagggccgagtggcccgggctggcactcgcggagcccagcagagccgccgaggaagctggaggtacaaaagggaagaagaggaccgagaagtagcagctgctgtccgggcctccgtggccgcacagcagcaggaggaggctcgcaggagtgaggatcaggaggaaggcggtaggcccaagaaggaggaggcagcggcgcggggacctgaggatccccgtggcccccggcgctcaccccggactcagggcgaaggcccaggccccaaggaaacctcgacaaatggtcctgtaagccaagaagccttctcggtgacaggcccagccgccccaggcgccctcccaccacccagcccgaagctcaaggacgaagacttccccagcctctctgcctccacttactcctcctgctccactgcagcaaccccgggccctgtggggttggcgctgccgtacgccatccctgccagaggcaggagtgccttccaggaggaggacttccccgccctggtgtcctcggtgcccaagcctggcaccgcccccaccagccttgtctctgcctggaacagcagcagtagcagcaagaaggtagcacagcccccactctcggcgcaggctaccggcagcggccagcccaccaggaaggctgggaaggggagcaggggcggcaggaagggcggcccgcccttcacacaggaggaggaggaggacggcggcccggccctgcaggagcttctgagcacacgccccacgggctccgtctcctccacactggggctggcctccatccaaccctctaaagttgggaagaagaagaaagtgggctcggagaagccaggcaccacattgccacagcccccgcccgctacctgtcccccaggggctttgcaggccccggaagctcctgccagcagagccgaggggccagttgccgtcgtcgttaatggacacacggagggcccggcccctgctcggagtgcccccaaggaaccccctgggctcccaaggcccctggggtc

SEQ ID NO: 185769 - DNA, 1226 bp, Homo Sapiens
  misc_feature (1148)..(1168): n is a, c, g, or t
ttggcggcggttgccgtggggaccggtcgggcccctccctcctccggtcccccgccccaggtccttccccaccgagacgcgccggcggaccgcgggcgagtgcagccggtgacccggcgagaggcggcgccgctcccaagatgtcgcagacggccatgtccgaaacctacgattttttgtttaagttcttggttattggaaatgcaggaactggcaaatcttgcttacttcatcagtttattgaaaaaaaattcaaagatgactcaaatcatacaataggagtggaatttggttcaaagataaaaaatgttggtggtaaatatgtaaagttacaaatatgggatacagcaggacaagaacgattcaggtccgtgacgagaagttattaccgaggcgcggccggggctctcctcgtctatgatatcaccagccgagaaacctacaatgcgcttactaattggttaacagatgcccgaatgctagcgagccagaacattgtgatcatcctttgtggaaacaagaaggacctggatgcagatcgtgaagttaccttcttagaagcctccagatttgctcaagaaaatgagctgatgtttttggaaacaagtgcgctcacaggggagaatgtagaagaggcttttgtacagtgtgcaagaaaaatacttaacaaaatcgaatcaggtgagctggacccagaaagaatgggctcaggtattcagtacggagatgctgccttgagacagctgaggtcaccgcggcgcgcacaggccccgaacgctcaggagtgtggttgttaggagagcacacaggtgttcatacagtggcatttgggacacaatcgttggaacctgaagaatctgaagttttttttaccaccatctttttctactctgtatggaagtagatctttatggggaaaagagaatttggggtgttctgcaagccagtcaaagtggcacagcaaatcatataaatcgaattaaatggacaacaccgttagatgtgtatgtaaaaattttctgtttcatatttttcctttcactttcggtttaaaacatgctatatgtactgtatgtcctgtagcccagtgcggctccacagcatggaatctgatgtatgatatgatagaatgtggcactaaatgcagnnnnnnnnnnnnnnnnnnnnnaaatcatatgaactaaaattgtcaaattgtgaggtgtgctttttcttcatcatgttgg

SEQ ID NO: 185770 - DNA, 1742 bp, Homo Sapiens
gccaactttgtacaaaaaagttggattaacaatttttatttagaacgcatgctgattctgcaaaatccacctcttctgaaacagactgcaatgataacgtcccttctcataaaaatcctgcttcctcccagagcaaacatggaatgaatggcttttttcagcagcaaatgatatacgactctccaccttcacgtgccccatctgcttcagttgactccagcctttataacctgcccaggagttattcccatgatgttttaccaaaggtgtctccatcaagtactgaagcagatggagaactctatgtttttaataccccatctgggacatcgagtgtagagactcaaatgaggcatgtatctattagttatgacattcctccaacacctggtaatacttatcagattccacgaacatttccagaaggaaccttgggacagacatcaaagctagacactattccagatattcctccacctcggccaccgaaaccacatccagctcatgaccgatctcctgtggaaacgtgtagtatcccacgcaccgcctcagacactgacagtagttactgtatccctacagcagggatgtcgccttcacgtagtaataccatttccactgtggatttaaacaaattgcgaaaagatgctagttctcaagactgctatgatattccacgagcatttccaagtgatagatctagttcacttgaaggcttccataaccactttaaagtcaaaaatgtgttgacagtgggaagtgtttcaagtgaagaactggatgaaaattacgtcccaatgaatcccaattcaccaccacgacaacattccagcagttttacagaaccaattcaggaagcaaattatgtgccaatgactccaggaacatttgatttttcctcatttggaatgcaagttcctcctcctgctcatatgggcttcaggtccagcccaaaaacccctcccagaaggccagttcctgttgcagactgtgaaccaccccccgtggataggaacctcaagccagacagaaaagtcaagccagcgcctttagaaataaaacctttgccagaatgggaagaattacaagccccagttagatctcccatcactaggagttttgctcgagactcttccaggtttcccatgtccccccgaccagattcagtgcatagcacaacttcaagcagtgactcacacgacagtgaagagaattatgttcccatgaacccaaacctgtccagtgaagacccaaatctctttggcagtaacagtcttgatggaggaagcagccctatgatcaagcccaaaggagacaaacaggtggaatacttagatctcgacttagattctgggaaatccacaccaccacgtaagcaaaagagcagtggctcaggcagcagtgtagcagatgagagagtggattatgttgttgttgaccaacagaagaccttggctctaaagagtacccgggaagcctggacagatgggagacagtccacagaatcagaaacgccagcgaagagtgtgaaatgaaaatattgccttgccatttctgaacaaagaaaactgaattgtaaagataatcccttttgaagaatgacttgacacttccactctaggtagatcctccaaatgagtagagttgaagtcaaggacctttctgacataatcaagcaaattagacatcgagtggtggctttgtggtatctggacaattcataacatgtaaataatgtggga

SEQ ID NO: 185771 - DNA, 1879 bp, Homo Sapiens
ttggcaccacagggtcgctccacaaggctgtggtaagtggggacagcagtgctcatctggtggaagagattcagctgttccctgaccctgaacctgttcgcaacctgcagctggcccccacccagggtgcagtgtttgtaggcttctcaggaggtgtctggagggtgccccgagccaactgtagtgtctatgagagctgtgtggactgtgtccttgcccgggacccccactgtgcctgggaccctgagtcccgaacctgttgcctcctgtctgcccccaacctgaactcctggaagcaggacatggagcgggggaacccagagtgggcatgtgccagtggccccatgagcaggagccttcggcctcagagccgcccgcaaatcattaaagaagtcctggctgtccctaactccatcctggagctcccctgcccccacctgtcagccttggcctcttattattggagtcatggcccagcagcagtcccagaagcctcttccactgtctacaatggctccctcttgctgatagtgcaggatggagttgggggtctctaccagtgctgggcaactgagaatggcttttcataccctgtgatctcctactgggtggacagccaggaccagaccctggccctggatcctgaactggcaggcatcccccgggagcatgtgaaggtcccgttgaccagggtcagtggtggggccgccctggctgcccagcagtcctactggtcccactttgtcactgtcactgtcctctttgccttagtgctttcaggagccctcatcatcctcgtggcctccccattgagagcactccgggctcggggcaaggttcagggctgtgagaccctgcgccctggggagaaggccccgttaagcagagagcaacacctccagtctcccaaggaatgcaggacctctgccagtgatgtggacgctgacaacaactgcctaggcactgaggtagcttaaactctaggcacaggccggggctgcggtgcaggcacctggccatgctggctgggcggcccaagcacagccctgactaggatgacagcagcacaaaagaccacctttctcccctgagaggagcttctgctactctgcatcactgatgacactcagcagggtgatgcacagcagtctgcctcccctatgggactcccttctaccaagcacatgagctctctaacagggtgggggctacccccagacctgctcctacactgatattgaagaacctggagaggatccttcagttctggccattccagggaccctccagaaacacagtgtttcaagagaccctaaaaaacctgcctgtcccaggaccctatggtaatgaacaccaaacatctaaacaatcatatgctaacatgccactcctggaaactccactctgaagctgccgctttggacaccaacactcccttctcccagggtcatgcagggatctgctccctcctgcttcccttaccagtcgtgcaccgctgactcccaggaagtctttcctgaagtctgaccacctttcttcttgcttcagttggggcagactctgatcccttctgccctggcagaatggcaggggtaatctgagccttcttcactcctttaccctagctgaccccttcacctctccccctcccttttcctttgttttgggattcagaaaactgcttgtcagagactgtttattttttattaaaaatataagggcttatgtatgatgggtgctgtgtttgctggagcagagtgctccggcagagaattgctgggatgtcaagggagcaagcagtccaagcacatcagttgggaggaggactagtttgtggggggattgttctctccaactccagactacctcctctgccctg

SEQ ID NO: 185772 - DNA, 1233 bp, Homo Sapiens
  misc_feature (84)..(118): n is a, c, g, or t
ttggctctccgaatgctgcgcaccgcgatgggcctgaggagctggctcgccgccccatggggcgcgctgccgcctcggccaccnnnnnnnnnnnnnnnnnnnnnnnnnnnnnnnnnnnagccgccgcctccgacctgggcgctcagcccccggatcagcctacctctgggctctgaagagcggccattcctcagattcgaagctgaacacatctccaactacacagcccttctgctgagcagggatggcaggaccctgtacgtgggtgctcgagaggccctctttgcactcagtagcaacctcagcttcctgccaggcggggagtaccaggagctgctttggggtgcagacgcagagaagaaacagcagtgcagcttcaagggcaaggacccacagcgcgactgtcaaaactacatcaagatcctcctgccgctcagcggcagtcacctgttcacctgtggcacagcagccttcagccccatgtgtacctacatcaacatggagaacttcaccctggcaagggacgagaaggggaatgtcctcctggaagatggcaagggccgttgtcccttcgacccgaatttcaagtccactgccctggtggttgatggcgagctctacactggaacagtcagcagcttccaagggaatgacccggccatctcgcggagccaaagccttcgccccaccaagaccgagagctccctcaactggctgcaagacccagcttttgtggcctcagcctacattcctgagagcctgggcagcttgcaaggcgatgatgacaagatctactttttcttcagcgagactggccaggaatttgagttctttgagaacaccattgtgtcccgcattgcccgcatctgcaagggcgatgagggtggagagcgggtgctacagcagcgctggacctccttcctcaaggcccagctgctgtgctcacggcccgacgatggcttccccttcaacgtgctgcaggatgtcttcacgctgagccccagcccccaggactggcgtgacacccttttctatggggtcttcacttcccagtggcacaggggaactacagaaggctctgccgtctgtgtcttcacaatgaaggatgtgcagagagtcttcagcggcctctacacgaggtgaaccgtgagacacagcagtggtacaccgtgacccacccggtgcccacaccccggcctggagcgtgcatcaccaacagtgcctgggaaagga

SEQ ID NO: 185773 - DNA, 928 bp, Homo Sapiens
  misc_feature (283)..(337): n is a, c, g, or t
aaaaagggtaaagggttgctttaaaaaaaatatgggaagactgtacacatgcagaaacaaagttagtgggagggagtgctctgctgggtcaacacgccatgaaccacacccctattcgtgctacatgaggctgagtccttgctacaaccacacagaaatacagacaatcaagtgaacctgagcacccccagggataacagaagaaaaatacagagaagcagaggagagaaagaatggcagcaagaggcagatcacagaataccagggaacacctagtccaaannnnnnnnnnnnnnnnnnnnnnnnnnnnnnnnnnnnnnnnnnnnnnnnnnnnnnnatacatagtttatgggagcattagaactccatgcttccttttaatgtgagcaaggaaaaaaagagattgacaagaaattgataggcctgctaaggcaggagacagacccaggcctctcattccagttctgttgtctttttggaagagtgcctatgaggtcattaaggcctttctgggtgttttcttgattctcaagagtcagggttctgggtggctctgggacagagggatccaaagaaacagccaggccacctgatcaggacagaagacaatggcctctaatctgttcccaaactagatctgaaacagtcacaataagctaagaatagaaattcagccatctctgaatcaaacaccatcacctaaatggtggcagaaagaaaagtcaccgagctgataatctgctgtaggctgaaaactggaataaatttccaaagcgcactctcttttctctctagcttgaggcaggtattcaataaatacttgaatgaacaagtgaataaatgaatacatggagaccatcgatgaatgttcagttccatgacagatactggttctgttcaagatccatgccgaggacacttttgccaa

SEQ ID NO: 185774 - DNA, 2175 bp, Homo Sapiens
  misc_feature (423)..(459): n is a, c, g, or t
ggttttgcctttgataaggttcctggtaaaaatcatctgaataaatgttgctgagaaactggtaaagcattcgggggagaaaggattttgctctttgctctgccatgtttttccgggctctttcttcggggagaaagagggctctaactttggtctcattcagataggctaattaggggtctcgggtgtccccaaagggcagcaactttgacccctccccttgtgggtaaaagggcttttcacagtttcccagcagttggtttttggtttccacataaggctaaaggtgttaaagtttggtctgcacctcgttggttttaatccagggaggagctcctggatttctttttctcccccacagagggaaaccttttgtttgcggtgggccagagttaaaacggggcctttaccactcactcagannnnnnnnnnnnnnnnnnnnnnnnnnnnnnnnnnnnnaagtggcgactggcatctggtatgtcatgaattgagacctataatgatttgccagggtgtcttggctctggcctgagtcgggtatgtgaaagccttttggggcaggaaggggcaaagtgatacctggccgtcccaccctctggtcccagaaggagctctcgctggagccaggcagcctccagtccccctcctttcagccttgtcattctctgcatcctgcccaggccacaaaggagttatctggggctgaacccctctccttccacagcagaggaccaggggtctcctccctctgaccagcctccagtctggggagctgtgttttcctttttcttaagctaactcctgatcccattgagggacatcaagggcagtagtttgaagaaagcctcatccttggccctgcttttccgggaagccgaccttccctctaccctggtggtgccatcattagggcgtgtggccgaaggaggcaaattgttaggtgcaatcaggaagccgtgtctgcatcccatggctgagggacagccaggatgacacttaggctgtctctcactccatcctctttggggagtctgggatgctctcagagagcggggtgaagcccagcaggaggacatgtctctcgtaggccttggtctgcttgaacatggtgtcagtcccatggaggtggtccagcacacccagcaccccatagcactggttgaacttgagatggtggtagtcgtggaattcaggcgaaggcaggaagggaaggtggtagccacagtgggagatggtggtgatgatgagggccaaggaaaaccacatggtgatggaggacaagtgggagcccattactaatgggcccactatcaccggtagcatgttggagactgcatgctctatagggtgggcatagagagagatcacgccaatgggagctgtccactcatggtgtttcttgtggattttcttgtagaatgttgggtggtgaaggagccggtgtgaatagtagaacaagacttcctcgatcagcgtgaagatggccagctccaggaggaaccagtggaaggtgggtagctcacggcggcaggggtctctccaccatttgaggaagggatagaggaagaccaccatggggaaagatatcatgcactggttgaaaagaactgtgcggatagactggcgcagtttcacaggatccacaggttcattcttgccgacctgaattcggtagcgagagatgaagttaggttttcctgttgtgtcaaccaccaatagaagcccattgaagctccagaagaagagacaaggcacttggatggcacctataaagaagaggatccactccttcccttcaaatgtagtcagcagcctctcccactgggcttgccaaaagtagccagaagcaccccaaaatctctgaagatgccatgtcactgagttccagaaggccacaaatgagagaagtccagagcccaggatgaaagctgtcctcctcatagagccccagatgtgtccctcctgctttgacttttcattgtgtagcatatgtccagcttctcctttcatctctgcagtgggctgtgtccaagctgctgaggtccttgcacaggtcaaatctaagttctcttccctttcagcccccgctttggtggctgttgctgctgcggctctgctgcaggctaaccccaacttttttgtacaaagttggctataatagaaaaagcattg

SEQ ID NO: 185775 - DNA, 2822 bp, Homo Sapiens
  misc_feature (2318)..(2329): n is a, c, g, or t
  misc_feature (2361)..(2396): n is a, c, g, or t
  misc_feature (2537)..(2554): n is a, c, g, or t
aactttgtacaaaaaagttggggcattgaagaccactaagatcggaagatgagtgagcttgaccagttacggcaggaggccgagcaacttaagaaccagattcgagacgccaggaaagcatgtgcagatgcaactctctctcagatcacaaacaacatcgacccagtgggaagaatccaaatgcgcacgaggaggacactgcgggggcacctggccaagatctacgccatgcactggggcacagactccaggcttctcgtcagtgcctcgcaggatggtaaacttatcatctgggacagctacaccaccaacaaggtccacgccatccctctgcgctcctcctgggtcatgacctgtgcatatgccccttctgggaactatgtggcctgcggtggcctggataacatttgctccatttacaatctgaaaactcgtgaggggaacgtgcgcgtgagtcgtgagctggcaggacacacaggttacctgtcctgctgccgattcctggatgacaatcagatcgtcaccagctctggagacaccacgtgtgccctgtgggacatcgagaccggccagcagacgaccacgtttaccggacacactggagatgtcatgagcctttctcttgctcctgacaccagactgttcgtctctggtgcttgtgatgcttcagccaaactctgggatgtgcgagaaggcatgtgccggcagaccttcactggccacgagtctgacatcaatgccatttgcttctttccaaatggcaatgcatttgccactggctcagacgacgccacctgcaggctgtttgaccttcgtgctgaccaggagctcatgacttactcccatgacaacatcatctgcgggatcacctctgtctccttctccaagagcgggcgcctcctccttgctgggtacgacgacttcaactgcaacgtctgggatgcactcaaagccgaccgggcaggtgtcttggctgggcatgacaaccgcgtcagctgcctgggcgtgactgacgatggcatggctgtggcgacagggtcctgggatagcttcctcaagatctggaactaacgccagtagcatgtggatgccatggagactggaagaccattccaacttggacgcgttaccatgagagcatatcctatccaaccgtactaacgtggacaccctacacctcccctcagaacttcaaaagggcaagatcttttttccttcacttattgctgaaaccaagagcacaattcccattgagagaaagatctctgtgctgtaaactaaaacaaattgtgcattccttccggggccatcgtctttgttttcttttttgtcttgaatgaattttaaaaggaaatatataataaaaatgttaaccagaaggtaaacttgagtgtaattgtcagacagacacacttttccaccagtgtatttgaattttagaccagtgaccctgttttgtggcattcatgcaaaacatgctgagggctttgttcatctggtcatcgtgtccaaatttcagtcatgtttgtagcaagattttggaagcattcatatttcctttttaaaatgtattcctttgtgttcaacagttaatcaaaaccagagagtctagggcagcctctctgatgttgtcaatgatgtaaattcagtccctggtttttaattttctgtctgatgtcacagatcattgttgcacacaaacgtggcatagaaaagaacatgttcagaagccatggggccaagcacatgcggggacggtctcaaatgcgtgatcagagaatccttcacctttgctgaaaagtgagctcagatccagcaccatgttcctcctgacccatcctgtctatcttctcagttgagtttttaatctcactttgggtttccttgtgaagttggagggaagtttataatagcctaacactaccccacccccactaggaggaacctctgttttcaagagagatgcctgtcctgtgcttggatagtcagtcaattatttgtgtatgaaacaatgtacaaatcaatgttttgaaaataatgatctcagactttctaagttaaattttaaaaattttgattgtttgccatattgggtgggtttactcttagaatcgcatgctgtagaaatgctcaaaagtgcatatgggactcagtccttaggtgttctttttcttttaagaaataacctcttacagttgtaaccattgcggctctgtccacttctcgttgctgctctgtggcacatatcggaagcagtacagcgcgcggctctacacgcttgggtagcgggataagtcactgttttctttatttctttnnnnnnnnnnnngttctgttgcaaacgactgctgttggattctnnnnnnnnnnnnnnnnnnnnnnnnnnnnnnnnnnnntgaagagcctgccctcctatatggattcttcagggccctccacatctgaggtggctcattcccatcacacacagattgtcctggtgttcatttcaaggccagtgttcagcagcagcgtttggaaagcaggttctgtgggannnnnnnnnnnnnnnnnngcactccttcatagcagcagtagtggcttctccatcctgttttctgcaacattctatacaaaactgtgctgtgaccttgcggtaggcctggatctggcaaagagaatacaaatgaaaccccttctttctctttccgtccaacaactctgtagagctctctgcacccttacccctttccaccttttgtatttaattttaaagtcagtgtactgcaaggaagctggatgcaagatagatactatattaaactgtactgttatttaagatg

SEQ ID NO: 185776 - DNA, 1268 bp, Homo Sapiens
  misc_feature (470)..(479): n is a, c, g, or t
  misc_feature (828)..(846): n is a, c, g, or t
gagcaatgctttactataaaagaggcaactttgtacaaaaaagttggctaccctttcctcttataaagtaattaaaataaatctacataaagaaccaaaaaggctgttttataaaagtgaaatatccagtatttcagagggccaggcaagagcacttcagatgaggcagtcaaaatcatttttttccagtgaggatagaccacaagtgggtggtgagaccattgaaagcctttatcaactgaagagtccatttaacagcataatttgtgggaagactggaatagggctgaataaatgtgtttgaatctctaattttatactttcttttcctgaggaacttgatttttctgtccctggatcgccttgtcataattgggtctgttccttttactaccactcttgagtccatatatgaaatcattaaagttggatgatcagttttttataaaaatatatatttttgtccaagnnnnnnnnnngcatacatatgtgattatggctaaatcaaaggtaactggaatgtatatacttttgctaatgttccagcaacactgctattatactatccaaatttttattgtaacaaaacctctttaagcaattggtgattgccatgggacttttcccatgtcttctgctgtaattatcctgtgcagaactaggaagaaatttttttcaggactgctctatggtttcctttaaaagaaaaaaacttctgtttgtttttagcagtcattatttacaatttgcagtgattaacttggcaaggcttccttccgtgtttatccctgtagccatcatttaagtcaggaacagtcagaaaaatannnnnnnnnnnnnnnnnnngggtgtctgcaaaggtaaaaatccattaaaaccttaagttaaatataaatgttacaactcaatgtttgcttttagattttatacagtatttgttttgttttggttttgagtgtatataatgcagcattagcaatatggttccaatagaggagttaaatatatattgttaaaggagacctgtagcagtcaaagattttattgatttaatgacaaaggaaattaatgaaaatgtttttgtttttctgctgtaattctgcattaagctcacatgaaaatcatgattctagagtttggaatgcaaaaattaattgttttaccctcaagctgggaatatttttcaaaaataaaatactataatatagatatcaaattattacctccccatgttatggttgaaaatttttttattaaattgataaaac

SEQ ID NO: 185777 - DNA, 2867 bp, Homo Sapiens
  misc_feature (2548)..(2557): n is a, c, g, or t
ttggcgtgtcaccggcggcgccgctgctgtggcaaaggaaggagctgactgggggagttcgaggcggcgggcggcggtgaccccggcctggaactgccccggtacggaagtgttccggggtccgtggggagcaggagagggaggcggcggaccgtcccgcgcggggcacgatgttgaacatgtggaaggtgcgcgagctggtggacaaagccaccaatgttgttatgaattattcagagatcgagtctaaggttcgagaggcaacgaacgatgatccttggggaccttctgggcaactcatgggagagattgccaaggctacatttatgtatgaacaatttccagaacttatgaacatgctttggtcacgaatgttaaaagacaacaaaaagaattggagaagagtttataagtcgttgctgctcctagcttacctcataaggaatggatcagagcgtgttgttacaagtgccagagaacacatttatgatttacgatccctggaaaattaccactttgtagatgagcatggtaaggatcaaggtataaatattcgacagaaggtgaaggaattggttgaatttgcccaggatgacgacaggcttcgtgaagagcgaaagaaagcaaagaagaacaaagacaagtatgttggggtttcctcagacagtgttggaggattcagatacagtgaaagatatgatcctgagcccaaatcaaaatgggatgaggagtgggataaaaacaagagtgcttttccattcagtgataaattagtgagctgagtgataaaattggaagcacaattgatgacaccatcagcaagttccggaggaaagatagagaagactctccaaaagatgcagcgacagcgatgaggaaaagaaagcgagaagaggcagatctcccaaaggtgaattcaaagatgaagaggagactgtgacgacaaagcatattcatatcacacaggccacagagaccaccacaaccagacacaagcgcacagcaaatccttccaaaaccattgatcttggagcagcagcacattacacaggggacaaagcaagtccagatcagaatgcttcaacccacacacctcagtcttcagttaagacttcagtgcctagcagcaagtcatctggtgaccttgttgatctgtttgatggcaccagccagtcaacaggaggatcagctgatttattcggaggatttgctgactttggctcagctgctgcatcaggcagtttcccttcccaagtaacagcaacaagtgggaatggagactttggtgactggagtgccttcaaccaagccccatcaggccctgttgcttccagtggcgagttctttggcagtgcctcacagccagcggtagaacttgttagtggctcacaatcagctctaggcccacctcctgctgcctcaaattcttcagacctgtttgatcttatgggctcgtcccaggcaaccatgacatcttcccagagtatgaatttctctatgatgagcactaacactgtgggacttggtttgcctatgtcaagatcacagaatacagatatggtccagaaatcagtcagcaaaaccttgccctctacttggtctgaccccagtgtaaacatcagcctagacaacttactacctggtatgcagccttccaaaccccagcagccatcactgaatacaatgattcagcaacagaatatgcagcagcctatgaatgtgatgactcaaagttttggagctgtgaacctcagttctccatcgaacatgcttcctgtccggccccaaactaatgctttgatagggggacccatgcctatgagcatgcccaatgtgatgactggcaccatgggaatggcccctcttggaaatactccgatgatgaaccagagcatgatgggcatgaacatgaacatagggatgtccgctgctgggatgggcttgacaggcacaatgggaatgggcatgcccaacatagccatgacttctggaactgtgcaacccaagcaagatgcctttgcaaatttcgccaattttagcaaataagagattgtaaaagaagcagattgaatgaagaatttttagctgtgcagataggtgatgttgggatggaaaatgctaatcaactaccctttcttttatcaagtaattaaaataaatctacataaagaaccaaaaaggctgttttataaaagtgaaatatccagtatttcagagggccaggcaagagcacttcagatgaggcagtcaaaatcatttttttccagtgaggatagaccacaagtgggtggtgagaccattgaaagcctttatcaactgaagagtccatttaacagcataatttgtgggaagactggaatagggctgaataaatgtgtttgaatctctaattttatactttcttttcctgaggaacttgatttttctgtccctggatcgccttgtcataattgggtctgttccttttactaccactcttgagtccatatatgaaatcattaaagttggatgatcagttttttataaaaatatatatttttgtccaagnnnnnnnnnngcatacatatgtgattatggctaaatcaaaggtaactggaatgtatatacttttgctaatgttccagcaacactgctattatactatccaaatttttattgtaacaaaacctctttaagcaattggtgattgccatgggacttttcccatgtcttctgctgtaattatcctgtgcagaactaggaagaaatttttttcagactgctctatggtttcctttaaaagaaaaaacttctgtttgtttttagcagtcattatttacaatttgcagtgattaacttggcaaggcttccttccgtgtttatccctg

SEQ ID NO: 185778 - DNA, 1650 bp, Homo Sapiens
  misc_feature (261)..(405): n is a, c, g, or t
ttggcctgaggctgaggcgcccggcctcccgcccgccgcgctccagatgaagtgtgagcactgcacgcgcaaggaatgtagtaagaaaacaaaaactgatgaccaagagaatgtgtcagccgatgcaccgagtccagcccaggaaaatggagaggcaagtagatttttcagttttgtatcagcccagagtaaactactgctgctgtttttctctttgggggctcacagcaccgtgcacatcactgctttaaagaagactgnnnnnnnnnnnnnnnnnnnnnnnnnnnnnnnnnnnnnnnnnnnnnnnnnnnnnnnnnnnnnnnnnnnnnnnnnnnnnnnnnnnnnnnnnnnnnnnnnnnnnnnnnnnnnnnnnnnnnnnnnnnnnnnnnnnnnnnnnnnnnnnnnaagggagaattccacaagttggctgatgccaagatatttttgagcgactgcctggcatgtgacagctgtatgactgcagaggaaggagtccaactttcccagcaaaatgccaaggacttcttccgcgttctgaaccttaacaagaaatgtgatacctcaaagcacaaagtgctggtagtgtctgtgtgtcctcaatctttgccttattttgctgctaaattcaacctcagtgtaactgatgcatccagaagactctgtggtttcctcaaaagtcttggggtgcactatgtatttgatacgacgatagctgcggattttagtatcctggagagtcaaaaagaattcgtgcgtcgctatcgccagcacagtgaggaggaacgcaccctgcccatgctgacctctgcctgtcctgggatgctcccatttcccagtagcctccaggcctgcaggttcccatgacccacagccgggccaccgaggacgggttttgggtccagcacgagctcctggctgggtccgatacgccgagcgggtgctgggtcgccccatcactgcccacctctgcaccgccaagtccccccagcaggtcatgggctctttggtgaaggattatttcgccagacagcaggtcttccacgtgctgccctctcccctggatggagcccagagctatgtgtcctcctgtaggtgccatgaggggcagccgcagagacccggcctccagcagcctctcacctgaccacctggcacagctgcaaccaggggttcaggaggaaatgggctcagccttcccggttcttccaggaggctccactggctggggggctttgcagatgtttgggaggaccacacccagtcctgagggaggcagcagacagacatggatggagtgctggtgctcgaacctgtctccagagaagattttccacgtcattgtggccccttgttatgacaagaagctggaggctcttcaggaaagccttccccctgctttgcatggctcccggggcgctgactgcgtgttaacatcaagtgaaattgctcaaataatggagcaaggtgacctctcagtgagagatgctgccgtcgacactctgtaagtggcttctctggggagagtcctctggggggcaggacctctcgtcagccctgccagccacctgccaggcccagggctgccctgctttatgacgaggccatgtgaaagcactgcgatgcagtcccccaggcccctgcaacaccctc

SEQ ID NO: 185779 - DNA, 1533 bp, Homo Sapiens
  misc_feature (1260)..(1295): n is a, c, g, or t
ataaagcaggcagccctgggctggcaggtggctggcagggctgacgagaggtcctgccccccagaggactctccccagagaagccacttacagagtgtcgacggcagcatctctcactgagaggtcaccttgctccattatttgagcaatttcactgatgttaacacgcagtcagcgccccgggagccatgcaaagcagggggaaggctttcctgaagagcctccagcttcttgtcataacaaggggccacaatgacgtggaaaatcttctctggagacaggttctgctgtctggcgaaataatccttcaccaaagagcccatgacctgctggggggacttggcggtgcagaggtgggcagtgatggggcgacccagcacccgctcggcgtatcggacccagccaggacaggcagaggtcagcatgggcagggtgcgttcctcctcactgtgctggcgatagcgacgcacgaattctttttgactctccaggatactaaaatccgcagctatcgtcgtatcaaatacatagtgcaccccaagacttttgaggaaaccacagagtcttctggatgcatcagttacactgaggttgaatttagcagcaaaataaggcaaagattgaggacacacagacactaccagcactttgtgctttgaggtatcacatttcttgttaaggttcagaacgcggaagaagtccttggcattttgctgggaaagttggactccttcctctgcagtcatacagctgtcacatgccaggcagtcgctcaaaaatatcttggcatcagccaacttgtggaattctcccttctctccattttcctgggctggactcggtgcatcggctgacacattctcttggtcatcagtttttgttttcttactacattccttgcgcgtgcagtgctcacacttcatctggagcgcggcgggcgggaggccgggcgcctcagcctcagggaagcaccgggagactgggacaccactgcccgccgcccgcggccctttgttgccctcccccgacgcggcctcacccccaacggccgcgctcggccaatgagagcaccgggagaggacaagccgcacccctgggccaataggattccccacccttacggctttgcctaggccaatgacagtgtcgggaaggggcgggccaggccccagagccaatcggagcgcgcggggcggaccgcaggctcactccacgtacggcgccggggggaccgggtccttgcgccggtttccgcttctnnnnnnnnnnnnnnnnnnnnnnnnnnnnnnnnnnnnttcaccagggagtcggtgagcgcgcggactgtcccgaggccaagctggggccgttccagggtgctcggtccggtggtcacggggcctggaggcccctgggcccgcggaggccgcggccgggctctgtcagccagctcggcgttggacactcgccttactcgcggctcctaacggggcgggccgggggcacagccctcgtccgccgccattgccacttgacgtcgtgtcacgtagccaa

SEQ ID NO: 185780 - DNA, 1986 bp, Homo Sapiens
  misc_feature (1549)..(1558): n is a, c, g, or t
  misc_feature (1785)..(1798): n is a, c, g, or t
agcaatgctttactataaaaggcaactttgtacaaaaaagttgggtcccggtataccacagaatttcatgagctagagaaaatcggctctggagaatttggttctgtatttaagtgtgtgaagaggctggatggatgcatttatgccattaagcgatcaaaaaagccattggcgggctctgttgatgagcagaacgctttgagagaagtatatgctcatgcagtgcttggacagcattctcatgtagttcgatatttctctgcgtgggcagaagatgatcatatgcttatacagaatgaatattgtaatggtggaagtttagctgatgctataagtgaaaactacagaatcatgagttactttaaagaagcagagttgaaggatctccttttgcaagttggccgaggcttgaggtatattcattcaatgtctttggttcacatggatataaaacctagtaatattttcatatctcgaacctcaatcccaaatgctgcctctgaagaaggagacgaagatgattgggcatccaacaaagttatgtttaaaataggtgatcttgggcatgtaacaaggatctccagtccacaagttgaagagggcgatagtcgttttcttgcaaatgaagttttacaggagaattatacccatctaccaaaagcagatatttttgcgcttgccctcacagtggtatgtgctgctggtgctgaacctcttccgagaaatggagatcaatggcatgaaatcagacagggtagattacctcggataccacaagtgctttcccaagaatttacagagttgctaaaagttatgattcatccagatccagagagaagaccttcagcaatggcactggtaaagcattcagtattgctgtccgcttctagaaagagtgcagaacaattacgaatagaattgaatgccgaaaagttcaaaaattcacttttacaaaaagaactcaagaaagcacagatggcaaaagctgcagctgaggaaagagcactcttcactgaccggatggccactaggtccaccacccagagtaatagaacatctcgacttattgggaaagaaaatgaaccgctctgtcagcctttactatatactgagctactcctttcccacctccccctgaacactgtgacaagaggaagctaggttgaaatcactgatagaatccagtttgcaattactttctcgattggtgtcagtagttttactgattaggacttttattgtgaattacagttgaaagctgtattttgatgattgctatgtcaggctttcatctaatcttaccagtctgtcttctgtaggatgtgtcactgttggatgttacaccagcctttccagggttaaccactgtggtggtgtgctgcttatagtttgctgttgcattgtaataaaaggtgtctttccctgtagtgacctgtaaaaagtactcaagggctttattacagacataccctccctttgaaaagggacatgctaaaagactcattactactcagccttcaatgtacctgtgtgtccatcttatatttcnnnnnnnnnnaattgtgaattagacttgtatatcccactgggagcactttgtaggcattgcatgaaccatgggatgatgattctgtggaggtattgccttgtgaatttgctgctattttagttttgtctttgctgtaaacttgtagcattaaacaatcattgttgttaataggtcttctttttgaaacaattatgtgaaatgtatagctgcttttgatgaaaagcagctatttgccnnnnnnnnnnnnnncctttgaactttgaagctagtgcattggaaaaatgcaccctttccctcctttggaatgctgtattaatgtagtataataattactggttttgtaacttgttctggtaatgtccttcccggactctttttaaatgtctccccctaagttttatacttgattgtattattagtctgtttttaaatgtttt

SEQ ID NO: 185781 - DNA, 1574 bp, Homo Sapiens
ggagcccatctggatcagtgccatcttgcggtcttctggaagaacttgaatcctttgacgacgcccccattgctggaaaacaggaccttgagatcctcctcggagactgagagcgggatgttggagaggtgcagcgtggccgagggcgggaatatgttctggaagttcttggagcccggcttcttgaagcggtgcaggggtgagttgccgtagtccttggtcaggccctggtcctcctggccctcgcggggcagctgcacgttctggtgcttcgagagcgtgatgcggatgggcttcccgtgcagcttgtgcccgttcaggtggctcatggccagctgggcctggttgccgtccgccatctgcactagggcgttctccttcttattgaacaggatcttcacgcgctgcacgtcaccgtagacgccgaaaagaataaagaggctttggggtgtgactctctctgggttgaggttgctgaccagcaatacagaatttcctgcccccgccaggcccgggatggcgatccgacctgccgccgcagctgccgccgccgccgaggggatggccaggggggccagggcgccgtggacgttcggaacggaaaggccgaaggccgcggccatggtctggtccagcgagggctggctgtccccggaaggcaggtctgggcgtgtgtagtcacggctcttgtcattgttgtacttgacgttgaggctggtgagcttggaaaagtcgatgcgcagcgtgcagcaggcgttgtagatgttctgcccgtccagcgacagcttggcgtgctgggcgctcacggggtccgcatactgcagcagggcctggaactggttgttcttggtgaaggtgatgatcttcaacactgtgccgaacttggagaaaatctggtgcagcacatccagggtcacagggtagaagaggttctccacgatgatcctgagcacggggctctgcccggccatcgccatccctgcgtccacggccgccgccgaggcagccaaggccaggttccccgactggaccgagttcaccgcctgcagggccgcctgggcccgcgcctggttgggagagctgtcggtcttcagctccttgtggttggagaactggatgtagatgggctggccgcgcagcacaggggtcaccgaggtgtagtagttcaccatggtattggcagcctcctccgtgttcatctcgatgaaggcctggtttttccccttcagcatcaggaggttggtgaccttcccaaagggcagccccagggagatgacttccccctccgtgacgtcgatggggagcttccggatgtggatcactctagaggggacgcctgcacttcggctgtcacctttgaacttcttgctgtcatttccgtttgctgcagaagccgagttgctgctcatgataaacggtccgttagtgacacaagtagagaaaagctcgtcagatccccgctttgtaccaacggctatatctgggacaatgccgtccatggcacacagagcagacccgcgggggacggagtggaggcgccggaatagcaggaacccaacttttttgtacaaagt

SEQ ID NO: 185782 - DNA, 2220 bp, Homo Sapiens
gactggccaacctgcctttacagcgtccacagcgaacacagggctagacaagggaggagtttctcaaacggtttaatcggttctctccgcgtcacaagccatcgggtaaggcaacggaatgtgcgtggggtcccctgtggctccgcggtcacaatactgagcctggaattgctgttagcaaaatatacatttgtgtcaccataaaaaaccgcgccgccgcccctcgggtctcacaacaggtataaaaaattataaatatttacacccttgttacacgcttttacggaaaggggatcctaggagagcccccgggacaggacgcgggggcggtagaaagagcacagagaagacaggaggagcgcccgccttccgggtcccagcatcagaggcaggcaaaacacagaaatgagactttggtccaaaatttgaaggaagaaaaaaccctgaagtttgagagcaagttttctaggcgactgcaggtgaaggcgtggtgtaaggcaaccggaggcgatgccagaggcggcgacacgcccgccccttccctgaagctcaggggctctaagataggaccggggctccctgtgcctgacccactgggcggccccgcctgctctctggaaactgggtcctgcctgtgacttaattacaaggaataaaataaaagtaacagcatacaaggtaataccacaaggaagtttagattacactcataccattgtatcatcttgctataaaaagttacttaaaactatttcttttgcatataaatgaaaaaagattagaatatttggtcaactggaaatattgctaggcacagacgtctgcaactgcaaagtatataatacagagattatgtcgaccagctccgcagctggagcagcggggagcccgcctgggggcagaagggaaggccctgggggcggggtgaagggagaatcacgtgacttgattagagggctggggttggggtgtcgcagccgcggccgccgcgccccagctgcatgatcctgcaggagccggccaggccccctgcctctctctggtgtgacccccccaccccttgggtccccaggacaccccgggtgggtgtgtggctgcaggaaggcaggttttttaaggcacaaggaagccaagtcgtggtcggggcgcccacctgcaggccccacgcccgacacaggccccaccaaggcatggccccgagggtctggccccgggtgtggagggccgggaactcccgctgccacagtcaccaagagcctgagctgtccctgtcaccgcagggtgagcaaggtgaactagatttaatttttttaaaaacaggtaaactgatttctctttaaaaaaataaaatctctggtctgctaaggtcacttcagctgtttttaaagtggcttttctctggaatgatggaagttgtcgccagggggcccggccgtgggggcctgtgcccctagatggtggacttggagaaggagacccgcaggtggtggttctccccgaggtcgtggttgtgcaggtcaatgagggcctggaccgcctcctccacggagcccatctggatcagtgccatcttgcggtccttctggaagaacttgaatcctttgacgacgcccccattgctggaaaacaggaccttgagatcctcctcggagactgagggcgggatgttggagaggtgcagcgtggccgagggcgggaatatgttctggaagttcttggagcccggcttcttgaagcggtgcaggggtgagttgccgtagtccttggtcaggccctggtcctcctggccctcgcggggcagctgcacgttctggtgcttcgagagcgtgatgcggatgggcttcccgtgcagcttgtgcccgttcaggtggctcatggccagctgggcatggttgccgtccgccatctgcactagggcgttctccttcttattgaacaggatcttcacgcgctgcacgtcaccgtagacgccgaaaagaataaagaggctttggggtgtgactctctctgggttgaggttgctgaccagcaatacagaatttcctgcccccgccaggcccgggatggcgatccgacctgccgccgcagctgccgccgccgccgaggggatggccaggggggccagggcgccgtggacgttcggaacggaaaggcctgcagcttgaggaatggcaaaggtgggagggaaagccagctcctgcccaacttttttgtacaaag

SEQ ID NO: 185783 - DNA, 1795 bp, Homo Sapiens
gccaactttgtacaaaaaagttggcccagatatagccgttggtacaaagcggggatctgacgagcttttctctacttgtgtcactaacggaccgtttatcatgagcagcaactcggcttctgcagcaaacggaaatgacagcaagaagttcaaaggtgacagccgaagtgcaggcgtcccctctagagtgatccacatccggaagctccccatcgacgtcacggagggggaagtcatctccctggggctgccctttgggaaggtcaccaacctcctgatgctgaaggggaaaaaccaggccttcatcgagatgaacacggaggaggctgccaacaccatggtgaactactacacctcggtgacccctgtgctgcgcggccagcccatctacatccagttctccaaccacaaggagctgaagaccgacagctctcccaaccaggcgcgggcccaggcggccctgcaggcggtgaactcggtccagtcggggaacctggccttggctgcctcggcggcggccgtggacgcagggatggcgatggccgggcagagccccgtgctcaggatcatcgtggagaacctcttctaccctgtgaccctggatgtgctgcaccagattttctccaagttcggcacagtgttgaagatcatcaccttcaccaagaacaaccagttccaggccctgctgcagtatgcggaccccgtgagcgcccagcacgccaagctgtcgctggacgggcagaacatctacaacgcctgctgcacgctgcgcatcgacttttccaagctcaccagcctcaacgtcaagtacaacaatgacaagagccgtgactacacacgcccagacctgccttccggggacagccagccctcgctggaccagaccatggccgcggccttcggtgcacctggtataatctcagcctctccgtatgcaggagctggtttccctcccacctttgccattcctcaagctgcaggcctttccgttccgaacgtccacggcgccctggcccccctggccatcccctcggcggcggcggcagctgcggcggcaggtcggatcgccatcccgggcctggcgggggcaggaaattctgtattgctggtcagcaacctcaacccagagagagtcacaccccaaagcctctttattcttttcggcgtctacggtgacgtgcagcgcgtgaagatcctgttcaataagaaggagaacgccctagtgcagatggcggacggcaaccaggcccagctggccatgagccacctgaacgggcacaagctgcacgggaagcccatccgcatcacgctctcgaagcaccagaacgtgcagctgccccgcgagggccaggaggaccagggcctgaccaaggactacggcaactcacccctgcaccgcttcaagaagccgggctccaagaacttccagaacatattcccgccctcggccacgctgcacctctccaacatcccgccctcagtctccgaggaggatctcaaggtcctgttttccagcaatgggggcgtcgtcaaaggattcaagttcttccagaaggaccgcaagatggcactgatccagatgggctccgtggaggaggcggtccaggccctcattgacctgcacaaccacgacctcggggagaaccaccacctgcgggtctccttctccagtccaccatctaggggcacaggcccccacggccgggccccctggcgacaacttccatcattccagagaaaagccactttaaaaacagctgaagtgaccttagcagaccagagattttattttttt

SEQ ID NO: 185784 - DNA, 1380 bp, Homo Sapiens
  misc_feature (1092)..(1145): n is a, c, g, or t
ttggcagaaatatctaaaaccttttccgtagactttgaaacatctctctctctcataactccctggattcaagtagcacattggtaataggtatcagagcagtctagagacaattgcatgtcaaaaaatgtacattcatttttaggtggataaaagtaaacatagaaattatgttatggctaaatacagttagtgggtaacttagatttatattagctagcatctaatttgcacaactagaacacatcccagaacaattactgaaaagctgaaatttaatgggtggtgatgtagcccaatgagggcgaatgacattacagcttgacctctccagaacactaatatcctaaaatacagaacatgctgggttaagtgcattagtgcttcaagcagaaaatgctgaaaacaacgtgtaaagtactgaatctgagtaggctgaccctgagaagggacaattaaagagacaaccaagggaacacattgagactacaaaaatatgaataatctcaattatattcatcacacttttttcataccatttcaagaaacgactagacagtagtaaccacatgaatattttactttctccagtataccttgagaagcaaactttgtaggaagccactcttctcccctaaacaacttctgccaaacaataataaagccaactggaaacgaatcggagccattttcattttcctaaccggggcctgacatgctttaaattatctggctgtattctaaatcaacacctaacccctcaaggaaactgaagaatcaatatacagggtaatagctttggctcagagctccaataatgtgcttcagatctgtccatgtggaaatgctttcatccaaatttttaaattggtggttaccaaagagttcacaaaacaggtttgtatgtagcacctttcatgcaaggcatgcaaaaagcctattttaaaatcactgtgcatattatagagttgtagccacctcacaatgaagtactacagcctgtgctgtcttaatggtttatgtcaggaaatgaaaaagatactgtaccaaatctggaattacaatggggagtaataatgtatactaaatgannnnnnnnnnnnnnnnnnnnnnnnnnnnnnnnnnnnnnnnnnnnnnnnnnnnnncagctacacttagtcctgagatgtattttttctttaagtcttgaatgaatacaaaaggagcccattttataatataaaccttgatgtacatgttgagatatttggacaatgaaaatgccttaaaaggaatgcatatggataaagttgcacttataacaccccttcaacaaaatctaattttaaattgttctttttcttttctattaaaggttttctttttcagtgtctaccattg

SEQ ID NO: 185785 - DNA, 980 bp, Homo Sapiens
ttggctcccagtgacctggagggaggattcctggaaaccaaacaatcagtttaggtgcaggtggagatgttgaatatgtgttaccaagatacagcacaggttcagggaaaagagttcgctactccaggggttatttagaagacactttctctgcctcatcctgccctcaagctttagtcaagaagttatggcccccagtccctgacttcttacttatcccattgaggactgcctttctctctctcagttctggcctctgccccccaaagtcagctctctaaaagcaagcatgtttttagaccactcactctttccctctttcttcaggaatgaattgggaaaggctgatgagtaaaacataccatccttttctattttcttgatgctgtttacaacatagtttggtgatatccagagctaatgtacatgctttcaaaagctaatctgcctgttgatgataactaggtacagcgactttaaatacagttgctataatcctgaaaagccccaggagcacatcagggagctgggaaacacagttgcagagaactcagctgtatgttgccctctgaccttggcccagaccttcagaggctcagtctgttgagtctgttgtgactgtcttatgaatcaatctgttgtgccaaccctttctgagattcagagaggtccagctagaaaaagtggcagttttaaccaccaacgtagaagcttttttttccccacaagaccattgtactgcaatacttgactatttgtgtagcaaacagcctcttaggttggagagtattgatttcaaataggaagttggtagactaggtgtgaggatgaaataatgaccttgatttttgggtgtgtattgcagaagcctcgtcgctttcaagtcacatcatatatgcgatctggcctaaccatggagatattggttatcagtttgcagatgaatacacaggttctatccaacagaaactgtatctttc

SEQ ID NO: 185786 - DNA, 2115 bp, Homo Sapiens
ttggaaaagaactggaaagaagctatcacttggataaatgtcaaattgcattgaatatattagaagagaatttattctatgattctggaataggaagagacaaatttcaacatgatgttcaaactcttctgcttacaagacagcgcaaggtgtatggagatgaaacagacactctgttttccccattaatggaagctttacagaataaagacattgaaaaggtcttgagtgcaggaagtagacgattcccacaaaatgcattcatttgtcaagccttagcaagacatttctacattaaagagaaggactttaacacagctctggactgggcacgtcaggccaaaatgaaagcacctaaaaattcctatatttcagatacactaggtcaagtctacaaaagtgaaatcaaatggtggttggatgggaacaaaaactgtaggagcattactgttaatgacctaacacatctcctagaagctgcggaaaaagcctcaagagctttcaaagaatcccaaaggcaaactgatagtaaaaactatgaaaccgagaactggtcaccacagaagtcccagagacgatatgacatgtataacacagcttgtttcttgggtgaaatagaagttggtctttacactatccagattcttcagctcactccctttttccacaaagaaaatgaattatccaaaaaacatatggtgcaatttttatcaggaaagtggaccattcctcctgatcccagaaatgaatgttatttggctcttagcaagttcacatcccacctaaaaaatttacaatcagatctgaaaaggtgctttgacttttttattgattatatggttcttctgaaaatgaggtatacccaaaaagaaattgcagaaatcatgttaagcaagaaagtcagtcgttgtttcaggaaatacacagaacttttctgtcatttggatccatgtctattacaaagtaaagagagtcaattactccaggaggagaattgcaggaaaaagctagaagctctgagagcagataggtttgctggactcttggaatatcttaatccaaactacaaagatgctaccaccatggaaagtatagtgaatgaatatgccttcctactgcagcaaaactcaaaaaagcccatgacaaatgagaaacaaaattccattttggccaacattattctgagttgtctaaagcccaactccaagttaattcaaccacttaccacgctaaaaaaacaactccgagaggtcttgcaatttgtaggactaagtcatcaatatccaggtccttatttcttggcctgcctcctgttctggccagaaaatcaagagctagatcaagattccaaactaatagaaaagtatgtttcatccttaaatagatccttcaggggacagtacaagcgcatgtgcaggtccaagcaggcaagcacacttttctatctgggcaaaaggaagggtctaaacagtattgttcacaaggccaaaatagagcagtactttgataaagcacaaaatacaaattccctctggcacagtggggatgtgtggaaaaaaaatgaagtcaaagacctcctgcgtcgtctaactggtcaggctgaaggcaagctaatctctgtagaatatggaacagaggaaaaaataaaaataccagtaatatctgtttattcaggtccactcagaagtggtaggaacatagaaagagtgtctttctacctaggattttccattgaaggccctctggcatatgatatagaagtaatttaagacaatacatcacctgtagttcaaatatgtttatttatatctttatgattttattctctctctctattctcatggcactttcataacattatggctaacctctaattacagattttgcttttgcctccctgaatgaattacaagcctttttaagatatgaaatatgcctacccgcagagcttggcacaaagtggagtcaatcttttaatgttttaaatatgcattttcagactcaaataattaagaagtttcattgatatccactggtcacatcataactgtctatagggcaataaaatctgtgttaaactcaattgcttttataagttttctaaattatttcttc

SEQ ID NO: 185787 - DNA, 1080 bp, Homo Sapiens
  misc_feature (674)..(682): n is a, c, g, or t
ttgggagagagtgaacagggagcggggcttttgtctgttggtctccctggactgaagagagggagaatagaagcccaagactaagattctcaaaatggtttattacccagaactctttgtctgggtcagtcaagaaccatttccaaacaaggacatggagggaaggcttcctaagggaagacttcctgtcccaaaggaagtgaaccgcaagaagaacgatgagacaaacgctgcctccctgactccactgggcagcagtgaactccgctccccaagaatcagttacctccactttttttaatcgtaacacctccatttgtattacatatggtgtatgggtattgatgaggtcatggtatcatatatgggatttttttctgtgtaaatcatcaagtataagaagaaactatgggactctgagccttgctttagagaatttacagtggacaaataggtgtcatcaaaccagtttttaatcattctgactcaagtgaaaacgctcagaatttcacactgtgaatccacgtttacaacccttacaggtgggccttcaggcctggttcgctacaacaatgtcttccacaactcaaactcccaccgcgctcacacaaccggtccactcctgccttttcactcacacagctcccgactgcttcttgcagaggctgagagtnnnnnnnnnaccttttttttcatttagatgtaacaaacctagtagtttatgttcatcaattgtctgtatatctctatattttatccatgtactcttttgatgtatagaagtagtttgaaactcattgtttccttgtggtaagtgaccgagatgctgccacaggacctgagacactgatgaatggtgctattttggactttcaacatgctccttggcgaggtagctctgatggagttattttttatttccatgttctaagaaggtgttggtactctgtttccctgaatgttgttctctagactggattgacttgttttccttgtgtcttcagtgtggctttcttcctcagtgttgtaatttgagcgaatgctaccagagtgtgagagaccattgtctcgttggctggc

SEQ ID NO: 185788 - DNA, 1059 bp, Homo Sapiens
  misc_feature (222)..(230): n is a, c, g, or t
ttgggtcatcaaaccagtttttaatcattctgactcaagtgaaaacgctcagaatttcacactgtgaatccacgtttacaacccttacaggtgggccttcaggcctggttcgctacaacaatgtcttccacaactcaaactcccaccgcgctcacacaaccggtccactcctgccttttcactcacacagctcccgactgcttcttgcagaggctgagagtnnnnnnnnnaccttttttttcatttagatgtaacaaacctagtagtttatgttcatcaattgtctgtatatctctatattttatccatgtactcttttgatgtatagaagtagtttgaaactcattgtttccttgtggtaagtgaccgagatgctgccacaggacctgagacactgatgaatggtgctattttggactttcaacatgctccttggcgaggtagctctgatggagttattttttatttccatgttctaagaaggtgttggtactctgtttccctgaatgttgttctctagactggattgacttgttttccttgtgtcttcagtgtggctttcttcctcagtgttgtaggttgagcgaatgctaccagagtgtgagagaccattgtctcgttggctggcgctcacggacatgcagtcacggtagcgggagcaatcacaaaactgtaatttacttaccaaatctcttcctttccgtagcctcgcctgcctgacttagagaaagaaaagcaataattttacaggcattttgaggtgtctctttgggttctttctgtttgaaaggatatttgtcgaaaaaagagcaaaaccgttttaaataaactccccctggaaaaaaccaaaacactggcatctgagtaggaatatgaaaatgacaccttttccaaatattaaattggaaaacaaggtctacaaaatcatgatacttttttaaaaggcagagcattcttttttcggcaattttgataagcaaggtgtagatttacatttttgtccttgctcccaacgaaatggataaaccaaaataaaattacatctactcatgggaatgt

SEQ ID NO: 185789 - DNA, 1223 bp, Homo Sapiens
ttggctgaaatgttgaaatattcatgttttagcctttttggagacaatacattgtcattgatttcttgataccctattcctttattgaagcaatctatgtgtttatttttaaataggaagtttatctcgacaatgctagttgcagtctgtgtgaccctgaccaagttattttaatgtctgtgctgcagtttttcagtttccaagatggaatagttatagtgcatatcttcctcatggttgtgaggagtgcatgacacatagcgagtgctcagtgaacagtcatttttctgagtgcttgtgatttcacgtatttttgctgaactcgtaaaagagacacttggatggtggattaaccagaacactaacattctgtgaaaagtttcaaattggagaatattgaattttcaccctagtccagcagctccgctgctcacttaaatacagatgaatgaagaccccattcggaaagacacctggccagcggtccagagctgatgcaggccatgctggagtatctgccaacatgatgaagaagaggacatcccacaaaaaacatcggagcagtgtgggtccgagcaaacctgtttcccagccccggcggaacatcgtaggctgcaggattcagcatgggtggaaagaggggaatggccctgttacccagtggaaaggaaccgttctggaccaggtgcctgtaaatccttctttgtatcttataaaatacgatggatttgactgtgtttatggactagaacttaataaagatgaaagagtttctgcgcttgaagtcctccctgatagagttgcgacatctcgaatcagcgatgcacacttggcagacacaatgattggcaaagcagtggaacatatgtttgagacagaggatggttctaaagatgagtggaggggaatggtcttagcacgtgcacctgtcatgaacacatggttttacattacctatgagaaagaccctgtcttgtacatgtaccaactcttagatgattacaaagaaggcgaccttcgcattatgcctgattccaatgattcacctccagcagaaagggaaccaggagaagttgtggacagcctggtaggcaaacaagtggaatatgccaaagaagatggctcgaaaaggactggcatggtcattcatcaagtagaagccaagccctccgtctatttcatcaagtttgatgatgatttccatatttatgtctacgatttgg

SEQ ID NO: 185790 - DNA, 860 bp, Homo Sapiens
  misc_feature (463)..(555): n is a, c, g, or t
tacaaaaaagttggcgcttccggccctgagtcggaagtcactatctcccgggtgaacggagctttcgcagctggagaaggctcatccacctgcagacatggggcgcagaaagtcaaaacgaaagccgcctcccaagaagaagatgacaggcaccctcgagacccagttcacctgccccttctgcaaccacgagaaatcctgtgatgtgaaaatggaccgtgcccgcaacaccggagtcatctcttgtaccgtgtgcctagaggaattccagacgcccataacgtatctgtcagaacccgtggatgtgtacagtgattggatagacgcctgcgaggcggccaatcagtagcgacacagaggacccgccccctgagcagccccgcgtactgtggatccagctgttcggttctggtccagagacattccaggggtccagggtgtgggtcctgggctgtcacagccnnnnnnnnnnnnnnnnnnnnnnnnnnnnnnnnnnnnnnnnnnnnnnnnnnnnnnnnnnnnnnnnnnnnnnnnnnnnnnnnnnnnnnnnnnnnnctgcacgtgtcactggggtggccgtgagtgtgtgctcacaggtacgcggtggtgtcgggttcctgggcctgaggggcctgaactgatctcacttggctccgaaagcctttgctgtgttccctgcagcccctggccccccagccttggggctctggctccccccggcggaattggggggactgtttcctgacatcctggacaaaggaagcccactagaggctggaacaggacctctccagcctcctcaccagcaccgtgcccatctcaactggacttccccgccctccttctcaccttctagtgcc

SEQ ID NO: 185791 - DNA, 2835 bp, Homo Sapiens
ttggcatggagccattgaagggaacaacacccttgatggtaaattctctttatatactgctatctgtctaaggctagttctattttgaagcctatgtgttttgtgaaacacaaaaaaaagtacagagaaagatcgcatccttttctggtaggggttttcaggaaaaagtaagagttctgactcatgttgggatttcttgggccgttattctgcagtggtcaaaatgggggaagcatgtctgtaaaagtgttactgatatgactaacactaactgatctactttcaaacattacctttttcctctccctccctgtttatgaatgttttgcccttctcttactattatatcttgttttgtttgagtttacaaattttcagagtttccctagctctggcacacactcatgaggttcctgtctctactcatactaacaaattgcatgtgttcacagcaggacgaggggcaggaatctctggaggaagagttggatgtgttggttttggatgatgaggggggccaagtgtcttacccctccatggtatgtccttcagtcacccccaagattgttcttgaggaaggaggctcctgagtgccagcaacttgtcaatcacgctaatctgatcaggccagagactaagtagtctcagccacatggggctcgaggggttctgcttttgtgattattacctcttacgagtctgggacatgcagctggtgatctgattctccgttatgtgctgctttcctttctccagatttgctcaacttttttggggggggtctccttaatcccaaccccattaacattctctctttctcttttttctccacagcagaagatttagcaccactatctccgttccatctgggcttatatgtacttttattttttggtggtgaaattgactgatgattttcctttttcttcgctggactattgtgccaactgccaggctgcctcctgcccttacagccctaagtggctgccttctttccatcaactcccaacttcttcctgtgaagtttaattgtctcaacgcctccccctcccccattccctccatttttctcccaagaaacctgactcaattatttgcatattttgagaaactgctgcagattagttctttttgccagttttccctggaactcctggccttttgtggaggggagggatggagagaataggaatcttcactagaagccgtgggaagaattggaagttacatgctgtatatgcaatgtccagcagtctgataaactgacgattcttaatcaagatttttttcctgatggggaagggacttttattttcttttagagaggggaaagtgtgagctcttcccttattcctaatggctatttttgaagcaaagaaggccagcaacattggcacatgccacctggcaaaggacccttgagtaagtgaaggtctcctaaaactgggattaagaaaccttgctctcctcatctccaaggcagggaccatcaagaacctacagactccatctcttctgcaagcctcatgccaaccctgggctattgctgctgccccttaaacacaggctgtccttaacccacctctcctgccctgtgatatgtctgctgagttggcctggccatttccaagaggctgtagaaaggggagaatgtcaaggaagacttttggtagagaaggagcagaaagatgtgtttttgggaagaagaagacctctaggaggagctagtaggaatgtacatgaagcaattagtctgaaactggcttccccactcccccgtttctccttttcctatccttataggcctgtcccttgcctctgccctggattggttggcaaactaaaggacttgatgtacataactcctgtcccttttcccttacaaggtggggattgcccctggctttgcctcttctttgtgcctttggcctggggtgcatctcctcccgcccttccatgtgcctttctttgcctctgcagtctcatttctcataattttgcaaattatattttgttgctttcttacctactattggccctaaatagcagaaagaagagaagtgaccgagagaacctcagattcttcattgaggattggtatagccatgatttcagtcatagcaagcttttgctcaacagcatatgggtgggattttgcaaaaatcctattctgatgaatctcaaagtaaggctggtaagagaagtgagtggtgtgactcttactccttaggtgcccagaatttaccatcatctctgaaggagttacagggaagtggtctccccaattctcccctccctccagtattgccccctctcactttagcatatattaattagcaggttgggctagagaaatcagctgctatgcgggttgattattattattatttctaatccttttccttatttgccttctactccccttaatctaatctaaaagctctgttccatgcaactggagttccttatccctctcttccccttcccttatatattgaggctatggggtaggagaaaagtgcacaacccaccaccccctttactcgtgcattaaaatttcttatttacccttttcccccttcccatttcttcccactttcatctaccttttctggcaaaaaggagccttttgctctctgtgaccctaagagcacactgcacagggaaaattgccccatccaaacctggctccactcttgatctctcttgtcctcttctgctcttttcctgggtgctcttttttctcggtggggtgtgggtaatagaacagccgtgggcttttggggaccgtttaacttttttttctctcttttgtttaataaaaaacactaaaac

SEQ ID NO: 185792 - DNA, 1925 bp, Homo Sapiens
aagagctcacactttcccctctctaaaagaaaataaaagtcccttccccatcaggaaaaaaatcttgattaagaatcgtcagtttatcagactgctggacattgcatatacagcatgtaacttccaattcttcccacggcttctagtgaagattcctattctctccatccctcccctccacaaaaggccaggagttccagggaaaactggcaaaaagaactaatctgcagcagtttctcaaaatatgcaaataattgagtcaggtttcttgggagaaaaatggagggaatgggggagggggaggcgttgagacaattaaacttcacaggaagaagttgggagttgatggaaagaaggcagccacttagggctgtaagggcaggaggcagcctggcagttggcacaatagtccagcgaagaaaaaggaaaatcatcagtcaatttcaccaccaaaaaataaaagtacatataagcccagatggaacggagatagtggtgctaaatcttctgcatcaagggtgttgttcccttcaatggctccatgtcgcctagatcccccgatcgatccagtgttctattgtggtctcctctctcatttggtgtggaatagttgttatctagtgattttgtgtttgatcccatattgctcatctgaatttcttcccgatcaggtttcttatctgatttttggttccggtcaatgagagggagagtactatcatcatatgaatgactgctctggcttcgggaagcattgtttagattcacctgaaagtctgatttcttccatccttctttttccagtggcttccgcagttccttatatccccagattgtctgtaatacaagtgctgctgctcgaacttctttttctgagcggttccctgatttgttgatcaacaccagcttctcaataccctgtgtctctcgaagctttttggcagcctccaagttctcagcgataacctcgttgatagtgttcaaaatagagatgacagtgtcctcagagaaattccaagaggagttctgctgtcctcctggcagattctttaccaagttaggaatagcatgtttaccaattaattctttgttgcgagcatccacagccaggtttctcagtgctccagatgcagctttcaccacccgttcatgttcattagtcaggaggtcagctatggcagaaagagccttctcttgacgcagagcagagcggatgtatcgaccatacgtccagcgcccagcacacaagttctggatagctccagctgaggcttctaggatggcaggagtcttgctctccttaagaagtgagatgtatatccgaaccacctctggctgaaataagagctcatagcctcgagctggactcgttcttttagggaaatccactgtatcgtttgctggatcctctataggttttttccctttgcccttcttggccccaaagcaactggcagcatgtggcccagtattgttggcaacattgggagctgcctcttggtaacgctctgcctgtgggatctcccggtgaacttgatatgataagttccgaagaagccaaacacagttctctacaagcttgctgtctgaatccttctgcccaatctcagcctgaacaatgaaaatgagggcatcaactaaaccatcacattcccgaagtttccggcgagcttcactcctctctgagcttacattcctgaggggaaaccagaagctaaggcagccagctgtgttggtgagcaccgattcccactcaatatggcgtggcttacagtcttcattaggttcccgctcccaaccagaatgaggaatgatcacttcatctgtcaaggcatgcagtgcatggtccacaatctccattttgattgagtcatgggatgaaagattccacagggttccggtaataacttcagtaaggtccccaa

SEQ ID NO: 185793 - DNA, 855 bp, Homo Sapiens
cattaaaaatgccaactttgtacaaaaaagttggctccataccttttctcttttctttctgtcttgttaatgcttttaaaaacaaatgagttttttatataaataaagtttttaaagtgtgtatgtggggggtctgtgtcatttcttcacttcaagctgttatttcttccctgctttgcatctttgttacttccttatgtatcagtgtcctttccagagcaaccagaaggaggttataccaggatttattttgagctcagccccaactctttatcaagcaacattcttgttaactatatgtgaaacattttttcttctgaagattcttaaaaattgaatgtggctgaagttgaacatgggagcttattgctaatttagagataggaaactgaagcataaagaattaatgacttactttaattactggaattcttctgcaacatttgacaaaactaaccttgaataaggcccactgtaatacgtagctctcttaaatataacacttaggactagaagattagaaactaccaatcccaactacgtaataggaaaatgtaggatcaaaaggcccatgtatataagtactgaccactgggccataatgttgcttctcaggctatatgcagtcctttagtcagaagtcaataggcctatttattaatattttacagaccatattacctggattaccagggactatctttgctgcagagatcaagggttaagatctatgggaagatacttatttttctgaggtccttatgtcctgtcatataattaaagactcaagagaatttatgtgaaatgctttctgtatgcccaaatctttagattaaaattatatagctgctcctg

SEQ ID NO: 185794 - DNA, 986 bp, Homo Sapiens
actttgtacaaaaaagttggctctcctcatctccaaggcagggaccatcaagaacctacagactccatctcttctgcaagcctcatgccaaccctgggctattgctgctgccccttaaacacaggctgtccttaacccacctctcctgccctgtgatatgtctgctgagttggcctggccatttccaagaggctgtagaaaggggagaatgtcaaggaagacttttggtagagaaggagcagaaagatgtgtttttgggaagaagaagacctctaggaggagctagtaggaatgtacatgaagcaattagtctgaaactggcttccccactcccccgtttctccttttcctatccttataggcctgtcccttgcctctgccctggattggttggcaaactaaaggacttgatgtacataactcctgtcccttttcccttacaaggtggggattgcccctggctttgcctcttctttgtgcctttggcctggggtgcatctcctcccgcccttccatgtgcctttctttgcctctgcagtctcatttctcataattttgcaaattatattttgttgctttcttacctactattggccctaaatagcagaaagaagagaagtgaccgagagaacctcagattcttcattgaggattggtatagccatgatttcagtcatagcaagcttttgctcaacagcatatgggtgggattttgcaaaaatcctattctgatgaatctcaaagtaaggctggtaagagaagtgagtggtgtgactcttactccttaggtgcccagaatttaccatcatctctgaaggagttacagggaagtggtctccccaattctcccctccctccagtattgcccctctcactttagcatatattaattagcaggttgggctagagaaatcagctgctatgcgggttgaataatattattatttctaatccttttccttatttgccttctaccccccttaatc

SEQ ID NO: 185795 - DNA, 890 bp, Homo Sapiens
actttgtacaaaaaagttggctaaacaatcgcttcccgaagccagagcagtcattcatatgatgatagtactctccctctcattgaccggaaccaaaaatcagataagaaacctgatcgggaagaaattcagatgagcaatatgggatcaaacacaaaatcactagataacaactattccacaccaaatgagagaggagaccacaatagaacactggatcgatcgggggatctaggcgacatggagccattgaagggaacaacacccttgatgcagaagatttagcaccactatctccgttccatctgggcttatatgtacttttattttttggtggtgaaattgactgatgattttcctttttcttcgctggactattgtgccaactgccaggctgcctcctgcccttacagccctaagtggctgccttctttccatcaactcccaacttcttcctgtgaagtttaattgtctcaacgcctccccctcccccattccctccatttttctcccaagaaacctgactcaattatttgcatattttgagaaactgctgcagattagttctttttgccagttttccctggaactcctggccttttgtggaggggagggatggagagaataggaatcttcactagaagccgtgggaagaattggaagttacatgctgtatatgcaatgtccagcagtctgataaactgacgattcttaatcaagatttttttcctgatggggaagggacttttattttcttttagagaggggaaagtgtgagctcttcccttattcctaatggctatttttgaagcaaagaagccagcaacattggcacatgccacctggcaaaggacccttgagtaagtgaagtctcctaaaactgggattaa

SEQ ID NO: 185796 - DNA, 966 bp, Homo Sapiens
  misc_feature (567)..(610): n is a, c, g, or t
ctttgtacaaaaaagttgggacagaaagttaaaaaagaacaagaagaattcccatgaaggagtttcctggtttgttcctgtggaaaatgtggagtctagatcaaagaaggaaaacgtgcctaacacttgtggccctggcatctcctggtttgaaccaataaccaagaccagaccctggagggagccactgcgggagcagaactgtcaggggcagcacctggacggtcggggctacctggcaggcccaggcagagaggctggcagagacctactgaggccatttgtgagagcaacccttcaggaatcgcttcagtttcacagacctgacttcatctcccgctctggggagcggataaagcgcctgaagttaatagtccaggagaggaagctgcagagcatgttacagaccgagcgggatgcactattcaacattgacagggaacggcagggccaccagaatcgcatgtgcccgctgcccaagagagtcttcctggctatccagaagaacaagcctatcagcaagaaggaaatgattcagaggtccaaacggatttatgagcagcttcnnnnnnnnnnnnnnnnnnnnnnnnnnnnnnnnnnnnnnnnnnnntataagtcataccggctgcgagcccagctatataaaaagagagtgaccaatcaacttctggggagaaaagttccctgggactgacacaagtttattttcctcagagccttggaattctattttatgaacctagagaagcagaatccttacttttgtgagtctggttgaataaagcttattctttgtccatgtgtattttagaaatagtaacctcctaaagagtctggaacaaagtggtgattaaaattcctaatggtttgggagcaatactttctgcatagtggccttgtccaatggcctgtgtgttacaatgatatgatcatttctcaagaataagtcactttttgtatgtgttt

SEQ ID NO: 185797 - DNA, 923 bp, Homo Sapiens
ttggcttaaaaaaagcaaggtgctttctcatcatcgagctgggaggtctaatcaaattaaaattgaacagattaaatttgataaatatattctgagtaaacagccaggttttaattatataagcaacacttcttcggattgtcggccctcagaggagagtgagctgctcacagatactaccaccaacatcctttccggcaccacttctactgtcgaatcagatatattgacccaaacagatagagaggtggctctgcacgaaaggagtagctctgtttccactattgacactgcccggctgattcaagcttttggccatgaaagagtatgcttgtcacccagacgaattaaattatatagcagcatcaccaaccaacagaggagataccttgagaagcggagcaaacacagcaagaaagtgctgaatacaggtcatcccctagtgacttctgagcacaccagaaggagacacatccaggtagcaaaccatgtgatttcttctgactctatttcctcttctgccagtagtttcctgagctcaaactctactttttgcaacaagcagaatgtacacatgttaaacaagggcatacaagcaggtaacttggagattgtgaacggtgccaaaaaacacactcgagatgttgggataactttcccaactccaagttccagcgaggctaaattggaagagaacagtgatgtgacttcttggtcagaagaaaaacgtgaagagaaaatgctctttaccggttatcctgaggacagaaagttaaaaaagaacaagaagaattcccatgaaggagtttcctggtttgttcctgtggaaaatgtggagtctagatcaaagaagaaaacgtgcctaacacttgtggccctggcatctcctggtttgaaccaataacaaagaccagaccctggaa

SEQ ID NO: 185798 - DNA, 1449 bp, Homo Sapiens
cagcttacagggagaggagtgaccccttggttttccaggaagcatcagttcaggagcagcttctgctgcctctgttctttggtgagaggggcagcctctttagacatggcccagctgccccagaagagctatttggtagtgtttagagagccgtcttcaggaatcttctcctccgagcagctcctccccgagagcctgtccagatgctccagctcactgaagcgttctgccacacactgggctgtgagacgggcctctgggtcgtggtcccagcactcagtcaacgtctcacacaccatctggatgccctggtggttgagccagaagctgggaatttctggtcgccctcgatctctcaacacgttgtccttcatgctttcgacacaggggtgctcccgcaccttggaaccaaatggaggctcataatcttttacttctcccactgcattacagcgagatgtcatttcccagagcaccagagccatggagtagacatcggtctgcttgaaggactcaacattctccaaattcatcctggattctaggacttctggagccatgtatcttgcagttcccacctgcccactgttagccaggtcatccacagacagagtagggtccagacgcagggaaagcccaaagtcacacaggcagcaggttaggtcgttcttcacgaggatattggagctcttgaggtccctgtgcacgatgggcatcttgggcctcccacatggagtgtgatcactgtggaggtgagcaatcccccgggcgagggagctgcccagcttgcgcaggtcctcccagctgatgacatgccgcgtcaggtactcctgtaggttgcccttggcgtggaaggcggtgatcagccagtattgtttccccaactccgtcttccgctcctcagccgtcaggaactggagtatgttctcatgcttcagattgatgtctgagaagatgtccttctctgtcttccaagaggcatactcctcatagggaaagatcttgactgccactgtctcaaactgctctgaagtgttctgcttcagcttggccttatagacctcagcaaagcgacctttccccaccagggtgtccagctcaatgggcagcagctctgtgttgtggttgatgttgttggcacacgtggagctgatgtcagagcggtcatcttccaggatgatggcacagtgctcgctgaactccatgagcttccgcgtcttgccggtttcccaggttgaactcagcttctgctgccggttaacgcggtagcagtagaagatgatgatgacagatatggcaactcccagtggtggcaggaggctgatgcctgtcacttgaaatatgactagcaacaagtcaggattgctggtgttatattcttctgagaagatgatgttgtcattgcactcatcagagctacaggaacacatgaagaaagtctcaccaggc

SEQ ID NO: 185799 - DNA, 2730 bp, Homo Sapiens
  misc_feature (659)..(728): n is a, c, g, or t
  misc_feature (730)..(731): n is a, c, g, or t
  misc_feature (2613)..(2621): n is a, c, g, or t
actttgtacaaaaaagttggctctggtgctctgggaaatgacatctcgctgtaatgcagtgggagaagtaaaagattatgagcctccatttggttccaaggtgcgggagcacccctgtgtcgaaagcatgaaggacaacgtgttgagagatcgagggcgaccagaaattcccagcttctggctcaaccaccagggcatccagatggtgtgtgagacgttgactgagtgctgggaccacgacccagaggcccgtctcacagcccagtgtgtggcagaacgcttcagtgagctggagcatctggacaggctctcggggaggagctgctcggaggagaagattcctgaagacggctccctaaacactaccaaatagctcttctggggcaggctgggccatgtccaaagaggctgcccctctcaccaaagaacagaggcagcaggaagctgcccctgaactgatgcttcctggaaaaccaagggggtcactcccctccctgtaagctgtggggataagcagaaacaacagcagcagggagtgggtgacatagagcattctatgcctttgacattgtcataggataagctgtgttagcacttcctcaggaaatgagattgatttttacaatagccaataacatttgcactttattaatgcctgnnnnnnnnnnnnnnnnnnnnnnnnnnnnnnnnnnnnnnnnnnnnnnnnnnnnnnnnnnnnnnnnnnnnnnanngccataccttgaaaagagacaaggaaaaacatcaaatattcccaggaaattggttttattggagaactccagaaccaagcagagaaggaagggacccatgacagcattagcatttgacaatcacacatgcagtggttctctgactgtaaaacagtgaactttgcatgaggaaagaggctccatgtctcacagccagctatgaccacattgcacttgcttttgcaaaataatcattccctgcctagcacttctcttctggccatggaactaagtacagtggcactgtttgaggaccagtgttcccggggttcctgtgtgcccttatttctcctggacttttcatttaagctccaagccccaaatctggggggctagtttagaaactctccctcaacctagtttagaaactctaccccatctttaataccttgaatgttttgaaccccactttttaccttcatgggttgcagaaaaatcagaacagatgtccccatccatgcgattgccccaccatctactaatgaaaaattgttctttttttcatctttcccctgcacttatgttactattctctgctcccagccttcatccttttctaaaaaggagcaaattctcactctaggctttatcgtgtttactttttcattacacttgacttgattttctagttttctatacaaacaccaatgggttccatctttctgggctcctgattgctcaagcacagtttggcctgatgaagaggatttcaactacacaatactatcattgtcaggactatgacctcaggcactctaaacatatgttttgtttggtcagcacagcgtttcaaaaagtgaagccactttataaatatttggagattttgcaggaaaatctggatccccaggtaaggatagcagatggttttcagttatctccagtccacgttcacaaaatgtgaaggtgtggagacacttacaaagctgcctcacttctcactgtaaacattagctctttccactgcctacctggaccccagtctaggaattaaatctgcacctaaccaaggtcccttgtaagaaatgtccattcaagcagtcattctctgggtatataatatgattttgactaccttatctggtgttaagatttgaagttggccttttattggactaaaggggaactcctttaagggtctcagttagcccaagtttcttttgcttatatgttaatagttttaccctctgcattggagagaggagtgctttactccaagaagctttcctcatggttaccgttctctccatcatgccagccttctcaacctttgcagaaattactagagaggatttgaatgtgggacacaaaggtcccatttgcagttagaaaatttgtgtccacaaggacaagaacaaagtatgagctttaaaactccataggaaacttgttaatcaacaaagaagtgttaatgctgcaagtaatctcttttttaaaactttttgaagctacttattttcagccaaataggaatattagagagggactggtagtgagaatatcagctctgtttggatggtggaaggtctcattttattgagatttttaagatacatgcaaaggtttggaaatagaacctctaggcaccctcctcagtgtgggtgggctgagagttaaagacagtgtggctgcagtagcatagaggcgcctagaaattccacttgcaccgtagggcatgctgataccatcccaatagctgttgcccattgacctctagtggtgagtttctagaatactggtccattcatgagatattcaagattcaagagtattctcacttctgggttatcagcataaactggaatgtagtgtcagaggatactgtggcttgttttgtttatgnnnnnnnnncttattcaagaaaaaagaccaaggaattaacattctgtagttcctaaaaatactgacttttttcactactatacataaagggaaagttttattcttttatggaacactt

SEQ ID NO: 185800 - DNA, 1320 bp, Homo Sapiens
tttgaatattataacctgcaggggtctgtcctgcagatggttgagacacataaccagatactgatattcagtgaaagagcagcaaggattccgagctgattacagacaccaaggaagatgctgtaaagagtcagcagccacagccctggctagctggccctgtgggcatttattagtaaagttttaatgacaaaagctttgagtcaacacacccgtgggtaattaacctggtcatccccaccctggagagccatcctgcccatgggtgatcaaagaaggaacatctgcaggaacacctgatgaggctgcacccttggcggaaagaacacctgacacagctgaaagcttggtggaaaaaacacctgatgaggctgcacccttggtggaaagaacacctgacacggctgaaagcttggtggaaaaaacacctgatgaggctgcatccttggtggagggaacatctgacaaaattcaatgtttggagaaagcgacatctggaaagttcgaacagtcagcagaagaaacacctagggaaattacgagtcctgcaaaagaaacatctgagaaatttacgtggccagcaaaaggaagacctaggaagatcgcatgggagaaaaaagaagacacacctagggaaattatgagtcccgcaaaagaaacatctgagaaatttacgtgggcagcaaaaggaagacctaggaagatcgcatgggagaaaaaagaaacacctgtaaagactggatgcgtggcaagagtaacatctaataaaactaaagttttggaaaaaggaagatctaagatgattgcatgtcctacaaaagaatcatctacaaaagcaagtgccaatgattgcagctctaaccatttgactatagaagtggttgtggttatctaccaatagaatatacaggctatagaaatcagaggttcccatcagaatccaaacaagaggaagatgaagaatattcttgtgattctcggagtctctttgagagttctgcaaagattcaagtgtgtatacctgagtctatatatcaaaaagtaatggagataaatagagaagtagaagagcctcctaagaagccatctgccttcaagcctgccattgaaatgcaaaactctgttccaaataaagcctttgaattgaagaatgaacaaacattgagagcagatccgatgttcccaccagaatccaaacaaaaggactatgaagaaaattcttgggattctgagagtctctgtgagactgtttcacagaaaggatgtgtgtttacccaggctacacatccaaaagaaatagataaaaataaatggaaaatt

SEQ ID NO: 185801 - DNA, 2003 bp, Homo Sapiens
ttggagttaaactacggtcagaaaactgacatacactaaagaagttactagttcattttcaagcttttaaatagaatattaactaaactatggaatgtaggtattcctagacccaataataacatcagtgaaatgagaataaaagtttgttgtcaatatgtattatagcaatgaacttggatcagtggtgtgataaactaacaattgttgacaataaaaaaggatttcttagaagtttcattaattgactttgacttgatgatgtcactactagtcatacagctatccctaaattcctttactatgtaatgttgaaaataatgtatacaaatttgcctttagaaaaacaactttatcaagacatgttagagagaaatagttttgtgtcaatgtaccacattaaaggacaggaagaaaagccaaatggtattattataatagtttgcataaatattatttaattatttaagatattcagtaaagcaggtgaatgctagtcagggtaaaagtaaacaatgcagaagcttttatggaatgatatttttgatacatcatgaggtaaagtacaacataagtaaaaaaaattcagtatttactcacagttatttgattataatataaaagtatgcatctagactctgcaaaagagagctgtattattttctgtgctaatgaggtatttaagacttttatccattctcttgaatgtatgccattattctaggaaattttttatgactttcattcatgctctgtattttaaatgttctcaaggccaaccccagatgaattaatgaaggacaaagtattcagtgaggtatcacctttatataccccctttaccaaacctgccagtctgttttcatcttctctgagatgtgctgatttaactctgcctgaggatatcagtcagttgtgtaaagatataaataatgattacctggcagaaagatctattgaagaagtgtattacctttggtgtttggctggaggtgacttggagaaagagcttgtcaacaaggaaatcattcgatccaaaccacctatctgcacactccccaattttctctttgaggatggtgaaagctttggacaaggtcgagatagaagctcgcttttagatgataccactgtgacattgtcgttatgccagctaagaaatagattgaaagatgttggtggagaagcattttacccattacttgaagatgaccagtctaatttacctcattcaaacagcaataatgagttgtctgcagctgccacgctccctttaatcatcagagagaaggatacagagtaccaactaaatagaattattctcttcgacaggctgctaaaggcttatccatataaaaaaaaccaaatctggaaagaagcaagagttgacattcctcctcttatgagaggtttaacctgggctgctcttctgggagttgagggagctattcatgccaagtacgatgcaattgataaagacactccaattcctacagatagacaaattgaagtggatattcctcgctgtcatcagtacgatgaactgttatcatcaccagaaggtcatgcaaaatttaggcgtgtattaaaagcctgggtagtgtctcatcctgatcttgtgtattggcaaggtcttgactcactttgtgctccattcctatatctaaacttcaataatgaagccttggcttatgcatgtatgtctgcttttattcccaaatacctgtataacttcttcttaaaagacaactcacatgtaatacaagagtatctgactgtcttctctcagatgattgcatttcatgatccagagctgagtaatcatctcaatgagattggtttcattccagatctctatgccatcccttggtttcttaccatgtttactcatgtatttccactacacaaaattttccacctctgggataccttactacttgggaattcctctttcccattctgtattggagtagcaattcttcagcagctgcgggaccggcttt

SEQ ID NO: 185802 - DNA, 1236 bp, Homo Sapiens
ttggcagagagccgcggggaccatggagccggtgccgctgcaggacttcgtgcgcgccttggaccccgcctccctcccgcgcgtgctgcgggtctgctcgggggtctacttcgagggctccatctatgagatctctgggaatgagtgctgcctctccacgggggacctgatcaaggtcacccaggtccgcctccagaaggtggtctgtgagaacccgaagaccagccagaccatggagctcgcccccaacttccagggctacttcacccccctcaacaccccacagagctatgaaaccctggaggagctggtctctgccacaactcagagctccaagcagctgcccacttgcttcatgtcgacccacaggattgtcacagagggcagggtggtgactgaggaccagctcctcatgcttgaggctgtggtgatgcacctcgggatccgctctgcccgctgtgtcctgggcatggagggtcagcaggtcatcctgcacctgcccctatcccagaaggggcccttctggacatgggagcctagtgcccctcgaactctgctccaggtcctacaggatccagccctgaaagacctcgtcctcacctgccccaccctgccctggcattccctgatcctgcggccccagtatgagatccaagccatcatgcacatgcgcaggaccattgtcaagatcccttctaccctggaggtcgacgtggaggacgtcaccgcctcctcccggcacgtccactttatcaaaccgctgctgctgagcgaggtcctggcctgggaaggccctttccccctgtccatggagatcctggaggttcctgagggccgccccatcttcctcagcccgtgggtgggctccttgcaaaaaggccagaggctttgcgtctatggcctagcctcaccaccctggcgggtcctggcctcaagcaagggccgcaaggtgcccaggcacttcctggtgtcagggggctaccaaggcaagctgcggcggcggccaagggagttccccacggcctatgacctcctaggtgctttccagccaggccggccactccgggtggtggccacaaaggactgtgagggcgagagggaggagaatcccgagttcacgtccctggctgtgggtgaccggctggaggtgctggggcctggccagggcccatggggcccagggcagtgacgtggatgtcttggtttgtcagcgggctgagtgaccaggctggggag

SEQ ID NO: 185803 - DNA, 1266 bp, Homo Sapiens
  misc_feature (140)..(239): n is a, c, g, or t
  misc_feature (1214)..(1222): n is a, c, g, or t
ttgggaaatcctgtcccccacaaaccatgtggagaaacccaagaaacccagaggatattaggtccaaggaaatgagcctggtagaggaagtcccacaccttttaatctcaggcatggagattccaaaaactttatctccnnnnnnnnnnnnnnnnnnnnnnnnnnnnnnnnnnnnnnnnnnnnnnnnnnnnnnnnnnnnnnnnnnnnnnnnnnnnnnnnnnnnnnnnnnnnnnnnnnnnaagccactgcggcctccatttgggccaagctctgactgcaatgatgcctctgccccgacccgggcctcgctgtgactgataatgccgctgcatcttttcagcagtcattgatgaggaagtatctacatcctccttcccactaccagattttgcttggagaaaagcagtttcctgaaataattctgtgacgagcttcttccacattaggacaaaaatgctggaagcggctcagccccagggcagcacatcagagacaccatggaacacagccattcctctgccgtcgtgctgggaccagtctttcctgaccaatatcaccttcttgaaggttcttctctggttggtcctgctgggactgtttgtggaactggaatttggcctggcatattttgtcctgtccttgttctattggatgtacgtcgggacacgaggccctgaagagaagaaagagggagagaagagcgcctactctgtgttcaatccaggctgtgaagccatccagggcaccctgactgcagagcagttggagcgcgagttacagttgagacccctggcagggagataggacccagctgtgctgtcatgcagctaacctctgatgtggtcttcctcaccattggctatggatttgatttcaggtgtataggactaagggcagcttgcgggttagctctgtgactgcatagtttttctaccttctttccctgatcttttgctgccatttgatctttgatagttttggtgaaactctctaaaatacattcactgtgggtccgacgcaatttataaaaattatgtactcaagaagggagacctgtttgtttcatttctcatctgtttgggagatgattttagagcactagaaaggcactggggagattctcagcttaaaacatccagcagtttgaagtatgattagtacatcagggctgcattgtcaatgttctctttaagtcttttaacatttatagcaannnnnnnnncccggagagtttaggttgcaagtttgggtttcttgtttgttttg

SEQ ID NO: 185804 - DNA, 1012 bp, Homo Sapiens
  misc_feature (76)..(85): n is a, c, g, or t
ttggctattattgccacttttccagcgctaaaggctgttttggaaccagtgttgcttgttccgcgggtgattggcnnnnnnnnnnggcaaaccagttattcaagtttctggtctttaaaaaactctgtggcggtacggtaaccgaggaggttccagcgcggcggaagtaccccgcgggtgggtgtgtgcgcaaggccagggccagaggggcacgtggcgccgggaggagagagaatgtcttttcgaggcggaggtcgtggaggctttaatcgaggtggtggaggtggcggcttcaaccgaggtggcagcagcaaccacttccgaggtggaggcggcggtggaggcggcggcaatttcagaggcggcggcaggggaggatttggacgagggggtggccgcggaggctttaacaaaggccaagaccaaggacctccagaacgtgtagtcttattaggagagttcctgcatccctgtgaagatgacatagtttgtaaatgtaccacagatgaaaataaggtgccttatttcaatgctcctgtttacttagaaaacaaagaacaaattggaaaagtggatgaaatatttggacaactcagagatttttatttttcagttaagttgtcagaaaacatgaacgcttcatcctttaaaaaactacagaagttttatatagacccatataagctgctgccactgcagaggtttttacctcgacctccaggtgagaaaggacctccaagaggtggtggcaggggaggccaggaggaggaagaggaggaggtggcagaggtggtggcagaggcggtggttttagaggtggaagagaggtggaggtgggggcttcagaggaggaagaggtggtggtttcagagggagagacattaagtgaaacagttgacagacatcaccagttgacttctgcattaacctgcatgatctgtttctactatggattggaaacttgtttcttgaaccccccccgaagatcttggtcattttatgaccatggatc

SEQ ID NO: 185805 - DNA, 1773 bp, Homo Sapiens
  misc_feature (201)..(225): n is a, c, g, or t
  misc_feature (983)..(1033): n is a, c, g, or t
  misc_feature (1138)..(1172): n is a, c, g, or t
ttggataaactctcccagaaggaatatttcaccggagtccagtgacaattcacattaaacagtgctgcctgtgtcctgtggtctcaagaaatggtgaaatgcctgagaaatagactcttatgaaagttctttgtccttgaagtcaacatttacatcagtatttatttggggaaaatcttctggtgtttaattgtgataatnnnnnnnnnnnnnnnnnnnnnnnnntggtagcattttttctaacaagataaattctaaaaatgttttccctgatttcacaaacaaggatagtcttggtgaccttttatagagatcttctagtaatgtattttgatctcagatttctttttcaaagccatggttttacaaaaacagcattccttaaatatatttaaaaaacaatacaaggaatgcctaacatttcagctcatacttcttaaagaagatatagtatgttgtattctcttcttagagctttcttaaagaatccacaatccaattaccccactgtcaattcatatttgaacttaccaaaacaaaggaggattacgtatatgttttttaaattcaaaaaagaatatgaaattatacctttagtatccctttgagacatatagtttaaagaaaactttttttaaaacaaaagtaggaatatatagtaagattgtagttacaatgagtatatgcacttttgatgctaggttttgcttttctccccccagtcatatctcatgatttccacagttgttgtattggtgtggagttttctgaattggctataagctgattacatattagaggtttatttttatgattctatataaacgtgcacgagtaatttaaaacctgcattgggattgattggaatattgtcctaaattaattaaatcttgcactgttttgaatgcatctgctatttatacatctgcaagtgggtatgtcataaggagtcagattatctttaatttaaaatgaatacttannnnnnnnnnnnnnnnnnnnnnnnnnnnnnnnnnnnnnnnnnnnnnnnnnncaagagttatagcaaattgatttctaatttttattgctattacaactgatgtaaatggtagtttcagtttttgtgagatttaaaaaaataaagcacttattctgnnnnnnnnnnnnnnnnnnnnnnnnnnnnnnnnnnngaatatagttgaaaagctgtaatattcagttttgctagtaaaagaccatttttttgtgtgaatgaagtttcaattataaacttacatccactttattgagcactacataatttacagatattttgttgtattggcaaaagcaagtggtttccatatgctaaattaattgtattttctttttgagcagattggatatcttgttcttataaattataatattgaaatacatataatctttggatggatgggctgttaatttgtaaataggttttcattaagttatttctcatgataagtaataatcagcagttttataatatttactatttggagggtcattttgatgctttaaattgcagaaatagtcaaatttgaatattcagaaaataaatttatttagatatattgtaaagagggtgcaaaacaagcaatggggttagaataatagatcttcaagtcttttcttaaatgggggtatgtagttccagcttttcagtgagaattttccaaaccgtgcttattagctttaaatggtctcttgaaaatgatcataaatttttctcagtgtcctttttgtgtttgaacacatatattctgaaaa

SEQ ID NO: 185806 - DNA, 2350 bp, Homo Sapiens
aagattggttaaagcaatttaaaagccacttttttgtcaacatttaatagcctccacttctgttaagataatgtatactgctgaggaattactattaatagctatcaacataccaccattaaattaaggtattcactttagattttttattaaagcttttttcttgcacactgatcgttgtgtttctaagctgattttttcagctctaatatacctatggttaaaaagtataaaaacttaaattgatatttagatatatgttttcctattagtttatgttttaaaaagacaaaattgtatctgtcagtccctgaaggcagtttgtttttatactctctcacatttgtatttgttttttaaatggcagtattttagaagatttggagaaaagtccacataataatgttttcttaaaagcttttaaagtttttgctgtacttcaatttacttcttccatcagaaaactaagaacaaagtgttgctcagtctgttccgctgacctaaatttgtgttttcagcacttggctcagccaattcactgagtgaaggaattgctttatgaggcaaagcatgtgaaagttctaaagtatggttagattgtaggtcgtgctctatatggaaacatcaaaccattactacagagaaatgataaggcattggatccactattgaaattattatttttggatcaacaagttggtactttctgacttctgtatcttaacataagggaattttaggtaatgctaagtcagttgtctcattttttgtgataagttttggaatttttagttaattgaaataaataatgcttttaaatagaagtaaaaggtttataagtgtgcaaattgtagatttatcaattacctcagcaggtatcctgccatgtaattattagtgattagtgttaataagataatagattcaggtcttccaactatgcccttggattgtggcctactgtatgttattaaatggtctcttactatccaaaatgggagtagatgctgtggccccgtctcccttggcttttacgtcccatatccacccccattcatgtacaacatgtgaaatataaaaatctcatttcttgtcaaaatcagcactgcttatttgcatactcagcatcggatcagtgagtagttttataaaaaatccacgcacccaactcccttagttaaaacagattcttaattcataccatgaattcttaatttctgtaccatctatgttaatgatctgctgaaggtgactcaagattttcaaggtgtaatacagtttgatcatgtaccggacctggatatttaattttttttccctcacagttaatctcctccttgataaagcaataacactgctttgagtctgttgcctaatagcatgtcagaatcctctcctggatggtgattttataggaaagtttgtatgcatatcacccagtctatcttttaaaaattaagaaatttaaatgtatgctggaagtaatgacactatattgtggcattttattttaaaaattggggaaagttgcatatttttttaaaagtaagtgtttgagtaaaaaaattgaaggtacttttttaaggaaaaaaatttatatgccacagtttacatagacatttcagattcaacacgtactcttgaatataatggtttcttttacttggtcaaaatgcatgtatagcatttctttcatcttagttccttgtgtttgcctatgtggtcctttatatattttttattgtatcgaagaaacaaaactatcttcaaaaataagttaatttggatatatttgtcatatcaaactacaaagtgtacaaagttaagtttagcccttttctagaaagtgatctttaaaattaaaattgctcctcttttaaattcaccaaatttatgtgtgggaaggcaccaaaatgattttgtaagtgccactgcaatattccctttcaagtgtggcctaaatttcaatcttaaggatggaatgcatgtctgctccttgttctgaaaaatgtaggcatctactacattttaaaacacagtgaaacatatacataagcctataaaaaaagatttgtgcaatttgaaagcctgttaattttttatgtagacatacctacacacgaaagggttaaattcacagccttactagttccttgcttccagtatttcaattggtctcctcccctcattattattattactactagtactattatttttgcacatagttaactgcccttcaatatgattcttaaaaagtgctgtttctgtggtatcgtattctctaaataatcatatttaattttttaaaacaaggttgcagtttctaattgtttcgttcctgtgtttt

SEQ ID NO: 185807 - DNA, 1627 bp, Homo Sapiens
  misc_feature (198)..(248): n is a, c, g, or t
ttggctacggagtaccaagcatagtgccaccagctgtttcattagcacctggagtcttgccggcattacctactggagtcccacctgtgccaacacaatacccgataacacaagtgcagcctccagctagcactggacagagtccgatgggtggtccttttattcctgctgctcctgtcaaaactgccttgcctgctnnnnnnnnnnnnnnnnnnnnnnnnnnnnnnnnnnnnnnnnnnnnnnnnnnngcacagaagagacgattcacagaggagctaccagatgaacgggaatctggactgcttggataccagcatggacccattcatatgactaatttaggtacaggcttctccagtcagaatgagattgaaggtgcaggatcgaagccagcaagttcctcaggcaaagagagagagagggacaggcagttgatgcctccaccagcctttccagtgactggaataaaaacagagtccgatgaaaggaatgggtctgggaccttaacagggagccatgattatccagccaagaagatgaaaactacagagaagggatttggcttggtggcttatgctgcagattcatctgatgaagaggaggaacatggaggtcataaaaatgcaagtagttttccacagggctggagtttgggataccaatatccttcatcacaaccacgagctaaacaacagatgccattctggatggctctcctaggaaacagtggaacagagttttgaccctcagtgactcttcttagcaataatgcatgcatttgatttaacaagactctggggcctgtgctgggaaccatctggacctttgcagaagttagagattcagtgcccccctttcttaaaggggttccttaacaaccacaaaaatccttatttctgcagtggcatagaatctgttaaaatttaattagaatcacaaatttatctcagaagctttttaacagttggtgaaatgtgcttgtccaacaaagcatcctaacagggtcgttcccatacacatttgacctggtcagccttttccaggtgaatagccccagttctgacataaagaaagttttatttgtattttactactgtttggtcaattttgatatataactggttacaaacagagccttactatttattagtggggaaatgattttaagaccgtccttttcagtatttaattctgacagatctgcatccctgttttgttttggattatttctgttttggaaaatgctgtctcatttaaaactgttggatatagctggatcctggataggaaaatgaaattattttttcattgtgttttttaattggggtgatccaaagctggcaccttcaggcacattggtctcatagccattactgtttttattgcccttctaagatcctgtcttcagctgggtcagagaaaacttcttgactaaaactggtcagaactcatcacagaaatgaaatacagtggtctctctctcccagaactggttgcagctaaaacagagagatcctgactgctggctataggattttggacttaatgactgaaattgcaaattgtcctttttcttggcattacagattttgccaaaaataaactttttgtatcaaatattgatgtg

SEQ ID NO: 185808 - DNA, 1186 bp, Homo Sapiens
  misc_feature (938)..(960): n is a, c, g, or t
actttgtacaaaaaagttggcagaaagacaaattgacttacaaaggtaaaaatgcatttgcaaagggagaaaatgaaggccaaacagaagcaggctccagcttctgcaaaaacttggattcacaaatgtccctgaacagaaaatgaagctcacttcagaacacacactctctgccttgaaaactaaagagactattacttccttttcacatgaccacaagtcctctgatggaaatgtacagcagaaactcttgagagagaggctaaaagcaactctgttctcccccttcccctagacttttcttacgaaaagtcaataattaagcaaattgcttaacacttggttccagttcctgcctatctggagtttaaatgcgtaatacaccattaatttccacgctgcagtttttattttaaagaaagtaacaagatgtctttacactgacactgaaaattcatccattttagagccaggaattcccatgttacacaggaaaaaatagaagtctactgaattaattttttaaaagaaaagagatcagattaaatatttctttgtttttccttttggaaacttttatgtataattctttctgcctgcctacttttctgcaaaaatgagatgtacagatttcggttccctgctatgaaaagtgatgtggtagcaattttataaatgttgctttctgatttttatcagagtgagaaaattaaaattattgatttgcaagtagtaaacagttcatattttgatttcccctcattttagtttaatataatttgcaataaatgtacatattgttgtttgtttcataaagcatatcactttaaaatggtttttactcctgtgattatgttggaatatttggaattttaaaggagtaaagactgtccagcatttggttttataatgtttgtcaccagatttttattaatgtnnnnnnnnnnnnnnnnnnnnnnntagttggactttggcagcttttaagaaagttggaggtgttttagattgctatcaattttcagcattgtgctatttggaaataagtgttttgcttttgtctgatggtctgggctcatttttatgtttattttagaaaactgttgcatcaatatattatgtttcttggcattgttcagcatagtaatgtgtgcactttatgtgtacacataatcatatttaagttttt
